United States Patent Application Publication US 2013/0034624 A1 - sequence listing, part 7

SEQ ID NO: 32051 - DNA, 952 bp, Bovine  19866881203577
  misc_feature (1)..(1): n is a, c, g, or t
ntttttttgtttttatgttttaattggagtgcagttgatttacaatgctgtgttcatttcaggtgtacagcacagtgattcagttatacacacatatatactctttttcaggttattttcttgtataggttattacaaaatattgagtacagttccttgtgccatacagtaggtctctgttggttttctattttttaatacagcagtatgtatatgttaatcccaacctcctaatttatccctccccatctccacaattattaatcccaatactccggaagtaccatcttgggatcaactcctttactccacaggatctgtaacttgttcagggaatggagctccaaccaggagcccctgggaagcagggtagggtcagatgtaggatcagtggtattccaatggagacctgtaactagcgcccttgctctcctacaacttcaaaaagtcaaatagttttcttattatggagttgggtttatttataggcccgacaccatgacactcacaaaactaaccaaataaaagttatacttgatactgggaggataacaagaagtagttttaagctgcctgaagggcaagacaaagaatgctgtgggagctgcaggcagtttcagggacagaggtaatgttgctataaagagaaaccaacctctgacgtcccgcgagctgggagtccagggctgtgatgagaagccagccagcacctgaagcgcacagctcgctccctggtgaccagaaaaccacgctcaacctgtgaggacgttgggtgaacccatcaccttttctcctctttcttgaagtaccaccgagggaaaaacacaaatctcgagtgcacatgttccgctgtcgaggaggctggggccagtctcctcctgctccttccaaacatgacgcccccccagaccccaccacgccccagggagcacgctcccaaattttaacatca

SEQ ID NO: 32052 - DNA, 1202 bp, Bovine  19866881235960
  misc_feature (1)..(1): n is a, c, g, or t
nccaaagtattggagcttcagcttcagcttccttccactgaatattcagggtcgatttccttcaggcttgactggtttgatgatcttcttttatatacaaagacgaaaaactatttgcaaaaaggagcacagaacattctggtacacacctcagattttttctcagaaagacatcttgtacttattcacattgctaaaagataaactgaactcatagtaagaattttaaaatgttgtttgagcaaaatcccatgtgagttgggcagcatcaaactggaagtggttagtggtgccctgcccacaggagctgctgctgctgctaagtcgcttcagttgtgtccaactctgtgcgaccccatagacggcagcccaccaggcttccccgtccctgggattctccaggcaagaacactagagtgggttgccatttccttctccaatgcatgaaagtgaaaagtgaaagtgaagttgctcagtcgtgtccgactctatcgaccccatggactgcagcctaccaggctcctccatccatgggattttctaggcaaaagtactggagtggggtgccattgccttctccccacaggagctgaggagagacttttatagagaaaagatgggagtaatgaaaggaaattaatcgactggctgtaaaagcgtcactggctgtttgcattgtttggggttttgatttcgtaaccattaggcatttacaggcttaaattttggtttgctgctggaattctccatggtagtagagccacctctgtcccttggattccttgtttaattcatttaaccacatagacaatatttttcagttgtgcttaggcaagaaacaggatggctatcagttagtcaagtcggggctgtcaaactgtttgaaaggggtgcatttcctaaccaaggacatggcagaaccacataaaaagaggatgttgcctctgtatataaaacttactgctgggagggtgactgttctcctggaccaacagatgttctctgttacaaaagggggaaaacatttaggctcttccggtggtgaatagaggccacaggttacagctttctttggaagttgcttttaaaaagccattctactgaggaccttctgttgccagccgtgctaactggttgtcctttgtattcactgatgacaacataaaggaggtttgtgcagaggctcgtacaaaaaaatacat

SEQ ID NO: 32053 - DNA, 772 bp, Bovine  19866881292178
  misc_feature (1)..(1): n is a, c, g, or t
nagatgacatacatcactgagaccgaagatgtgttctacacctacaagggctccctgtcccctaaagacagtgattccgaggtctctcagaaccgaagcccgcaccgaggagtaagaaacttgtgctcctatctttcctgtgtcccttggttggggctgttgaggaatttgcacaggccccatggccatttaagaggaggcagaggctagagccagcagccagctccctggggtgctctctgccaggctgagaacatcagtccactcccttcccccaagagctgtgtgcctggggtcattagctcgccctgcttttttgtcagtgacagcaacctaccgtccacacacccattagctctcctgaatggtgttttctccagttgatgagcaaaacgcagtttaaaccattccatacaccagaggttgagggcatgttgactagagcagtatgtctctagattgtcagccttcgtccgctgcaagattccccacccttgaaagtgtgctcatttctctctgcccacagaaaaccttctcagatccacagtctgtcctcagggcatttgttcgctttggtttttaatgaatatttagaataaaggaaaaaaaaaaacacgcgcagagaacatctcagcatctcggattttctttgttaaatttttgtcaaggacagtttgcatcaaattcttttatgtccccatagtcctttttttttcttttgtgacaaactcccttcacatttcaagatcaggaaaaaatatgtctctcctaa

SEQ ID NO: 32054 - DNA, 987 bp, Bovine  19866881411072
  misc_feature (1)..(1): n is a, c, g, or t
ntatttactgtcctagattctacacacctgctgaaaagaactgagtttatactcatgtttaaaatctatatatgtttctccccaagtcttaatacatgttagctccttttttcttaagctgtcagacaggctctgagaggagacatctggcaagagacaaggttttgctctctccagcctccaaaaagatatcaggggcttctgtttgaaaagcccacatcacaatatagtaaaactacactaatttaaatgcagttgtgtgtgtgcatggaggtggaattgtctataatagtgaaaagtctgaagtaatgaccggttatttttaaaaacaatattgcaagtcaagtcatcttcctaaaagctaagaaggtaacactcagtagagtttctcagggtctacttcaataagcagatacaaattttataactggtataacaactgcctactgggatatgagtgttcatagcctaaagtattaaaaagattattttttagaacagactaaaactatttaatattaatttacaatattgattttcttgtataattttccctaaggaaaactcaagggcaatattcatcccagacctgtgtgaatcacccaaattctacatttcaactgtcaagcattatgctaaatgagaactggaacgtttttctgtttgccacttagtaaatattttaggttctgtggtcagaccacttctgttgcagcttctaaagctgccattattgagagaaagcagccagagataacatataagcaaatggacatgactgggttccaataaaactttatttaaaaaaaaacaacaaacaggcattggccagatttggctcatgagacgggcatttccagccctctgtgctaagtcaagaaaccagagatgtatctaggaaagattgttatactttggcatttttctaaggatcaactggacaatcagggggtgaaactatagggagtagtttgcaattacatgaca

SEQ ID NO: 32055 - DNA, 794 bp, Bovine  19866881415686
  misc_feature (1)..(1): n is a, c, g, or t
nttcagcatcgtgtgttttgattgaactaggaacggttgctcttacgaaactgtgaggcaaagattagtatttaaatgaatgcaacacaaacaactagaggtatgcttcattaggccagggaaagaagcagtttatgattattgccagattcttgctttttttgcatgaatgccccaagaggatgagccagcttccgaaggaaagagatgtatttaaattcctggaaaggcctccaaaacaaatgtaactagtattttagaaaacactgccctcccttcctcttctttcttcacccaggggacagctgctgctttggcctaacaaccctccccatttctctgggtaatgacacccatctcttcctttggataactctcccctccattccctgtcattctgctgggactagtcagtcaggtaccacacctgcccctaccactaggcccaagcatgggcagctgacttcaggccaatcaaactctctcagaagagcttagctctcaaagctaatgattactcaagaagtaatgcaagagggaaaaatcacaggagtcactcctaaagggcttctccatgaatttatgttcctgctgctgctgctaagtcacttcagtcatgtctgactctgtgtgaccccatagacggcagcccaccaggctcccccatccccgggattctccaggcaagaacactggactgggttgccatttccttctccaatgcattgaaagtgaaaagtgaaagtgaagttgctcagtcgtgtccaactcttagcgaccccatggactgcagc

SEQ ID NO: 32056 - DNA, 3508 bp, Bovine  19866881524192
  misc_feature (1)..(1): n is a, c, g, or t
nctggttctcccctgtgtcccagtgcccggcccagcacctgaggacacagaaggtacccgtttgccacagcaagtgagtgggtgcagctaagcgccccccatataccgggccctcccttccccccagtatccagctctcctgctcatggagactgtggagtctatgataaagttgcagccggggagacagtaagtaaatgaatagctcacatgtcttaatagtagtgttaaatttagaaacagagcttcaaccataaaaaagaatgcaatcatgccatttgtaacaatatggatagacctagagattattatagtaagaaagagattataatagtatataagaatgatatcacttacatgtgggatctaaaaaaaatgatacaaatgaatttatttataaaacagaaacagactcacagacagaaaacaaatttatggtttccaaaggggagaggcagtgggggagggacaaattaggagttggggattagcagatacaactgttatgtataaaataaacaacaaggtcttagtatatagcacaagggaagtatatttaatatcctgtaataagccataatggaaaagaatataaaaggagagctagccatgcctcacttcaaatttccagacttctagacctcagcagaaggcaatggcaccccacttcattactcttgcctggaaaatcccatggatggaggagcctggtgggctgcagtccatgggggtggctaagagtcggacacgactgagggacttcactttcccttttcactttcatgcattggagaaggaaatggcaaccctctccagtgttcttgcctggagaatcccagggacaggggagcctcgtgggctgccgtctatgaggtcgcacagagtcggacatgactgaagtgacttagcagcagcagcagcagcaggggagaagggaattccaaagatgcagcttttgataaagccttgatcttccacctcatgcaacttctgcttagaaaggaattagaacctagagtatggctgttgcagagattcttctttgcagttttccctctggctgttttttctactttctcttgaatttttatcttgatggcaaatgtctcttatgaatcatgttgtgtatgtaagttcccctaacaggtttatttttgtttgaaatttgatctgctgtctatagaggcactggcaccaagacctccgtggttagaactgaacccttctgaatggagagaaattattcactttttgggcaaaagatccattttaagtttttatttctttcttgctcagctttctcttttggccttatgaacttggatccattgttcccatctcctttatggctgtgccgtgatcccttgaccgtctaaagaggtgccatcttgtaggatttctcaagggtctcatcctgaatcagtagaacctcttaaattgccccctggaagctcccatgtttctgtatgtttgtcacttagacacagttctttttttccttgcttgtaatctaaatgcagcctaggaaatttacaagagttcaactgtttttttaaattttttttgaacagtaaggtgtcacatcttgagttcagttcagtctctaactggattctgtccagatttattgtttgggtttcagagatttagccccaaactgagaactatattgaaacaggtccagatctgctaatgtttgagattcctcccagagcacaaatggtctctcacttgaagctcccctaagtgcggttcttgaatcttccatctctgtgttcccagtaaacactcacggtagaaacagttaacaattaatctgcttatgttctagtgacttgaaaattaagcatcaacatttctgaagcctctttttatcaaggtctgaagggtggttttcatagctgatacaaggccttggtttatcagctccaatggtctgcaaatgccttagacctgaatatttgggatgagcagagtgtgctcagcttaggaattccaagaaggcagaatcaagatagagagcagccaaggctcccaggtgtgaaatgaaaccagtttctaaacctgattcttctgcttagttgtaatatttaacacttggactcccttgagatttttgcacctggttggaatgttttgaaccttggaataatgcttctttgtggatttacctgtgaaacataacatagttccaagctatctcataagggtgctgttgacatcttcaaaatgttgattttatcttcctggtgcttcagaagtatgaaatggtatcctgagactatctgggccctttctctctattgagatcttagttgacagatgaatcaacttgctcaagttagtgatactgtctcttaagtgatgtactgcgtcatcctacccagcatccccattttacaggaggagaaatagagatggcggaaggagcaaggctagaatcccttccttctacactgtaaattcaggcaagggtctatatacctcttaatggttagttttctggagtttcacctcgaaagatagtaagtcagaagcttgaatacacatgtgtcctgtggctcttttgagactggcttgcagtaaaccccttgggttatttataccaggaaagggcacacttataccaggaaagcatgaatgtgtgatgtaaatgctcgcattgtagttcccatacaatagcaataatctatgctcatggttccctgatagcatctaagtattgatattattgcaacttaaaatttggttgctttgtaactcctacatgggagttgaatcaacttcagtgcacttgacccaagtttctgctttttctatagttttggggaggttttgtcattaatggcaacccactccagtattattgcttggaacatcccatggacagaggagcctggcaggctacagtccataggtttgcaagaattggacacgacttagcactatctttctttctttgtcattaacaggtagtagttgttttaaaggactcgatcgttaaaaaaataattaggagttaatttttaataatgtccatttggtggctacaaattactatgttttaaagcccctgttatttgacccctgttcatttcctgctcttgattggtggtgaacagcaaggctaatgaaatgcttaagtactgctgtgtttcacagctcattactctagggagttggtctttttttttcttttttaatgtaggtagacataaaatttatcagcaggcaaatccatgaggaactaactttattacaaggatccttttagacttgcaaattccctctgctagttaattaattttgcacaatcatctatttggtttttattccaaagcttcttgcctaatgtaagaaggctctgcttgatgaagcggtgtggtccagttgttttttatttctatatttccctgtctagtctaatgctcttttttacctctccagattctttcaaactcccttacccctcttactacaacataaacacacaaattattacaagtca

SEQ ID NO: 32057 - DNA, 1705 bp, Bovine  19866881573242
  misc_feature (1)..(1): n is a, c, g, or t
nctcttctcccaagtggagtaggccaatcagggctccttccagaagagtttctgtgtgtgatgacaaatgtcagttgtactggtcacctgctatgctttttccagtagtcatgtacagatgtgagagctggaccataaagaagtctgagagccaaagaactgatgttttcgaattgtggtgttggagaaaactcttgagagtcccttggactgtaaggagatcaaaccagtccatcctaaaggaaatcaaccctgaatattcattggaaggactgatgctgaagctgaagccccaaaactttggctatctgatgtgaagagtcaactcactggaaaagaccctgatgctaggaaagatcgagggcaggaggagaagggagcaacagaggatgagatagttggatggcatcattgactcaatggacataagtctgaacaaaccctgggatacagtgaaggacagggaagcctggtatgttgcattccatgggattgcacagagttggacactactgagcagatgaacgatgatgacaacaactggtcacctgaagcaataactggtcactccaaagagactaatgccccatgaaaaggaactgaggtactactcatttgggggtgtggaaagccaggctttcactggaaaatttaatgacccgttttcccagtgtaaaaatgggataaaaatactggtttttatctccatccactgattgggtagtaagttccctccttttaaataagtcctgttatggaaggtaataccatatctgttgggacagtatctgtggctgctacaaaaaccattattgacaatcgaaagaatattattaagcataaacccacacttagcaggcactgctaatgttttcagagattcttctcatagccgtccattcaagacgtcagccttgttttaaggtacctagtctcacaaacccaaagtcatcatccctacttgtacagagaatggtttaggacatctgctgctcttagggaactgagttcaaaatgtcagagtgttttatttgagtgcttctcaagccataggaggtcttgttaaaatacagattctgattccgtaggtcagtgcattagtcatgccttttttatttttctatatttctgatgctctgacatcttaagggcttgctgatgctgcctggtcaatttctagagacaggaaaggcctcaccttcaagtgcccttttagtatgcaaaatgacaaatccaaagctccctcctctctcctctcacaaccaactcctaccctccaggccactattcccctgccctaatcaccccagggtcaggtaccagacaactggaggctgcccctgcaccccagagcctgcttcaatgattcaatctagccaatcctaatcttccttactctgcttcacctgttcctttccatggacgctaaaataaaggcccttgctcatgttttccccacaacctctgcctcctgactgacccagctgcttccccaggtggccctgtgtgacacagcatgccatggctcttggggactgtgaataacaaagtgccttttcagtggcaattatctcctgatctgttggccttaccatatctgaatcataataaaacgtacatcttcaaacagccagggatggggcctggtgatgctgatgacccaggaaccacacttagtgcaggaaggctctaaattactgtgttc

SEQ ID NO: 32058 - DNA, 1487 bp, Bovine  19866881618526
  misc_feature (1)..(1): n is a, c, g, or t
naacggaatcgtcaaacatttgtactctcctaactgaacggattcctgcaacacgagagcatttcctctgcaaatctcctgcctggtaccacaagctgaagcaggtccctgggcaggcctggtctcgttcttactttctgggtttccttttctttcactctctctctctctcctggcaaaatgtcttgaaaacaggacatttacactacaccctcacgttatcttttctctctagttctttgcttttgaactagccttcaacatggggaagtttagctgagagccccccaaaccacttcctggcccgcctatggcaccgacaagttgtaacctgtcgttccgcagggatcgttggtaatgcttggcttgccttgctcttgttcaattttttatttccgcagaagctcattaggagggaacacttctgaaaacgtactgcctgaacctcaaaatctcttctggtgtattcaaactcaggcacagaagtcattcagaaactgagattgaagttgatttagccgggtgtctgaattagcccccaaaccacatcattcttattgtaagtatctctacttgctgtcatagaaacggttgaagcagtgtaaccacaaacattattcaccttccactattaaccctcttgttcatttctttttttttttttcaaagctcttctggaaattctacaacttcttttaaaacagattttctagacaatgactgcttttttgctgatggagtcctattataaaaataggaagaaattcagtttcaatatccctctgattctacttgcttaagcagttgctttcactccaaaatgggcaggaaggtaaacactgcaatctttttaccatttctttaaatgcttttaaaaaagagaactcacagttttctggagggtgcccacatgctgttaatccctcttgctccaccatggtgctgtgggactaaacggaggactggctgccgtaatcctttaactggcacttcagaaatgatgtagaaaagctaaagtctgtcttgcaaaccccaaaacttgtctccacaatcttgcctcgatcagcttccaaagtataatgcagcgtgattattttcctctggggaaacctgtgtaacaggtctctgagtgccattggatgtgtcagaggtttaattgattcttcaccatgtctctgcaccccataatagccttgctaagcacaggacgtgttttacgggaatagtcacccagagcttaatttgttgttgtgaggcagacaagactgtttcccaatgaaattaaatctgtttcgtgccctgcgagtttcttcctgatgaagtgtgctctgctgactactgagagtgcaacccttgatggtctccaattagcatggatgccattccagggaaagcttactctctgttccttgccagttttggaaaaacattctggtggagaacagggctgccacagaactctgttccttgatttcatttacttttct

SEQ ID NO: 32059 - DNA, 1886 bp, Bovine  19866880345622
  misc_feature (1)..(1): n is a, c, g, or t
ntctcttgggcccttgaatctctagccctctgttttccatcttcggacagccattctcccattctctgatcatactctggctccaggctaggatgggaggtgtcagtgcctggagtttcttcctaagacagctttaatgagaacccaaatgacagtcacaaacatcttgcatcataactggcctacgtggcagctattatgaggtctgagtttaggcatcagatggtcccctggggtgaaatggacacacactaccatggtctcggtatgttggagtccagaggaatagagtgggcagagaagtatagctgggagacaatctgaccatgtcaatgccacttataagcccataaagactgctcagctctttctggatgaacactcatcacctgaagtctctccctggtattggcttgcctctccaatcttagctccaatcttagttcctcatgctccatccatgaactctatccatggttctaggaatcagcttctagacatactcccctcttgtctcaaatacgcctctctgccttgacaacttgcttatcttttagggcccagcttatctggaaatatctctgagaaatactgttagtgcaaaaatcaaggcacaaaagtatataaattgtagacaacctttttgtattgaaaaggaaaaaataagcatgtatacttgcatttgcataaagaaacactagaataatacatgcaaaaaatgtcataaatggctatcagaggtgggtacctggcagatatggatagggtggtaatgcgtcttttcattgtgtacattattgttttgtacagtattgtttagaaccatgcgagcctattaccttttgaaaaaaatgagtttaaaaagtaaagaagcagctcatggaagacgatgtctctgacaagtactggtcctgaagctttcctttgcttctaccagaaaacacccctaagtggcgatatgtccagagctcatgcccacagcagccatctgaaacacaccaatgctcctctcacacacccaggcaatttcagttccctagaacagctgtgaacctgggaatcagcagccagtgccgcggagtggtatagacagtgcctcttgccctgtatgcatcgactcacacatttgtcctacacacagccgtttgcacaacccacacaacacctggcatattgcgtgcacagcacaaatgtttgtggaacaaccaatgactggtacatgatggaatactaaggactgtactttctggtggtccagaggccaagcctgcactcccagtgcaggtggcctgggttcaatccctggtcagggaactagatcccacactcttactaagaatttgcatgcctcaactaaagatcccacttgccacagtgaagactgaagattgtgccgcaactaagacttggcacagccaaaaaaataaatattaaaaaaaagattattatggatctcagttcagatggtaaaaatatccacctgcaatgcaggagacctgggttcaacccctgggttgagaagatcccctagaggagggcatggcaacccactccagtattcttgcctggagaatccctatgaacagaggagcctggtaggctgcagtccagagggtcgcaaagggtcagacatgactgagcgactaagcatggcacacatcaaaaaaatcaagtcttagtcaaatttccaataatactctcgggatgtaatgtgatatttttttaaagaccatacaaaacttatatagagtatgatctggctatgtcaatacaacagtattcaagaagaaaaaggactagaaggaaaaacacagagatacgagcagtggactgtggactagtggaggatattctaggactggccatggacctgcagcctggtccca

SEQ ID NO: 32060 - DNA, 1346 bp, Bovine  19866880370306
  misc_feature (1)..(1): n is a, c, g, or t
ncagtgcttgatatgtaataaaaaagttcaacatacgatagctattagaatgctctttttgctgggaattaaagtcattatatttcatgcccggccattaagaggtacaccttttacactctggaagtgcatataccttattatatttgcgttcatttacatatttacttatagagaacttagcatttgcatatcctggtaaatacatttctctgtaatttagagtcattttagcagactgtaatggcacatttctctttctgacacagcttcttggcaaattaacttacttgcattttcattttaaaaacgtgtggtgccttcgcagaataatttcccgtactttcagttcttcttgtaggaaaaaaataattgcacagccaaggaaagctgctttcatgcattgggactctggaatgctgctttatgtttatgtccaggctctttgtgggtggactgtagaaatccccactcttgggaatgtttctgagccccctctgagaaactgaatagggagaaaagagctaattaaaaaagctgccgtccgcctcctctaattaacttgctctccactcctgggggagggtgtgaaaatatgaaaacggcactcaggcggtgctggaagtgaatgccattctaggggtccctggtagcctctggtgttttgatgcagaaaaggttcatagtaaacaaggcgaggagcctcacaaggggcctggtgtacccttgccctccctggacactgcctcccacacggggcgctggtgaatggtggtcccctctgagcaggtgtgcacgctgggcagctgcgagctggggagacctcattggaattcagcagcttgaatccatgagcgtccggccctccctgtcgcttgcttatgctgctgggaaagatcaggggccctttgtgctctcaagccacacatcgctggagcccggggatgcagaagccgtgggaagagctccctctgcatctctgctgggccctggggaagctcagaacatccctgcctggtggtgcggcggctaagtttctcgtgacatcgtaaagagattcagaacccagacgtatcagcaaaggaattaggggtggaagtttggggacagaagctgttcttcagcggaaatggctttggcctcctggtggacatggcccccggtggaatgggcccggtggatgtggacgacggtaacccggcagtggggattccagtctgcgggtccttcacggaaacccaggaaagaggcaagttgtctgtgtgcgtctcttcaacattgccgctgatgagtgcaaagctgggggccaggtctacacccagagcccaccgggcagatctaaacta

SEQ ID NO: 32061 - DNA, 2693 bp, Bovine  19866880532907
  misc_feature (1)..(1): n is a, c, g, or t
ncccagaacaatggcaggcttgttaacatcgttcagttgctcagtcgtgtccagctctttgtgaccccagggactgcagcacgccaggcttccctgtctttcactatcttccagagtttgctcaaactcaagttcattgagtcggtgatgccatccagccatctcaccctctgtcaccttcttctcctcctgccctcattctttcccagcatcaggctggcaggctaataacaaaacaatagcagctgtactgacctagtggcacgtgctatcatggttaaccctcacaactccagtgcaagagggacattgttattgttccccattttacagagggctcaaagacacttcacatatatgttgctagcatttactgagtgattaccttgtgctgtgtattagttcatttaatccccacaacagccataagaagtcagtactattgctattcccatctgggaaacaggcacagagaggttaagtaactattcaaaagtcacacagccagtaagatctagacagtagagtaaacccaagtctgtctaactccaaaaaccatgctctttcaactaagctctgcctcccaggtttcaaggctaattcatgttgcaaagacctccatcacagcccaaagcaagaggaataaatatctattttaaggaatctggtgaaatctaaaaggatgagtatggagtgcaaggatatgtaatccacagagcacagagggtcccagaggctggtggaggcttgtaaccaaacacagcatgtgcccacagcatgccacgctgtcctttctgcagccttgtaggcttccacgtgggcagacaaaactcagaccccacccagagccctgtggcccttcgggagatgttgctgagtgtttatggaggatccaggcccgccagccgccaggccagttccttccagaggaaccatctgtgatctcctgagtggatgacaggccgaagacagatgggctgtggccgggctgcctctgaccacatgccacccacatgccaccctgcacatcctccccacctggggcagcccctcggccctggggaccaccagaggagcagaccaagaggcagaacatctgagtctgagcccctggagctgaaggccattctctgagtcaccacctttaatgaggagggagggaacgcaaaacccacgccagcagggagagcgtttgctggctcctccctgactctacaaggtcatctaagcagggagcggagggacgcttccgtgtcccacagaacaccagcggcccagctgccaagcattgtaccgatgagggcttggttctgctacacctccacttcacttgggcctttgacctgccctagcctctctgttacgaatggatcgtcgaggtctagcggtcgagggatggttaaagctctcaatctacaaaactgaacctccatcctgttcaagtacccactcctgatgactgacccttagaaagccttcaccctctgctctggttgtaaacagccccctctgtgatgtgtgcaggcactcaggtctgtggaaattcccaagctcaagttttcctgggtccagcttcccaaactcctggaagctttctccccaaactcctggaagcttatctccccaaacccctggagataaaggggtccacagctgcttgaggctgtgtctgttctaggacgtgtcaggggagccctgctccaaacccccccaagatttaaggttctatttcagagcccatgacagctgaaatcagcttcagcctgtactttctaaagactcaggactgctctcaggtcacatcctggtctcctgaaccatctccctttcagaaagagacctggtctctcagcggaagctctggggttccgctctgtgctcacccctcttcctcagcctatgcctcacctggcacagactagaggcccagggactctttgctgactgattgcatgatatgtggggttgacagcctctttttagtttgaaaagccccagatgcaagggcaactgacttcaagcctctttcaggaatccggggtgacggggcacagtgttcccagcacgcgtgaacccccaggctgactctgaaataactggtgagacctcgagctcaaccctcacagacaacatggtttaaagagcaggctgttgacatgataatcgattcaaagagactgtaaccagctgttcccgggaaagaaggacgccaggacgcaaagtatgaacaagtattttaataactcaagtcactgtgctcccagttctgaagagattcctaaaagaggcaactgtggccattccggaagccagcgctcaccctctcgttgtctcggcatctccctcctctgggtgctgactcggaagaaagcataaacacgcccagtaccatcctggctcccataggaccttcctcttatctatgcgttacagcaacagccttagctggactaagatggtgactcagttaaaggggaagacaaatgctgactgtccgagaagggacggtccaagctggcaagaaaaagcacactgcgtacataggatacagaagggggagcttctgcctgcgggtctacaacgttttacattggcttttgcctgcgaactatcaagaagggttctgctggccagtgtttctgcggaacaagcaacatggcagtcaagtcttgggcatccggtgccaccagccc

SEQ ID NO: 32062 - DNA, 1372 bp, Bovine  19866880625459
  misc_feature (1)..(1): n is a, c, g, or t
nctcagactgcaaactcgtcccccacctccatgtgccctgagagagtgcctgtttgtaggggctgggccaaggctgccaccgatgatgctggaaaagacgcgggcaggtgaagtaaaggaggagagagacaacccaaacaagtctaagacagcctcccccaaggaggaggaacggctttcagggggcgcccggccagctggccagtcagctataagcaaggcccagttctctgcagtttcaactttactggtaaaaggtaaaaggccttttccagaacaaagcgtctatgtttaaaggtgcctgtcattgataatcgcttttcagtctcactggcgaaaaagaaaaaagtcctcgcttgcatacccatactgaatgcttgggtttgctgggtattgttgcctttcatagttttttttttttttttttcctgacctgtttgacgtattaggggaaaaaaaaagagtttccaatccattccaccacacgatttcttttttcagaagtctcctgaacacccagcatgatgtgtctattattatctttggggaaatggctgactgctcagctcacaaaaacactattaactttcctcctgataagcatctggctccggtcttgaccttcccagatttctcagcccggttcttttcctgctccagctcctcctgcttgttgtgtctgaagtggccaaggcagttcaggcttccgagaagcctccagcctcaagcagcaggcttggaggtgaccagtctgtcgatgaagggcctgggacacgctcctgagctgtcagcagccatcctcctgcaggtcctggtggagaggggtgggcccggtgcttggggttagaagatgggaaagtgtgaggaaaaggatgtgatggtgaaccaagaccctccatccgggtagggaccatccagagaggtaccccttctgcccatttgctgataggcagtatcctcgagcttcccaggtgactccgtggtaaagaatccacctgccaagcaggagatgcaagttcaatccctggatcaggaagatcccctggaggagggcatggtaacccactccagtactcttgcctgggaaatcccacagacagaggagcctggcaggcaacaaaggggatctcaaagagttggacatgacttagcggctaaacagtaaaccatcctccggttaagaggaggggaacttgtaaaactgagacaaaactcagaagaaatctttggctcaagtgagaagtaaaaagtaggtcttaagacccaagatgagccacttcccttctctgggcctcagttacctcatcagtaagatgagggggatgactaaaccatttccaacatcctttccagctcctaaaaaattatacga

SEQ ID NO: 32063 - DNA, 1925 bp, Bovine  19866880646435
  misc_feature (1)..(1): n is a, c, g, or t
natcttgggcctgtctgctcggtgcagcgatacctccactggccaattcctacttggtaattgagcattttattccatagctgtctagacacacactccaccagggaacctggggaagatgcaatgcagatacagcgggaaacgccaagacatgcctcagccttgacctggggataggaaaaccctggggcccaccctcgaccccctcccaattcccagtttaaccctgcactgcagtccataggctggttcccacgccgcccacatcaaagctgtctccaggctcctggcggcagacactctgtctgagcctcgctctgcagcgacccggccacaggccatcttggagatgccagcctggctcctgacagctgctgcccacatctcatcacctcaccagagcctcgcagcacgcctatgaagcacaggcacggacattcatcctccacttggcaggcaggcaggagcagaggggaaggaggaagaatgggcagacgcacagctcctgttcctcgtcttcaggttctccagccattgcaggggaaggtgaaatgcagtcaggcacggagcaaagcaggagtggagagctcgtagtggcgaaagctcaaccctgaggctccgtaccagagccaagcaagaacccttgaacctcaccaggagagcctcatgttatcccaacccctccagcacgaagggcatcccaacgtgagtccatcatactgcccgttctcaaggtcatgcttttgctgatgagagggaggaggctgggaggccagtgggagaggcaggaagtctaagttgaaaggcacgtggccctcagcctgtaagtgactcactggtgctaaatgagagtcagagtcagcagagtcagcaagaggggctggaagggaacacggatcccccgggtcattggccatgccacccaggtcgacggagaaacagcccagacgagggtgtcagaatcttgcatgtggactccagacgcgccatgtccgtgttaagtcactaatgataagccgtaagcaggatacaaatggtgtgacagatttactgctaaagcatggaggcatgttttattgctaacacatacatagcatgattaaagaaggctcttaccattcgtttagatgacaacaaacgaaggacccacaaccagcaggcctggcagtacccctcccatgaaataatgcctacactgaaagagaaccttctcaacaagtattcaccaagggccaggcctggcacagggatcacaaaagataagtgaaatccacctgtgcccaccaggcttactgtctgacgggtgggtagacacacaaatcatcaggacacacagcaataaaaagagctaaaatccatctccctcccctagggccactcagcagagaatcttccctaagggctaaatatagatcaacactaaaaaatgatttgagtgaattaactaggtttttttttttttttttccagccgcaagtaagagaaaaaccaatgcaaataaaataaacatccacctgctcgagggcagagcggtgcgaggactgatcacttccatggctcgagggcagagcggtgcgaggactgatcacttccatggctcaagggcaagggcgagaagcagctccttccttccttccagcttatcaacggcagcctttctcacggccacaagagggccaccatcattccaggcaggacatgaagatgtggcaacacaaactggaagtaataggctctttgctcccttgtgtgtctcttcagaagggctgagtgtctaaaagggcccagcacattccattcttccctggcggtcaaggttaccctcaaccatactttggtggggggctgggggtggtcatggcccccatggctgccttagcccctcaggatttgcctgagataggtgctggggcgggggtgtcagg

SEQ ID NO: 32064 - DNA, 2855 bp, Bovine  19866880669051
  misc_feature (1)..(1): n is a, c, g, or t
ntcgataacctatatgtcagcaatttggtagtttcataacatgttggagcaatgaaaactaatctttctggcaaattatttttgtgctgtgcattactggcatggtctaagatgtaacaaaacactgtaaatgattaactgtcgtgtaaagatgaacacgggcttccctggtggctcagtggtaaagaatcctcctgcattgcaggagatgcgcgttcgatccctgagttgggaagatcccctggagaaggaaacaacagcccactccagtattcttgcctgagaagtcccatgggtagaggatcctggcgggctacagtccatgggatcgcaaatagtcagacatgacttagtgactaaacaacaaagaggaatacactggatgatgctggatattaggtaggtgtttcaaacgcattttcatattaaggaaaccagcttgatcagctagttttaggcatctccccccgagaagggcatctagaacaccagccctgggcttaaggtggaagatgcgaattgctcatgacccagtgaatgggtaactgcacatggaagactccttaaaatgatattgaaaaggaaaggtcagcacgcaacccttaactcttcctagatcacaaatccatgtcgtgtggtgctcaaatctagaattgctctgtgttttaaaaattactattttgaatatgcttcttggcagaccaagtattgaatacacaaagcagataaaacagaggatattcacagtagagcacaaggtctgtaggacaagagggttggaagaaggcaggactccgagggcaaagagaatggggttcaagctctgactcagccacttagttattacgttatgccactgggcagttttctccactttatttcagctccaaaacaggccaagaaaacgtacctcctagaattgctgtggtgtttggggacagcgtgtttaacatgccaaccccatgttggcccttgtgaaatcgaggtgacaggggtcatcttcatcactgccgtcatgcttctatctgactccatagatttgtgcctcgtgttcagggctctattgattacataaaagtatcctgcgtccttactttttgccaggaggggcgtatgaaatgacttattcatctttaaaatgacccaccatttttaaatttcccacccacagttgcctggatcctactgacttgtaagtgatagattgttagattgtggttgaactgagctgaattgtaagcttttgattttgacagtgggtggagaacatgggcttttttcaccctttagcagaccataattaaatgactagacctgaaaagagtcaacagagactattatgtccacctgtttacctgtaattaggacacaaaggctctgaaatatgcgtgctccagggtcagagctccaggcactgtgaagtcttgggaacctgtctggattccctgtcttttttaaaaaatcaaagtttgctggagacacctttggggccttctggtaccaggcttgaacttgatttttacagcaaagggggcagctagcggctctttgtaatcagagtgctttgtggtttccataaaagaggaccagttcttctgaccatgggaagaacaaatatgaggcagtggttaagcatgcaggctgcacaccacttagacctgggactgaatccaagcactcacttattattagtgataacatgctactttacttaactttcccaagcctcagtttccttatctgtaaagtgggcgtgtgataacatcggtgcttttctcataagctttgggaggataaatgagttactgcagcacagtgcactgagcctaacaaaacttcctgctatcattgttgtctggtctcccagagccagttgggtgccctcctggaagtgaccttgactgcagaacttgaattcattgctctgcttcctgcactttgggcctccattcataatagctggttagatgagaacatcaacctctaaagctcagactcttctgatacgtggatgaaagctgtgaattttatacctaggaagaagcacacagccgtatgttttaagtgttcatggggctttaaagcccataggtccatcggaccaggttttggaatccctggctcaaaggaaattaatcagaaaggaattatggagcgcttcaatgaaccacatgagctttccaggtggcacaatggtaaagaatctgcctgccagtgtaggaaacgcaggagatgctggttcaacccctgggtcaggaagatcccctggaggagggaatggcaacccactcctgtattcttgcctggagaatcccatggacaggggagcctggtgggctccagtccaaggggtcactaagaatcagacacaactgagtaagccctcaagtgcataccagtgcacaatgcttgccatttggcgggatgcaaaatgacatgggcagtgagtacttttcaccgatctttgactctttcaaagttgactcattctgtggatccattcaaaaaagactcatagaaacgcttctactggttgatggcagagtttctgcccagaacatcagtttgagaaccaggaatcatcatttattccacaaatatttattggatgtactctgtgtgaggtgctgtacagcgaacaaagaacacaggagccctgccttcctggggcttccagacaagaggaagaaccttaaataagcaaagagatgggtaaagagggactgaaatgacattcagtccctttatctactcctattcagttttaaatatttatttatttatatttatttttggctgctctgggtctttgtggctgttgctggccaaaatcttggccttctctgcccaccaaa

SEQ ID NO: 32065 - DNA, 2371 bp, Bovine  19866880716759
  misc_feature (1)..(1): n is a, c, g, or t
ntaatatatagtccaaggggtcacaaatagatacaactgagcgactttcacttcacttgagcattttacaagcacaacaattcaagagaaagcaaactacctcttcagcaaactgacttaaaaagatggcttggagcccacagctccaattactcccaagtcacgccccttcccagaggctgctggggtgagattcccccccaccaaggtgtgccgtgtcctgggggctcacctgagcagacgacgcctgcgtcctcgtggtgcccgcagttgtgggagaaccagccgctgtgggggcactgccacaccttggcctcattccccacgcactgcacgttgtccaggatgatgtggccagtgcctccaccgaagtagctctgctttggggctgacaaggcctcgccacagccaagctgctggcacacgaccctggcgtccgtcaggtcccagctgtcgtcgcacacggtgccccaggtgccgttgtaggagacctccacccgaccctcacatctgtgactgccattccccagcctcagggactcacctggggacgggaaagcagagtctcctgagctgcggggctgtgccccatctctctggaaccttctgcccaagagaggatctctgacattctcctatgggcacctttctgcatattcagctgctggactctagatagggagaccctatgtcctgatgtgccaggaactgttcagtcactgagttgccgccaactctttgtgacctcatggactgcagcacgccaggttcctccactatcttccgatggttactcagattcatgtccattgaattggtgatgctaattatctcatcctctgccaccccctcttttgccttcaatcttttccagcaccagagtcttttccaatcagtcagctcttcacatcaggtggccaaagtattggagcttccacttccgtatcagtccttccagtgaatattcaggactgatctcctttaagatggactggttggatctccttgctgtccaagggactttcaagcatcttctccagcaccacaattcaaaagcatcaattcttctgcactcagccttctttatggtccaactctcacatccatacatgaatactggaaaaaccattgtctctatggatggacctttcttggcaaagtgatgtctctgctttttaataggctgtctaggtttgttatagcttcctggtttatgactggggaaggtcaattaatgcctgttgaatctgcctgcaatgtgggagacctgggttggatccctgggtggagacgattccctggagaaggaaatggcaacccacccaggtattcttgcctggagaatcccatgggcagaggagcctggggggctacagtccatggggtcacaaagagtcgaacatgactgagcgactaacactactactggcaattatttcagagtcctttttatactctccgaagtcccctgacggagggataagttgcacagtcaccctcagcattatctgctgagagctctgtaatcatcttcctatcttgtataggaagtattctggatggtttctgtattgaactcagctggaagcaggtgggttggcagttgtagtttgagatggctttgttctagaaagatctgccttactgcatttctgcttcctttggagaagagcaggctgttgtcatgggccctccctcaacatgcacggccatggcaagacgtgagactcggctctctatctctttagggggacatcttggtggaggaagacgacattgagggacagagcagggggaggggtgatctgggggctgtcagtgtcagagtgatgtcactcagatgtcagtaatgcgggtggaacccacaggtcagatttacaaaagcatctcctctcttaaagggaaagggtgcacattagacaggacatccccctgaagtccaagttaggatacccaccgctctccctttcgacctgctggatggcgctgtacatggcgtagaaccccgtgtttgtgatcctggagtcgctcctgaacaccgtggtcaggatgtttgaagaagagtggaatgtgagcttggttccagcacaaaatctgcccaaggagagcgaggcaacctgctgtccatcgaacacttcgatgaagtcgtaagggcacccgtagacgtcctctaagctgaggaggtgaaggcagagttaagctccccaaggaaatctgccagaatgttatacataaagtcaaatttttgaatcacatacagccagaaactgcagtcacccccgcatctccttccaaccacacatctccctcatggacttgacccctctgatgctgcctgagtctgccctttttgtcccactccttgttggga

SEQ ID NO: 32066 - DNA, 973 bp, Bovine  19866880729676
  misc_feature (1)..(1): n is a, c, g, or t
nttggcgcttagggctttattttaagaagatccagaagccccaaggcaggcagagatttgagcagatttgcatttttgaaggatctctccagctgcttggcagggctggagtggtttcagggtggatcagggcccccagggtttagggctgtgtgtcctggcccagtggattggatgggatggggcagctgcggtcccatcgccctaagtacatctcagctgtgccttcagggttgccagccccaccctccaccccttccatggctgctttttacaacagggctgtggcctggatccagggatccacataaatcctgtctttttgcctttgccgggtccttggaagttttcaaagcaagtttcaaaaatgcacagatgaagatttcatttcactgagatggaggttgttattcaggtctaggctagagtccgaggtcccagctggtctcatggttcagagatgtatccttcatcagtacgatttccaggtttacctggtggctcagttggtagagaatccgccttcaatgcaggacatctgggtttgatccctgggtcgggaagatcccctggagaaggaaatggcaacccactccagtattcttgcctggaaaattctatggacggaggatcctggcgggctacagcccatggagtcacagagagtcggacatgactgagagactaaaccaccagcagtgcccgtttccagccagacttctctcgctggagctggcacacgctctgtgtgtttctgtgtttactccatgctcaggcgactgcagtggctttgtcttcccctttttgggcttggaggggaccaggagggcatcaagacccggcatcttaacaaagaaagcccagggcacagctcatcacagaatcgacagatgttctgttcttgcaagcacaccgggtgacttcctgcagcctcccccttcttctgatggctgctgtggaaatgatgacatca

SEQ ID NO: 32067 - DNA, 2686 bp, Bovine  19866880749104
  misc_feature (1)..(1): n is a, c, g, or t
ncagatgccatgccgattttccagctgggcctgactaccttctcccccatcccttacttcactttagactcaatggcttcttctgtgttctagaatataccagctgtacctggtacagataaagtagcttttggcactacttggaaagatcctctgggcatcagtatggcttgctatttcctttcattcgcatctttgcttaaatgtcatttcctctgagaagtcttcatgattgctcttttaaaaataaatcctcccatcactacactgtcttaccctactttctttttcttcagagcgctggcatatattcatatatttcttttgtgtgtgtgtctcctcactatgacattcggttccctccaaacgttccaatatctagaataaagcctagtacagagtagccactcaataaaaacctactggatggatgaaagcctgattccaggggtagaagtataacacaatcgagttgcacatttaaactgaaaacatgatgtaaacgtcacaaatgaaagtacgtaaagtactcgtgtccagggaacaagagtagtagtagagcatagtctcaatgaatagagtcttaactactcagcatacctttggcttccttcattgtctgagagacaattcttcggagggtctgatcagcttgatgaagaatgttagttgaaccgataagtctgtctgtttcctagataataagacattgttattgggacagttacctagttgtacaaaagaaatgagcaaagtgtaggtgatacataggtgaagacactgaaagaaaagtaaaagtggcttttctcttccaggtatccttctctactgaaagtgttatttgctcagtcgtgttcgactctttgtcaccccatggactgtggctcgcctggctcctctgtccatgggatttcccagccaagaatactggagtgggtagccattcccttctccaggggcatcttccaacccagggatcaaatccaggtctcctgcattgcaggcagattctttacatctgagccaccagggaagcccctttcttctctaggagagggtctaaatgaaatacatcaagttgtgaattgggttccatgtaggcagtatgctggttaatgtctaagaataggctctcgaagacagaaacaaacgcatctatagtgtttgtctatttagaatgggaaagattctctattcaagaaaattagagataccaagggaacataccatgcaaagatgggaacaataaaggacaggaaaggtatggacctaacaaaagcagaagatattaagaggtggcaagaacagacagaagaactatacaaaaaagatcttaatgactcagatcaccacgatggtgtgatcactcacctaaagccagacatcctggagtgaggagtcaagtgggccttaggaagcatcaacaagcaaagctagtgggggtgacggaattccagatgacctatttcaaatcttaaaagatgatgctggtgaaatgctgcactcaatatgccagcaaatttgggaaactcagcagtggtcacaggactgctgtgacctgaaaaaggtcagttttcattcgaatccccaaaaagggcactgccaaagaatgttcaaactaccacacaattgcactcatttcacatgctggcaaagtaaagctaaaaattctccaagctaggcttctacagcatgtaaactaagaactcccagatgttcaagatggatttagaaaaggcagaggaacctgggattaaactgccaacatccactggatcatagaaaaagtaagagaattccagaaaaacatctactcctgctttattgactatgataaagcctttgactgtgtcgataacaacaaactgtggaaaattcttcaggagatgggaataccagaccacctgacctgcctcctgagaaatctgtatgcaggtcaagaagcaatagttagaactggacatggaacaacagactggttccaaattgggaaaggagtacatcaaggctctatcttgtcaccctgcttatttaacttatatgcagagtacatcaagtgaaatgctgggctagatgaagtactagctggaatcaagattgcagggagaaatatcaataacctcagatatgcagatgacaccacccttatgggaaaaagtgaagaggaactaaagagcctcttgatgaaggtgagagaagagagtgaaaaagctggcttagaactcaattcaaaacactaagaccatgccatctggtcccaattacttcatggcaaatagatggggaaacaatggaaacagtgacagactattttcttgggctccaaaatcactggcagatggtgactgcagccatgaaattaaaagatgcttgctccttgggagaaaagctatgacaaacctagatggcatattaaaaaacatagacattacttttccatcaaaggttcatctagtcaaagctatggtttttccagtagtcgtgtatagataagagagttggaccataaagaaggctaaggactgaaggattgatggttttgagctacggtgctggagaagacgcttgagagtcctttggactgcaaggagatcaaactagtcaatcctaaaggaaatcagccctgaatattcattggaaggactgaagctgaagctccaatactttgggtcacctattcgaggag

SEQ ID NO: 32068 - DNA, 2945 bp, Bovine  19866880761772
  misc_feature (1)..(1): n is a, c, g, or t
nctttgaaaacttatattagattttcttttttgcagttacatttgaaaatgatagaatgaaaaagatttatttattctctttctctgcagatatatccattacatcggctcttttagaaagctcatttttcatgaacacacctaagacatattgggcagacagttggtaatattcaggactttaatactgttttctttggtacagcttccatattacgtgttcattttaatattttggtatggtaatttaatatacttcagagtggaaaaatattagctttattttgggactttttatagaactacccttgtattcaatagcacaggaaaatgttcttgtgagtttcagggtctctttatctcagtacttttatgattctatgaaaattatttattttaaaacttatacttttgttgtaagtatgccacatctgaattgttaaaaaattactttgaataccttaatatttgctgcatttttttctgtaactataacatgacttctttcagaatggaaatatatgtgtgcttcccaatgtttacttttgtgtctgatctctttatatgtccaactgtaatgatgagaataaatgttcaaaattaattctaaaacaaaaaaacatccagaaagcacagatgagagcataagcttgaagcagaaagactgtctttgttcattgagaaggccagagataaggcacaaggccaaggtttctaattgcctgtggaatgctttattttgcagaggtcctgctggaagctttgtacttgactgtggatccttacatgaggtattattttcctctggaaaattcttatgttgtgcattggatactaccttgccatgggcaatcttagaataatccactgtcacttcctcatttctcccagtatgatgtcagtgatgggattcacagatgctcatctttttcaggcaaaagtctgagcagaatggtggtagacaacactggcccctttattttacaagcatcccctatcttattgtgttcaatttgcccctcatcatttatcagaattgcttcccaaaacactaaaagaagaaataagccaaactccagtttttccatgtcactgttggcaaatgatttgggtataggaagatggctgagactaaaattagattttcttgcctttcctttacatatattcttgtaatttaggtaatctgcagctgactgaactgtgtgtacttagtaagcaattcggggtggggagggaataaaagctttcattggccactgagtcaataactttttgcctaggtggacaatgcagtcatcattcttttaaataaatttttttcacagttgattgatagagattcagatctaaagtgaaaaatgtatttccagatgttaactagcatttctttttgcatgtctagtgttttgggtaacaagtgcccagtggtacctgggttatgttttcaaagtcattggtagaaattcagccacaattgagcgtgatggtaagattctcatgttcatttcatagaaaaatactaccagatcaaaactgcctgttacagctttcctccccaattccacctagtggtactgccctcatgtggctggtttcagttttatatacacttccctagtggttttccatttggcttgaaacttaagacaatttcctcccagatgctcctatatattaagaatggttttgttttgtttcagaattatggcaaaaagcttgaaggagggtgacatgatgatgggagagcaagtggccaggtagtgatatccttttgtcccactgcttggaaaatatgtctccccttcacctcctgctgggccctgtttctgtccatcactcttacaacctcttcaggttgcgtgggtcactcactgttcaacttggaaattacctgggaaatctgtccttttcctgactagctgatggggaggaaagaaggcgaacttcttatcattgcaacttagctttgctatccttacttttgagggtttccctggtggctcagatggtaaagcgtctgcctgcaatgagggagacccgggttcgatccctgggttgggaagatcccctggagaaggaaatggcaacccactccagtattcttgcctggaaaatcccatggacagaggaccctgggaggctacagtccatggggtcacaaagagtcagacacaactgagcgacttcactttcttggagaaagaaagtgaaatggggatggggagggaagaaggtgaaattcttatcattgcaacttagctttgctatccttacttttaagtactaaaaaaaaaagtgtattcatgcagttcctgattattataaaaattcaaataagataaaaatttatatattggaaactaaaagttcccccatcatctgaaccttagagatgactgtcgttaatgtattattatttcaaaaattgttcagtacatgtactaatatttataatctttaagggaattaaaagcccttcagcaaattgcttttcctcaatatgtcatggctatcttttgttgacagtgtataaatataccacttacctcttaatggcttgcagattactccattgtttttattgttgttcagtcactaagtcctactctttgcaacccccatggattgtagtcctcctggttcttctgtctgtgggttctcaggtaagaatactggagtgggttgccatttcctactgcaggggatcttcccagatcaggggtcaaaactgcatctcctgcattggcaggcagactctttacttctgagccacttgagaagcccattccattgatacctgacatttaacttatctactcctgataacagctctttccagttttttctactgaaaatagttctgcaaggaatatgcatacatcgatctgagtatgtctctgtattctttgcctacctggatgactattgctttatattgaatc

SEQ ID NO: 32069 - DNA, 2642 bp, Bovine  19866880787120
  misc_feature (1)..(1): n is a, c, g, or t
nctgtggggccacagtccaggtgctctcacagcctgcaagaagcacccatccttccaccctcaccttccacactcaacaagcattcttctggtaacaaggtggtcttccaggcaggtacctgggtcccaggatgcggatgtccccaccagggactccgaaggcccaggctgctcatctcagctgatactgtgcaattagcacctcgggaatatccttatccaccctctcatgtgatcctcacaatagggcaggcctgtggatttcactccatgacaatttcagcaggacctgtcagatgctgggcacctgggcagctgagtcagatcagcttcccgctctcaagaagcacgcttcttcttcccactctcaaggctcagtgacttgtcaaaggctcgagccaagactggagcacgtcctccatctctcaccctaaccaggagccatcctcacatccgaggggctcctggacggcgacaggctgtgctcctcacctgcagttcagcccctggtacattcggatgccgtcggtttccctgagcatcgtcccttccaaggtgagagatgaaacggagtttctgcatctggatccatacaggccactggggcagccagccgggccagcctgggcctcccgccccggcccaccctctccctttgctttcgtttgttgtttagttgctaagtcatgcccgactcttttacaatcccatgttctgtccgtaggatttttcaagcaagaagactgggatgggttgccatttccttcttcaccccctccttttggccataccttaatcccctccctcattcaagcagtgggcatctaagcttaaggttctgggaacctacacggagtgagaggggaggtcacgggccacccagacctctggggtcaggaaagtggcctctgccggggagcagaacagtgaccctgagtgaggcatgtggagaccctgaggttctgacagctgagcacgtgcctccagaagtggtttgggttttgctgtatttcttttatctgaacaaatatgttccgctttctgctaagcagaaagatgcattctgcggaaaacctcttccccagctctgcgaaatgaataacttgtggtcctctgtgggtctcgatgagcctcagtcatgatgctgcgcatagaaacagatgcacaaacctcgactcagcatggagtggccagaacacttaggtaagaagtccgatgttttaaaagctttaaaagctccctttttaccacggactgcaaacagtgcttctgtacaatagagaggaggacttcaatcctctgtccctttctttcccatctctttacacgataaaaaggagaaagaacagcttgtaaacagcatgccagttgcagagaataagtattgttcaacgccttgaaaatgtgcttttcccttgaggcactgcctgtctcagtttattgtcacgcccttttcgctcatacataatgcagcgacatcaatccagtctttgacccacttattaaaaattctgaactgatgaaatctaaatgaaagcactttcttcgtgtataatatatgaacttattattcttatcatttcgtaaatacacacaacagaacacgcactgaatataaaaaatgagatcaacagatttggttccaaaattcctgctctgccacctgttaaacactcaggacagtttccacaacatctccggggcatcagtctcctcgtctatgcagtgtggttagtagccggtaataggtggtggtaatagccaccagccacatggggtggttttgggaagtgagtttatacctggaaagtgccacgcacaaggccaggaagttagaacacatttaccctcgccagtcctcaaagtgttaaaattctacaaccaagatcattatatccatcacctaaacataattcagagaattagaataagttagagaaacactaagcgtagtgttctttctttaaagccccctgtagtcagggaacagctgtaccagtgatttctgagtttacagagtcatgagaaaagagtgtgattttcttgctcttcccacacacctaacaccaacccccgcccccagaccagcactgctaaaatggctgtgggcgaggaattgtaaaatgaagcaagaaactcccctcgaatatttactgaattaattcattagttcacagccactgggagaggaagtgcaatcaacaaaacagaggacgtgctgacactggtttgtttcaggctctgggctgcacttggagcttctctctctctctcgttccctagaaggaaggcttcttagagacagacatgaaggaggaaggagccagaccccacagagctggggaaagaaggttctggacagagggaaccacaagatgaagtgcccagaggtgaggagtttgccaagtgcaaggaatgggactaaggccccagatcttgagggcacagtgggtgggtgggaggagaagcctgccttgaagagctggacacgggtcggggttctactcagggcaagagctcaccttgactcgtgtttttatgtttgtttaagtttttttgttgttgatgtagatcattcttgaaggcttccctcgtggttcagaaggtaaagaatctgcctgcaatgcagtagacctgggttt

SEQ ID NO: 32070 - DNA, 1316 bp, Bovine  19866880887993
  misc_feature (1)..(1): n is a, c, g, or t
nccctgggctcttgagcatgaggcccatccccccactcccggcgagcacaaccctaggctgttcctcttactgctcgtcagtgtccaccctcgagcacagctgccctggagacgcatctggactggttccagctccactatccagtctctaggagcccttcccctctttgggtaccaagaacccttgccttttaaacactcacaacatgatggatcttatgatacaatctttccccagatagtgaagccattaggttgcaccagaggaaactacagttttggcaggttaagaaagatcttggatagtggccatttcctgtgcttcaccatcatacttgctcattctcagaggcaggcgccaagcaatatttcagagacaactgacctttctcatggagggtccctaagaaattcctgggtaaacttctggcaccgctttgtccctgaaaggagagtggaaactcaacagccaccagtcttaactgctcttctttggctctcaaatgtgagcagacatcagaatcacctttaaggctggttaatagcctggttgctgggcccatcctccagagattctgattcagtaggtctggggctaggcctgagaatgagcatttctgacaagttccaaagtgctcctggtccggggatcgcacttgagaagcactgcattatgcccgagatctgcgtgagctgtcggtctgtgctgctggggtcctggggaacttgaaccgaagggatgactgtagaggccattccaggtaggggcagagttcccagttggacctctcagaggcagccagacctgggggtggatgttcattaaaaacaaggctggagaagtgatgccagattgaagagtacttggaggtcaggggaagggttgagattttatcctgcaggtaacaggaagctggggaagtgctttgtggttggttggtttgtatttaaagaagggtttatgcattcaagcaaagtgttccaggaatttagggcctgattaacgcactggagttgggaggctggaagggccctaggggatgctctttagtagaaggatggtggctgggaaaccatcccagggtagaacctgttactgaaccaaactcgggtttgcttgctgcacttgcagcaaagctgatctgttgacactgagttgtggtgaatggaagtacagtgtttttttcaggctaccatgtaaggagaatgggcatctaatgctcaaaagatctaaactgcttgatggctttcagagaagggattttaaaggcaatattaatggatgagggttgatcagctcatgaacaattttcttc

SEQ ID NO: 32071 - DNA, 653 bp, Bovine  19866881053045
  misc_feature (1)..(1): n is a, c, g, or t
ngtccgacctgttgctgtttccctcaacaaggcaaccccccccccacggcatgcggataccctgcccggaagccgcctggcgatggctctcacagccgtgagctccactcggagctgaccctgcatttcagggggctcccatcggtctcaatttgaaagagcccaaatgtttctgcttcacatgtagccagaacaagcaacagcagttcctgcctgtggtcggactggatggttattttaaggtgaagccacaatactttgaaagcaatcgcctacatgtcccatttaaaatggaagaatggaatgagagttaaaaaaaaaaaatgtatgggtttcagatgaagacatccaatatgcaaggggagaaaaaaaaaaaggttccattcctgacaagcaggcagatgttggataatcacgttttcacagccaagcagtttcacttatgctaatcactatgaaacagacaaataacctctgctactgggaagccccatgccccgtcattcccaggcccgccacagaaagatgtaagcagcagccacggaaaagaaataaaaaagagcttggaagcaaaagcaaaggcaggaaaaagcacatttggcataagaggcagattccgttaaatttacttacaacagagaacatacagacat

SEQ ID NO: 32072 - DNA, 1265 bp, Bovine  19866881067134
  misc_feature (1)..(1): n is a, c, g, or t
ntgctttctctggcagtcaacaatttgtcctttgtcctcaccttttccgcatgaatcaccctagtatcaaccaaactccagtggcttgcaggtccccaaattcctcctgatatccaggaggactgccctgaactgcagttgtgtttctgggtggttgttctcagaagctctcactggccccattgtctgcccgtctcttgtgcaatccacacgaggagcctggcaaagcctgtaggatcatatcagccactaatccatgtgcccctggagactcaggggcacctccctattaaactgtagggtgaggtgctcatcctgggggagaggataagcccagctaaaaggcttggaggagggagcgcagattaaggaggagccagaggtctgggagaaagtggccctggtgtaaacaatactggcaagtggtgtctaagatccactgagcctctcaaatatcctcagatttgaagcaacacaggggcaacacccccatgatcttactgtctttattttgagaagatccagtaagcagataccagtagagcgtatagacatgatttgcaagcattcctgctcatcgtttgttcattcatttgttcagactatttatggaaaaccctctattgtgtcaggaactgcgctaagaaatgggttcataaatgtgacaatgtgttaccctcagtgtgacaaatagcactgacatttggtggtgagttttcaaatttcaaggaaagcaagataagacagaaggagacaagagctgaatattgttgtaaccaggttgtcacatggacttcagtctgccaggctccactgcccatggaattttccaggcaaaatactggagtgggttgccatttccttctccaagggaccttcccgacccaaggattgagcccaggtctcctatgttgcaggtagatactttaccgtctgagccaccaaggaagcccagttatcaccatgcccaattcaatgtaataaatagccttcctttggctgatttgtttcatggatacttggtttttcaatgtgatgggaggtaggggatggggttagaattgaggctgacctttattcccagggactcattctcggcttttctcaacacattattaagtagttattggggtgttgtcttaagaaaatcaccaggttttaagatgacatttttttttccagttcccagaaattattaaacttgcttatgtcagactggaggttgtctctccgttttccccctgcctccttcatgtccatcctaa

SEQ ID NO: 32073 - DNA, 1377 bp, Bovine  19866881129851
  misc_feature (1)..(1): n is a, c, g, or t
ncatgtgaggccaaagttaatggcccctcctctctttcctaatgtacttaaatcagacactgagctgtctcgaggcagaataaggtttctcttttcagggtgcccgtgagagtcctctgaagttagtctgttttaaatttaagacacagggacgtccctggtggtccaggggctaagaggtcctggtggtcagaggtcccagtgcaaggggccctgggttcaatccctgctcagggaactagaccccacacgtggtaactaagaattcacgtgtcacaactcaaagatcccacgtgccacaactgagacctggaacagccacgtaaattaaatatttgaattttaaacaaataaatatttgaacttaaagaagtaagtgaatttaagacacagacagacacagacgtcccgttaccgacctgggtgtgagtgacatcattcggatgccgatatacttcttcttggtgatggctttgcctggtgggaccacagaaggaagcagaaggtcagcccagttggcggctgtgccggggacaccaggagcagtggggttccatccccccagtttgttgtgtagtcagggccatacagggatgctctcagcttgtggttcaaatcctgattgggaccctacctgcctcctctctcccccaggtagaaggtaaacagcacacctgacagggaccctgttgagcttcaaacccccagcctgacattgagcagaagagtcactaaacatttgtggactgaatgagctccttgaatctcagttttctcatcagtaaaatgggactaagtcccacctgatcaggcaaagggattgaatgacataatgaataatacagtgaaatgatgtacagaaatcacccaggatcatgcctggtacataatagactgaaccatatgaaacacgcatgatcataggccaaaaaaacagtcaaacattgatgacctaatgacatgcattcctttcccttcttgataggaaaggtgtggctgaccttcagggggtcattttccctgccctccagtttctgaggggtagccaagccccaggcctaaaatctctggtgggctgccggggatgtttgctttacctttggcttgtcggtcatgggattccgttaggaactttttaatcttatcagatggaattgcaaaggagattccagctgtcactttcagtgtgttaattccaatcacttcaccatcctgaaaagcaaaaggcaaatagcttgctgaatccaggaagattcaccccaagatacccaccgagagagagtggagaatttgcacggaaggagtcttggagcttcttcagagatatgactggggtaggaggagccggacggatggggcttactgcgtcgcagagcg

SEQ ID NO: 32074 - DNA, 1103 bp, Bovine  19866881143159
  misc_feature (1)..(1): n is a, c, g, or t
nggtcaagaatgtagctttcaatggacaaacaggaaaacatccccaagggagaagagcttatcttcttgtaggactgtattcagtgacactctaaagtgtctcagaaagagctctgacgttttgcttatggcagcagtttaggtgggagcttcggagactgggggaaaaaaaggaaggcgctctttacttgcgaaacagttcgatgtgaaccacggcaggagctatcttctccacgacatcggcaataaagttgtatttatggcgcagactgttgggatcttcctgacctaagaagagaaacaaaggcaagacacttaaagatcctgtgctctgtgctgtgggtcagaaaaaccaaaaaaggagggtgaagacaagaccccagacctgggctcagagacaaagatctttcccgcacttgaagaaatgcccactcagatgcacgtgcgtgtgtgccaagtcacttgagtcgtgtctgactcctggcgatcccatggactatagcccaccagtctcctttggccatgggattctccaggcaagaatactggagtgggttgccatgcccttcttcaggggatcttgccagcctggggatcgaacccatatctcctacggctcctgcattgcaggtggattcattaccactgagccaccagggaagccccagatgagacagcaacacccaccaaagatgacctgtttgcttggcttccttggtctcaactgtttcatcacgaaaatgttgacccagaggcatcagcagatacctgggcctcctttattattcccaacagcgggtggcccaagggtcaccttgacatggcaccgtccaccagtgtcccttccccgactcccccagaaccacacagcagccctcctcagcataccaccactgtcgaggggagctccgggttgaagctgtttctgatgagatgcccatcagatgttagagatttaagaggctactatgaataagcactaaggcaaaggcacagatagggtcttcccctctgtctgtccccaaagcaattttccattaatcattaattaatcattcactcctcccaccccaggacatcccaggccaaaagatgccttgatt

SEQ ID NO: 32075 - DNA, 792 bp, Bovine  19866881143763
  misc_feature (1)..(1): n is a, c, g, or t
naaaaaggaaattaagcacctatttcatgatctgctgaggtgttaattgtgaaagaaagccagtgcgtgtgttttcccgagtacctgttacgacacattcacgtggcccatttgtttcttggatgtggacaaacatttccgtcctgtctcgctgcattttccctgcggtctgctcattccccgcccctccggcaggaggagctagagtttgccatcatgcggatagaagccctgaagctggccaggcagatcgccctggctgcccgtagccgccaggacaccaaggtaccggtttgctgctgctgtgtgctgcctcttgagaatgttgtgtggtccagaagcttctttgctaaccgcagccaggcccggtgttcaacaaagaatatctccaaaaagctaaaggcatagctcatgcataagtacacgctgagtgcatgtcttaagatctggtccactcagttagggaggaaccaagcagggtgggtggtaaagctggttgaatggaggaaagtacgagaaactcatgtacagtcagaggagggaggaaactggaatcagatcgcaaagttagatataaaactggttagttctattcatagttaaacaggacagataaatcctaacctttgaagttcttttttcttcctacagaaatcatttgcttctctgttgatgaaaagtaatttgtagcttttctgttttctatagttattatagaataatagtaatgattatactgagaccagaccctaataaataggtgaaatagtaaataggtgaaaacaagacctt

SEQ ID NO: 32076 - DNA, 1672 bp, Bovine  19866881168281
  misc_feature (1)..(1): n is a, c, g, or t
nacttggatgacgcaagccttccggtcagtgacgtgtgaggtggaagctcgtggagcctgacccgcctcatcagccctcagtgtccttttcacaaggcttctcgccaaagatgataaaggggaagtgggttttaatgcgtagaatatcctgcctcgtcgctgtcttctttataagctggtaagccaggaagctagcaagtggccaaactaaatgtaatttctttaaaagaaagaaaaagaaagaaaaatgccctgttagtatcaactgtctgaagctttgttctcattgggatgataacagtgtgtgtgtgtgtgtgagagagacactttttcctagtgaatttgacggtttagccgcttcacaatttaaaacatgaaaaatgcttataattactttggttgttttaaaaatgctactgtgacttcctattagatgttcagtctctacacattcttactggttaatattattgactgaaatattgccagacaaagatgtctaaactcgtgatgtctgtggtgctgtaaaatttatactacagtgtggacagttttgaaacgataaccatttttgttgctctggatctcaaggtgagcagtgcattttgcatagagagggtattattgaactgttagtgagggttgtgggttgtactgttggagaaaaggggagagttagaattcagataggtagatcttggacatttgtttgtaaaatcttagtcaagatgtgcagcacagtcattgctttttattcagtgaaaattatttggtatgaaatttcttggaggcctgattttcttgtcaaaatgttgtaaatagttcttctatatttgaatcagtggaagacctcgtttatatgtaaagatactgccctcagtcatgtggttgtagcctctgctttttgtcactagtaacctgtattcaagtgttcatcttgtttaggaatgttttgagattaatgtgcgtaaaagtcctatgtgattggttttaaacaattgggataaaattaatttttagtagcataagttaatgtgctaaatagcataccattttgtgttagagatactagaatgttgttattctactgtctgtgcaatacatgttttaagcacaaatttgagtatacatttaatcatggggatgtcaaaaacataagctcctctctaaaaaacatcgttagtttcaggtgttgaataacagaccagtttgaccaagtactgtttctacggttcagtcttaaacattcgctttaagaaaatagtcttgaatttcatatgctgctattttttatgatattttgccatattacagtactgttttgttttgaattcatacatgtcgctgtttctccttttcattttctcagaagactttttgtttgagagcgagaaagtgggagtggatttcttaaatcagagtgtggtccagaggttactatctgttacactagaattatcatagcatcagtttaaaaatccaaatgcataaagaatgcaccactcaacatttttattcataagctattatttttgaaacttatatttagatttttcttctttttttgcagctacatttgaaaatggtagaatgaaaaggtgttaagttgttattttctctgcagatgcatccatttcgtcggctcttttagaaagctcttttctcatgagca

SEQ ID NO: 32077 - DNA, 1496 bp, Bovine  19866881171280
  misc_feature (1)..(1): n is a, c, g, or t
nccaaataaataaataaggaaccattaaaaaataataataaaaaggaaacttcaacagtaaaaaaaaaaacctgatttttttacattggaatttgacattagaatcagggatggaagagaagccctgtgggagccccgttgttcttaatggttaatccaggtgttctttctcccaagcagcaaagccaaagagttgaaggatcgccaccgagacttccccgacgtgctttcaggagcgtatatcattgaagtaattcctgatacccccgcagaagcgtgagttagaatccctctccattttcctgataatcgtgtctttcctggaggtagggggcagggaactgttcttttcgtctcccctcaggtggctgtaaggacccttgacagaatggtccaacatctgtgtccgtcctgccggtcagggcttccgacctggctcagctcagggctcgtcggcaggaggaggcttcctggctagacgtcctcttcaggagggaatcagatggatttgttaggagtctccgggaaaaacctggctagatggggaaagacggttgaaggagcagtgtctctgagacctcaggcagtgatcctggcctaggctgctagaggcatctcttcctgagggcttctctaattatgcctgttaccagtcaggccttacttatccacacctctagaaaaatagcacagggagcatcaaagtaacagggaaagaagttgctcaacccacagtcaggttcattacctgtgaaagtgttagtcgctcggttgagtcagactctttgcagtcccatagcctatgtggacataatatccacggagacgcgctagaccagggagtggccagcagactgttcgcagaagccagatctggtctgctgcctgctttggggttaagattagattttgcatttttattttattttttgttttaaaatgcatttattttttattgaaggataattactttacagaaagattttgcatttttaaatggttgaaataatttaattaagaacagttattttaggacacttaaaaatgatacgaaattcaaattttagtgttacgtaaatgaaatcttactggggcacggccatgcccagcagattatatattgtttgtggtggcttttggactcccacgtaacagttgggttgttgttatggggaccatctggactgcaaagactaaaatacttcctctctggccatttaccagaaaactttgctgacccctgtcctaggccactaaggtgcataacagcttatttgatgctgtcacacacaagagttaaggttacagcagcaataaggcaaagcggtgcctcagtggaaccatacctgtgggcaccgtagagctgtaatacccatgacaagcaagctggccaccgcggtcgctggcgtgtcctcacttcctttggagtcagtctgtgataagatcatacaaatgcccgcacacatttctacagtggacatgattgctgatgtggc

SEQ ID NO: 32078 - DNA, 976 bp, Bovine  19866881176311
  misc_feature (1)..(1): n is a, c, g, or t
nagaatatggaaagctcccaattcctggtgtctcggtaaagaatctgcctgcaatacaggagaccagagttcagtccctgggtggggaagatcccctgtagaagggagtggctacccacgccaatactcttgcctggagagttccatgtacagaagcgggctacagttcatggtgtcacaaaaagtcagacacaactaagtgactaacactttcactttcaaatcttagaaagactttagagacccatccagccaactctcttcattttaaaagtgaaggattcatatagcccaaaatacttacccgagatcatccgtccagggccaaagataaaacagagatccaaatgtactggctcccaattctgtgctcttcctactgtttaccactgtctctgttcaacacattctggatttcatccttgctatatttcagtcctcttattggtttattttaggtttaactgataaaagaataacatgtcagaagtgttaagactgatgggtgtcattacttacatttataaatcacctgacgaatataccagctctcctaggatgtagctggtatgtcagatatgaggatgattgtaatcacttggctttatgattatggtatgttttagaaaatgcagtaatccttgctgatgtatttttgcttatctcagaaagtgaaacttttgttgtaatggtacacatcagactgtaatcagtgttacaaaatcaatattctatggagaatgaaaaaataaagcactacctggaggcttttgctactttaataaagcaaaattgtttgttatgcatacagaagtaagaaaacaatgtactcttcccgcaagacagacactgtacctttgcttaccaagctggtagcttgcctgtcatgtaagctgattttgtttgtccccagggaagagaccaattttaaattcatgatgctaaataagatttttaccagatgatcatccccctc

SEQ ID NO: 32079 - DNA, 3647 bp, Bovine  19866881225754
  misc_feature (1)..(1): n is a, c, g, or t
nctggacctggctctggaatgatgagctatagggtctatccattaaggagtccccaagcgtctagtcaaggctgtggtttttccagtggtcatgtatggatgtgagagttggactgtgaagaaagctgagcactgaagaattgatgcttttgaactgtggtgttggagaagactcttgagagtcccttggactgcaaggagatccaaccagtccattctaaaggcgatcagtcctgggtgttcactggaaggactgatgctgaagctgaaactctaatactttggccatctcatgagaagagttgactcattggaaaagactctgatgctgggagggattgggggcaagaggagaaggggacaacagaggatgagatggctggatggcaccaccgactcaatggacatgagtttgagtaaactccaggagttggtgatggacagggaggccttggcgtgctgcgattcatggagtctcaaagagttggatatgactgagcaactgaactgaactgaagcctctaatgtggtgagtctagggttcaaaggaggcaagatgtaaagtgagccatcttggtggagggaaggaggattcttgaaagtcagactttacctttcagcaccctggacagtaacaggtcccgggcggtgggctgtgacggaggcagccgtggagaggagctgcctgcccattcacatataggctcaacatacgctcagtcgctcagttgtggctgactctttgcgaccccatggcctttagcctgccaggctcctctgtccatggaatttttcaggcaagaatactggagtgggttgccatttcctcctccaggggatcttcctgactcagggatggaacctgcatctcctgcattggcaggtgggttctttaccactagcgccacctgggaagcccatcactgctttacttcaattgcccacgagaccctcttagtggaaaaagctagcagtgatacagcagggcctttctgctaattgtaggggagcttttaaaactgaagcccatgcttctgctaataggagaatcccttaaattagaaaactattctttttttttcaaggccaaaagcctacttgaagcttcctacctgactctcttctgccctggggtatcgcattgaacagagcataaaagccagtgttggtgatcctggaatcacttcggaacaccacagtcaggatgtcagaggaggagaaaaacatcacagccgctgaggcacagaacttccccatggagagtgaggcgatcctggggccatcgaagatttcgactgagtcgtacgggcatccaaggatatcttccagtctaggggaatcacagcggaggcttaacagctggttagggcttcctagattttttttaaaattgcttacttaggtttatttttgtttatttatcttttggttgggctatgtgacatgctggatcttagttcccctgatcagggatcaaatctgtgccccctgcaatggaagcagattgttaaccactgggccaccagggaagtcccagggcttcctagatcttaaagcttgaaaaatatgacacacacagaattaaccatttggattatactttgaattgcatattaatacataaaatgtcagttaacctcagatgccttattagcaaaacttcttttatctctttctgaagaatgtgtgaggcttatggccgcaactcagtaatagaaacttagaaatcatactgattttagccaatcacaacttacacgaaacctcgggagatgcaaatgtacaccacacataaaatcttaacaataaagtcatcccaactgatcaacatgtaagtgacatcacagcccaattttcctaactctgtatttcacaacattcttcatacccaaattcttagggaggaaaaacttgattctgaaataaaaacaatgtcagcatgtggaacagtatttgcactttgtaattattcacagggatgtgtatgagggctgattggctgttgttgctgttgttggccccgccacatggcacgtgggatcttatagttccccagccagggatcgaacttgggccccctgcattgggagcacagaggcttaaccactggaccaccagggaagtcctgagggctgattctgaagaaatggataactgataacatgataggttttagaagtgtgggttcaaggttctcacctcattgtgggctgtgtctttagggtttcagttgacaaagataatagaatattctttgtgataggccatgtctgagtccatgggctgggcaacagtggagtgcatgtgaaaggggggctttcatagcatttcacagtattgctgtgtttgttgcatggtgcgtgtcatagtcaacaaggagaagggctttgcacagacttctccttacagctctgtacactggtgaagagcggggcctttgacatccaatggacctagaagcttggcctttggtgagtaacctctctgtctcagcttcttagtctttaactgggatgataaggacatctttattagggctatagtgacgctgtaatgtgacaaagcatatagaatacacagtacagagcctgagcacactaaaaatgtcagtttttattttatgaactgataataaaagaatggcagtgacttggaagagtttttttatgtcagagatgaagcaatgactaccatctcacttcattttaagccaacatatacaggatgcagggctcatggctggagtagttgcctaaagtgtgtgtaggtaaagccttttactgtttgcttaaaactcatattaaagaaaaagtctaagaggataaatactggtacccagtgtacaatgagggcaaagctgaaaaggacaatcttttaaaataaatttaaaaaactcctcatagtaacgttaagtcaaatacgtgaattaaaccacttattgaatttttcaaggcaatattcttatttaggtagactcttaaagggggcttcccaggtggtgctagtgataaagaacctgcctgccaattctggagacttaagagacatgggtttgatccctgggttcagaagaccccctggaggagggcttggcaacccattccagtatccttgcctggagaatcccatggacagagaagcctggtgggctatagtccatggggtcacaaagagtcggacatgactgaggtgacatagcatgcatgcacttcttgtaaagagttgttttcttacttcagagttggaatcatgagttctatgcggaacttcttatccacgtggatctcccacacgcactggatgtctgttgggtagttttctggatacagtggactggaaaatgagccagagagactagaaatgacccctccacaagagttcctttctcctgaaacagcaagaaaaaggatgtcaggatatgtccccatggcgtcacttacgtcatcccactaaggacctggtggagtcaggctgtagtctgaataaatagatctgtagcctaagcatcttctgggaaggagagcctattcagtctaattgtgatgggtcagaatgcattcgagaaggaaatggcaacccactcaagtattcttgcctggagaatcccagaggagcctggtgggcttgctgtctatggggtcgcacag

SEQ ID NO: 32080 - DNA, 681 bp, Bovine  19866881286188
  misc_feature (1)..(1): n is a, c, g, or t
nttctaacttttgcttcctgacctgcatacaaatttctcaagaggcaggtcaagtggtctggtattcccatctctttcagaattttccacagtttattgtgatccgcacagcaactttcaaatacataatacagtcttattaactataatagtcaccatgctgtacatcacatccccaggaattattttataattgaaaatctgtatccataatagttcttacaatgtgactttaattcattaaaagaagcttcactggatagatgtgatgagttagtacctcttgcctcctgcagacctgcccctgcgcctggtgggcgggcgcggccgctgcgagggccgggtggaggtccggcacgagggcgtgtggggcacggtgtgcgacgaccactggagcatcagagacgcccgtgtggtgtgccgcgtcctgggctgcgggcacgcgctgggcgccctgggtcgcggccgcttcggcctgggttcggggcccatcctgctggacgacgtgcactgtgcgggcaccgaggatgcgctggagcgctgcgcccacgcgggctgggagcgccacgactgccagcactgggaggacgcgagcgtggtctgcgcaggtacccgggctcccctgccacgccggcccctccccggggtcttcctaaggctccacccgttctttcctctcca

SEQ ID NO: 32081 - DNA, 1104 bp, Bovine  19866881375816
  misc_feature (1)..(1): n is a, c, g, or t
nggctccaggtctgaaggttatccccgctcgatgttgtaaagtccaagttgtaagtcccactgctggctatcggcttgtcttcatcgaagacggcggagaaggagtgtgacgggggatggaaaggactgccttccacggagctgctgcgggggccatcggggatggagaccggctcagagccgcatcctgaaggaacggagacaaagccatcactgaaagacacaggacacttaagagagtccctcatctcgtgccagaccatcattaccctctaacaccagagccccaggccagcctgcccaccccacaacaagcacgctgcttgggtacaaatcctgctctcaccaggcagctccaggccctggacaagcagaccctcagctttctcatccataaaatgggagcaataagagctgtttaaaggatacctttaaatactgtcatctaaaacacatttacctggacttccccaggggtccagtggctaacactctgcattcccagtggaggcggcccagggttcgacccctggccggggaactagactccacatgctgcaactaaagagccctcctgctgcaactttaaaaaaagcagaagaagaaaaaaaaaaaaacccatatgccaaaactaaaaatgcaatgaacatcgatgatcctgtgtgccacaactaaggcctgaaacagccaaaaaataaatattaaaaaaatttaaaacacgtttaccaagcgccaggtcaaagcaaggcaccactctgggcgttggggcctccataatgaacaaaacccttgccctcctgcaagttaggttctttaaggagaagacagtcaagaagcaattaacaagtaacatgtatgggctgtcagatggtggtaagtgctaaggaaaaaaagaaagtcagggtaggagtgttgcaattttaaaataaggtagttgggcaaagcccttcaaggagaaaacatttaagccaagatgagaaacaaggtaaaagtgtgaaccatggggatatctgggggggtaagcatccaaggccaaggaaacagcaagtgcaaaggccctggggtgagtccacacacagggtgttgcagaaatcccaaaggcca

SEQ ID NO: 32082 - DNA, 1438 bp, Bovine  19866881490437
  misc_feature (1)..(1): n is a, c, g, or t
ncttcatatcctctggcccacacacctccttccctttgccctctaccaccaatgtcatcctcctgaaatgtgctccctcctgaccccagtcatcacgtgcagcctgccacgtggggccatacctggttttgagtttgtagccaagaatatgctctgccttgtgattgggctcccaatgaacacattttatttctcagctaagaaaaaaatgctggggcatttttcgtgtcctcatctttgcatcctgggaaatccttgagcagggtacctgactagcaggttttcagtaagtactgtggactggattcatgggtgaatgtaggctccagagacagaactcttttgaacacagtgagggatgttgggatcgatgcagtgaagatgttgttggggaatcaggttgctggtaagtggtgtgtgttttcctttcagctggagaatgggggcgacatggcccacgtgaaagacctaagcacccaggcggtgagattcgggctgctttttaaccaggtactgaccaccaggctgagcaaggggaaggaccatcccacctcgtgcttggttagagacctttgtacaatgaccgtggtcaattattacctgtggcaagatggccaaggcagaaaaggaacttgtaggtgtcgctcttgaacactcaccatctgctcaggggtaaaattcacaagacagggccctgggataggccattcagtaacttgatatacacagctacagcaccccatgaggttgaccagctgtctcagttttcaggattggagtcatttccctggggatgtggaactttctgttctaaagtcaggaaagacctgggcaacctgggatgagttggtcatcctcttcaccacaaatatggtgagctgccaaccgctcaagaagagattccactccaagcccgtggttaaggttgccaaggtggctaatctgggcagctattttgttggagcccagactcgaaccagctgtgagtcgtgagctcagctgcagagcacccgggggctcaactgccggaggagcccaaggggccagcagctgcactgtctcgggctccctggataggcgtggctctccaggaaatgactgcaaccctccctcttcactaaagccactaagaagtgacctcaaaagagttcatattttaggggtttggggtcctgaatctatcatcagatactgcccctgggtcaagcctggaagggctgggtccagccccttgcttgcagagatctgtccaagtggacagactgcagacagcagtggccaggacaccctgtaatgctgtgggcatggagggtctcttaggcccactgaattgtagcaaaacactctgttttaaaggtctgcagactgagggtcatccaagaacgtgcttaactccttcttctccccactaaggggcatgtagagtaaaaatacagcc

SEQ ID NO: 32083 - DNA, 769 bp, Bovine  19866881810963
  misc_feature (1)..(1): n is a, c, g, or t
nctgaaggtctaaactgaaatagtttagactggagcttttaaaagctgtaaatgatagaaaaactaccacttgcccatggagtcatgaggtagcaagagggaagatccaacaaagcatggttgaaagcagtcgatgctgaaaaatataatcgtcttaagtctggttctcaccaagctcagactgctcaatgacctgaggacacatggaacagcatcactgccctcaactaatgagagcaacacctgatgtggaaattcccaagggggatttactgtacccggtaagacgctacattagaagtcctctgagagtgcttccaattctaagcgtttgtgactctcctttcttcaaaaagaggttaaacttcttgaatccagaatccagatttcaatagttaaactattaaaggcgaggttgtccaacagagtaaaaccgcaactttttgaacaataaaactctcagattgataagtctgataagagtttcatgaaggaaaaaatatttgacttcaatatttttaaaactctcatgacttaaatagatttaagtgttaaaaaaatcctaaatgactttgattttcttttatattcaacagaaattccagttcaaagaatgtttacaatataaaatcctcaaaataccatcttcctgaatcaaagcaactcagctaatcaaaggcttaccaaaataaacagcaaacacatgtttgcttaaatatcttctaggaattacaaactcacatgttctttatcatacagcagctactag

SEQ ID NO: 32084 - DNA, 909 bp, Bovine  19866881917166
  misc_feature (1)..(1): n is a, c, g, or t
ngggctgatccctcttcctctcccctggggctgtgggctctagatccttccttgggacttcactctctaccacgcctgcggtcgggcttgccccaatcctatactcacccccctctgtctcttggcctcaaggtttcagagcaaatctgtgctgacaggttcaagatgtgctgagaccctgagctggctggcctccagtatccatcccacgttttttttggcgtgcggcggcagcttgcacttgacctgccctgattatcttgggtgggagggacgttagtcctcagctgggaagggaggtcacgcctgacctcggtttcctgcacggcccggtgaatacgagcggcccccagtgcctggcattctgtgacatccgtgcgtttacccattttgttcacttaacccaacgcagcaacgccaactttgtgtttccagggaaagctgcctgtgctactgcttggccgctcctcggagctgcggccgggagagttcgtggtcgccattggaagcccgttttcccttcaaaacacggtcaccacggggatcgtcagcaccacccagcgtggtggcaaagaactggggctccggaactcggacatggactacatccagacagacgccatcatcaacgtgagcctgtgtgccgcagggttgggctgcagttgggaagctgggctggggtcaggaaccgggctggactcaggatcctcatggtgcttccaatggggtccttttgaacccctaaagcagacaaggcagaagggctggtcctcagcctgttggcagtctccagggactcctgtgacgggcacttgagatttgcccaagtctgcagcccggaggagttctccatcccctcggtgccctgccccagggtcagccacccctgggtcgagctgcctgtgcaac

SEQ ID NO: 32085 - DNA, 1769 bp, Bovine  19866880282614
  misc_feature (1)..(1): n is a, c, g, or t
nttcagcaatacgtgaaccgtgaacttccgatgttcaagctggttttcgaaaaggcagaggaaccagagaccgaattgccaacatccactggatcatcgaaaaagcaagagttccagaaaaacatctgtttctgctttattgactatgccaaagcctttgactgtgtggatcacaataaactgtggaaaattctgaaagagatgggaataccagaccacctgacttgcctcttgagaaacctatatgcaggtcagaaagcaacaggtagaactggacatggaacaacagattagttccaaataggaaaaggagtacgtcaaggctgaatattgtcaccctgcttatttaacttctatgcagagtacatcatgagaaacgctgggctggaggaagcacaagctggaatcaagattgccaggagaaatatcaataacctcagatacgcagatgacaccacccttatggcagaaagtgaagaactaaaaagcctcttgataaaagtgaaaaagttggcttaatgctcaacattcagaaaactaagatcatggcatccggtcccatcacttcatggcaaatagatggggaaacagtggacacagtgtcagactttattttttggggctccaaaatcaccacagatggtaactgcagccatgaaattaaaagatgcttgatccttggagggaaagttatgactaagctagacagcatattaaaaagcagagacaaaaaaaaaaaaaaaaagcagagacattactttgccaacaaaggtccgtctagtcaaggctatggtttttccagtggtcatgtatggatattagagttggactataaagaaggctgagcgccaaagaattgatgcttttgaactgtggtgttggagaagcctcttgagagtcccttggactgcaaggagatccaaccagtccatcctaaaggagatcagtcctgggtgttcattggaaggactgatgttgaagctgaaactccaatactttggccacctgatgtgaagagctgactcactggaaaagaccctgatgctgggaaagactgagggcaggaggagaaggggataacaggatgaagtgattggatggcatcaccgacttaatggatgtgaattgggtgactccaagagttggtgatgtagagggtggcctggcatgctgcggttcatggagtcgcaaagagtcggacacaactgagtgactgaactgaactgaactgataagcagtctactaatatttcatataaattatatatttattttattacataaatatataaaaaagcatactgaatcctctccccaagtgtgacataagcttctaaccaataaaagtatatttaactcctacatttttctttttttattgtaaagagctttttattgtttcctatgtgctgtgagaggtgataggcttagaaataagaacaatcagcctgagagtccagtcattatgtattcacaagacttgcatttgaaattaaaggcagagggttgtgccattacatcttcatgacaagatgctaggaagattctcaaatcagaataaaaaaatagaagaggttattcagagaaaaataaccccactcatttgtatgtttctgatatagcatactattattaaaaagatgctaatcacctataatactaaaagatagcaaattaacaaatcttgacaaacaaggtaaaaaaaatgaagtggaaaatagtaaatatggaaagataaaagaaaggaatgattcttagacaaagtatcg

SEQ ID NO: 32086 - DNA, 6856 bp, Bovine  19866880437438
  misc_feature (1)..(1): n is a, c, g, or t
natttctccctttgactttgttatttgtgaatgaaatttacatatattttataaattagtcagctaactttttggttctctaaaatggaggaataaatatcaaattgagccaggcaaaccttgcttgagttctgaattttgagacttaccctcttggcaagtacttaaactctgatcctcaagtgtacttaagtattttaattgaaaatgtatgaaagttttctttctgttcaatcataggtctgtccttctgttggttcagaatgttatgattatgaagtttttatactaaagtttttatacacacacacacctgtacagctccaatgatttcctgattatactttcttgatcctgtcccctccagtcccctgttgataaccactgtcctaagttttacttacatctcttgctttctttatagttttaccacttattcatatttagttatgagtgtatttgttgctgttgttcacttgctaagtagcgtctgactctttacaatcccctggactgcagcgtgccaggcttctctgtccttcagtatctcccggagtttgctcagatttgtttccattgagttgatgatgccattcaaccatctcatcctctgtcaccgccttttcctcttgccccccctcaatctttcccagcatcagggtcttttccagtgggttggctcttggcattaggtggccaaagttattggagcttcagcatcagtcattccaatgaatattcagggttgatttcttttaggattgactggtttgatctccttagtgtccaagggactctcaagagtcttctcccatcaccacagattgaaagcatcaattcttggacacttagtctcctttatggtccaactctcacatcatacgtgactactggaaaaagcatagctttgactatatggacctttgtcagcaaagtgatgtctctgctttttactatgatgtctaggtttgtcatatgaatatgtaagtggagtcacatagaacaggggtcccctaccccaggggtgcagatggatcacacatcaggaggtcagcagcagtcctgcgagctgaacttcatctgtcactctgccatagctctcattaccccctcaatcatccccccaactctggcttttgctttgtttatttcatgatgactcctgattgtctctctgttgttttttttttttcaggaaggtaagtgaggttctcttgggatcataggtttgaaatgatcatacactcaatagttatcgcatgataataacttgtcataagtgagactatattcattatttcttaaggctttcactttgtggcataggatgtaagtaagtaaaggtatttctggaggagtggtctcgaaatgaaagttttggaaaggtgaattatgaaaccactgaaggagaccctcttcttggttttgcagtcatatacaatttgtgacagcagtcaacttggagatggatggctgcattaaagtttctgaatgagaattgttataaagcaaggaatatgtgtaaatgtcttgttgtgcatgacaaaaatattgctagttgtttatattttccattatgtgatctttttttaaatgaaagaacctaaaatattcatcacattttttatttatttttggttattttagtaatgtgagcctgtggtatttttcatccacaaggattctgtaaatgtgaaataaatcagccagactggagttaggataaattggtaatatacaaactcaaggttttatgctgagagcactattgaaggagagaaattgaggtgtaagttgggtaatatgaaagaaaaattagttgagaagctttgggataagctttgaggatttgctgattttgactgttttctttcttgtcttctaactcacagcctaagaatgcattttatcctgtccagactatctcgtattccacttttgctcccctcctacacttaccctgactcttcctctgttttctgttctcagtgttgcctttgtgtgttagatttggcttctattgtacccggattccagctaggaggaatttcgtacctctgcatttttagaagggactacattaaactttagtacaagtgggttgtgcgcttggtggtgattaggttgtggtgcctgccctgtaggagtgtacagtctattttaggagtcacacattcacaaataagggcacccacataatatgaataagttacaatacagtagtctgccctatccacagggtgtatgtcccaagaccatcagggcatgcctgaaacttcaaatagtactgaaccctgcatatagtgttgtttttttttttctcccacatacatatatacctgtggtaaagtttaacttataaataaggcacagtaagagaatatttgaactgccagcatcattactcttgtgttttggggccattattaagtaaaatgaggcttacatgaatacaagcattgcagtacctcaccatccatctcatgataacctggatggctactgagtgcctgaagggtggggtgcactggccaatggcatgtcatctcttggggcaggatggggcaggatggggcaggatggagcaggatggcacgggaaggcccaggatttcgttatactactcagagtggcgtgcagtttaaaacttgtgaactgtttatttctggaatgttccatttcatgtttttggactgcagttgactctgggtaactgaagttgcaaaaggtgaaactgtgggtaggtgggactcctgtttatatttttaaatgatagcttctgctttcaacagctttttttgttgttgttgttttgaggttttgatcctaattttattgtaaatttctacaagcaaaacctgacttattcaactttgagcctccaacagttctttgataactgctcaaagataattagtgttggaagctaactttttctaggtcctgaattatatctcaacaaacacaaaaggtagaaaacaagcctcttttcttggtcctttgtgagaagccactcattctcggaatccttgatgatgctttggtattttaagtgtatagttcagtgatttttaataaatacgtagggttgtgcaagctctacaccagtcagttctagaatatttccagtgctcctaaagatctctcatgcccgtgagtttcatggaatgtaaatcacaacctcaataaaactgtaataaagagtgaattagaaagaaaaaagatcctttaagcaggttttcatttgaacactttctttttaagttttaaaattacttttaattcacatatagtaaaaagggtgtatgtttttttaaaaaattattgaagtatagttgattgacagtattttatttcttctttactataaagtgattcagttgcacacatatatattcctttgcatattcttttccgttctgattgctcacaggatatggaatatagtttcctgtgctgtacagggggaccttgttgtttatcagtctcctatataatagttaagctctactgatcccaaactcccattccttccgtcccttcccatcctcctcccccttggcaaccgcaagtctgttctcttatgtctgtgagtctgtttttatagatacattgatttgtattgtattgtagattccacatgtaagttatatcatgtgatatttgtctttttctttctgactttaatctctgggtccatccatgttgctgcagatggcatgcatatgttttgatgactgagtaatacatgagttgtgtgtgtatgtgtgtgtgtgtgtatacacaccgcatcttcttatccattcatctgttgatggacatttaggttgttcccatatctagccaagtgatactcttggctattataaacagcgctactatgaatacaatgatgcatgtatctttttgaagtatagtttcgtctgggtatatgcccaggagtcggactgtgggatcatagggctactcgagttttctgaggaatctctatactgttttccctagtggttgagccaatttacattgccaccaactgaacacttttgtctttatgttcagaaagatatccaggtttatgttaagaaagatacctatgtttcatatagtctatagggaaaaaccatgattgattaataatgtttcatggttgtgttaaggattaattcaagcatttgagtgatttttttttttcccttttagtcacctgtgttaagccagatacagattctacaaaaaaagtgtgagacaacatttacaaggagtaataagctaggttttcagcttgcctatgtatagagtacagttaggtaggagtgaattggctaaagagtagttgggtgattgcattctcctaaatgtgcactcatagtatttgctactattctgtgcaagtctcagaagatggacgaggagatagtctttagaaatctgttaattttaggggatactgaggaacacctttaagtaatggcatactgcagtactaaagggctgtgtctcctgatttggtcatctcttggtgggcttctgatttcccctaaacagcactcagcattttattttttattattattatgtatttatttattatttataagcattatttattttactttttataaaatttatgtttaatggaaggataattgctttgcagtattgcattggtttctaccaaacatcaccatgaatcagccataggttcacccacgtcccctcccacttgaatattcctccctcagcgttttaaatgcaggcgtccttcacactcatttacttgagataccccctttatcccatacgttgtacttagtggggggatcaaaaatgtcttgtgtgaacgagctctcaggagacataacaacccaactggcacgggaaagaaaacaggcctgggcacagactgggaaggggtgtgggtagagtacacagaggggccaccatctcagtacatcaccctcgtctagggaaaggtcccacaaatgttttaattttatcttgtggaagagatagtgttgagaataccctaccttaaaggtttacccaagagcactagcacatttttcttcttttataagctgtaagatccatatagacctatgagatgctttggggaggtaatcagtgagcctttatatccattacattgctgtaaaattgcccgcctttctttctggttcctaaggtcatatatattctgtgagaatcaggtcagtggtgtgtaaaagatatactatattgacagctggaggagcagttacgtataaattgcattaggaaatttctcataagccctagctagataagatttaataattttatgaaggattgcttctagaaaatgaatgagtgccgtagtcctgatccttgttgattatcttctactgcagcgagagagtgtgtttggcctttggtaatgtaggggctattgacatttgagagattaatgtgcagctttgtagctggcaagtgtgaatgtcagaaattgagtatcttaacttacattaaggagtttttcatgttgcctttcgaatgctcattcttccagtgtgagcaaattcttttttccgtgagttcaggttggtttttagaagagaaacgaagaggtcctgttgttagtagagaaagctgcgtcgttttggcagagaggaaagtccttagatgtgaattaagggacttgctgagcttcatggactaactttcctttttttcttaaacggatatatgtttctggtgaggcaggggagtcttggccacatcctgtgatctgtttttatctagaatatattacagatagggagacatgcgtgactcagaagcatcttggttcttagcagcctttagctgtcttttaagtcagtgacagtgctttattacttttacttttctttggcctacaattgaaaaaaatttatttggaaatcattgttaactcatccatcagtcctctacatggagagtctttgagagaagaggctagttctcattatgttatagttttttgcacttaaagtgggcccttgtaggccttgataaagctttgaattcctacaggtgataaataacaagtctgtgtctctcctctttgagtgttttggttgtagtttaacctgatatatgataactttgtatgtcagtgaatttcagtaatcttaagcagggtattttgtactggggttatactccctcccaccctgcccccgcacctcccccctctgccccccgacccctaactttaaggactacttccacaatccttctgcagaatttatggaaataaaattttaagaagtgacttgggccagattgaatttcttcttatacttggagtcatgctggctattgtggatctctcttgaaagtagagagatgaaagaagacgattatctttggttcttttataggaattaaggaatgatgcttaattatggtttatatacaaaaagaaaattaaaaaaatacatttgtgatgtgatagaatgtgtactggattcagtttagttgctcacttgtgtctgactctttgcgaccccatggactgcagcatgccaggcttccctgtccatcaccaactcccggagtttactcctgagggtgaagctaacaccacagaccacagagaaaagagacagaaactggctcgttgatgaccactcattgttgaatcacccaaccccgaagtcagccccacctctgagcttttgagttatataagccaggaaattttctgctcacttaagctaatttaattggattttcacttgtgtctaaaaacattctaaaattaacctatatttatataggagtaattattattccccattatgtagaggagaaaactcaaatcatttcccca

SEQ ID NO: 32087 - DNA, 726 bp, Bovine  19866880449734
  misc_feature (1)..(1): n is a, c, g, or t
ntaagaaaacagaatgcctcgctcacttgaaggggccgtaggtaagtcaaagacttcttccacccactgcccatcgctgacggcctgcagcaccgccttggtggtggtggtggtgttggagaggactttcatggtggtagcagtggtccagtgtaacaggtcggctgagttgctgcctgggacacttacttcatcctatgtttaaaaaaaaaaaaaagagagagagaaaatggcaagagtaaaaagaagagaacagagtagagagtgaaatgcgacaacttggagttatcagacatgaaattaaacagatttaaaaattcatctttaccaataacaaccccaaaaaatgtgaacgtgatattagcatactgtacctccttgaatcatttacaaaagaacattcagtaaaggaaaatacatcttaatgcattagtcaaagaatctctttcagaagtatttataaagcaaagagtgggttcttaattttttttttttactaatctaatatcctccaatgaggtactcatgtttgtttctttaacaagacattttaaactatttatggtttagattaagaaataaattattcacttcaacaatgctactgtgacccagacaaaggtacaagattctgatgatccacctttacatactgaaaggcattttgtttttcatctaaacaagtggatgattaatagcatttaaaaggtttctaatgtggaacct

SEQ ID NO: 32088 - DNA, 1580 bp, Bovine  19866880506020
  misc_feature (1)..(1): n is a, c, g, or t
nctccctgtctctgtctctctctgtctctttctctccctgtctctccctgtctctgtctctccctatctctgtctctctgtctctccctgtctctgtctctccctgtctctgtctttccctgtctctgtctctctctctgtctctccctgtctctccctctctcttttctcagcccctctcctgtcctctccccctcctccctctctccttcccatcccccactctgtacctgagtttggactggcacaaccctctactatgtggccttttccctcttcaaactcagcacctacgtatggagtgttttccctgagctcagcactttgacaccttatgttggttcattgcatcctgatgactcatgaggtagtgaccactgctcccattttgcagatgagaagagtgaggttcagggagattcaaagtctcacccaggattaccgtcagtgatagagccgaccgaaacccaggcctccaacctcactgttctttctgctccattcatagtggggtggagggcacatatcccttgattggcttcctgctctgtactctagaggcttggtacgatgtcattctgttttaaataatttcaatcaatgcctccaagggcagtgggggaaggtgtttggaagttcgtttcatgaaggcttggccttatttggataaagaaccaagatactttgtgtatgatgttaacagagtcgattatcagcaaagcttttttttttttttttataacagggacaatgtgtatcctgaggccaagtggagaagtgagacctcaacactagtgtttccccgggtaatacccactcctccaacaggagaggggagtgggtgctagagaagagtcctcgcctgacatgaccgagtcgggcaccatggaaacccagatgttatcacatctgtacagtgtttttcctcctcttcctggaaagagaaataacgagctcttgaaattcaaattcccatcgactctgaagtcatgagcatatttaaaaacagtgtgaggctgtgacatttacaatccctaaattcatgtcagagaataaatccgaaatcaccttcaatcactgaataagaagcagccaggcgtctccagccctgtggggggtcgggctccagcaatgataatattcagaaaatgctgggaggtgcaggctgggggtgaccaccctcagcaacccagcctttagacccctgcaggtgtgcttaaaaatcaggggggaacagagacccagcagcagagaagagagaatagaacccccggggggacccagcctccttgcttgtcaacccccacctgcgtgctgggctttgcctgcaggcaccggtgtgtgggcagcaaagtgaatgtcgcattctgggacaggcgtgtgcctttctcagccagaaatgcatcctcattaagacaaaataaggctcccgcccatgatgtcaggggtgcttggctgtactgccacagtggggccctttatccaggagctaaatacgctcgtcttggcagggctgacaggtaagcatgtgagagccgagtctctggccaccttccacgctgaagacacacctgccagtc

SEQ ID NO: 32089 - DNA, 1549 bp, Bovine  19866880519247
  misc_feature (1)..(1): n is a, c, g, or t
ntaggaagggtgtcaacacacaggaaggcctccctgtgggcagcgaagctggaacactgaggacagagaggagccagccacggcggcggcaagcgtaggtctccccaccgcagcagacgacttcaggctcatgtctctcgtgttaatgctaaaccccagatgactgccttcagtgcaggagacccaggttcagtccctgggtcgggaagatcccctggagaaggcaatggcaatccactccagtattcttgcctggagaattccatggacagaggagcctggtggactacagtccacggggtcaaaaagagtcgggacacaactgagcgactaacactttctttcttttccttttccagatacctagcatgctgcctttcacagagtaaataaccaataatatttgttaactgcattaacctagtgagataggaaaagaaggaagacaaaggatgttcacaggaggctcttgcttcctactgatttagacaaaatacttaccttcttaaagcctcacatccataaaattgagaggatacatcaccttcctcaaagggttgtcaagaaataacctgaattaagtacataagacactggctaacaaacagaagtcctcaacaaatctgttcatatttttaaggtattctcatacctactggtttcctcaacaaatctttcttcctaatctcctcaacaagccaggtcttgtacggagcattgcgggatactgcagcaaataagacaaggccactacccttatggagcatccatgctcgcgtctcctacctggtagtcctatagccccctaagccacccttccttttttaaggactagttgaataccactttctacataagaatattctcggacatccccagggaaaatttaatgtttttctccattatgctccatcaattcttcatagcttcattatcatcacttactgcccatataatgaggactccacaaggattatcccttgttcatctctctatgtccagcactggcatgacatctggtgtaaaataggcactcttgtaaaatttaaatgaatccattttaatctcatttatcacagtaataaaataagccatgccttgcgattaaaatgcaacacctatctctaccatgatctagctggttagctgttacattagaatatcttcatttctaagttttaatggccaaattcatcaacttcacctacttttaaaaagctcagcttaattctctttttgtgggctcaacaaatactttaaatgtcactattaccatgtaataataaatgtacttactactgtcaaataggaaatagtgattcaataactaaagaataataacagaaaattaactggataatgaaactctgaacattttatggaactttttttaagatctcatcagtgaaactaaaactaagtataaaaaataataaactattagctgtaccagcatcagcaattttatatattacctctaaatatcatagaactcagaataataaaggaatatgctttaaaataatatgaccagccaacagtcaagcta

SEQ ID NO: 32090 - DNA, 1374 bp, Bovine  19866880537993
  misc_feature (1)..(1): n is a, c, g, or t
ntggaagggacttttgggttttattatctaatcaggtctcctgtccctaagcagactggaagccatgtaaaggatacagacatgacctaatgtgctaaaattttcccgaacctggattttcaggctaccacatgaatttcttccaatagaagaaaagtataaccttacagaaaatcagctagaatgactgtgggaaagtgtgctagagaaaaaggctcataaactaatgaacactcatgatataattaagttttctttctatattcaagcactaagcaactgtaccccaaatggaagagtactctgcacttgtgataacgtattttgtaaatcagagaataacaccaacaatgcagtgtgtgtattctgaccccactctctcttatggagaacatagagttcctctacctggccagatccatgcaggtgtcagtgaggttggtagaagaattgaagtactctctgctggctgccagaaccaagtcaatacttttttcgtaactgaccctgaattgggtttttcctttatgggctatactagttggtggatttattgagcaagcactgcagtgcatcatctgcccagccaggtggatgttctcaaggcgactggaacacagaagactttctgtaaatatctggggaaaagaataaactagaattagtgcttagaaagggaggactcaattctcaatacaatggaagctctgatatccaagtataataaattttaaaaatacatccattctacaagtagaggttgcacaataccatgaatgtacctcaatgacaatgaagcatactttaaaatgcttaattttatgttatgtgaatttcacctcaattgaaaaaaaactccctcttttagcaagaagaaataatttaactgaacaaactaatggtaagcatactttcatgtgttacaatgaacacttaagtaaaatacctaaagttcatactcactaaaatcaggtccattagacatactgtcccacactctggttgaactgtaacattttcattttttaaaagaaaatctttgaatatagtacacataattaatgactgcttaaagcacataaagtcagtctcagaagtgtacgtgaatgctcagtctatcagtcacgtctgactctttgcagccccaaggactgtagcccgtcaggctcctctgtccatgggatttcccaggcaagaatactggagtgggttgccatttccttctccaggggacccttcagtctcactaaatacctaagctaccaaatgttctccttacacttcaccactagaatgacaatacaccacgtgactttttttttttgccaatctgcaaattaaaaactatttaaatacaacagaagctacttgatg

SEQ ID NO: 32091 - DNA, 1016 bp, Bovine  19866880556207
  misc_feature (1)..(1): n is a, c, g, or t
nactgtagcccaccaggctcctctgtccatggaattttccaggcaggaatactggagtgggttgcccattacttcttttacctaagttcttagaaatcagacccaatgactaagggagattccattgcttattctcccattttaagaaagagaaaactatcttagactcaaatctttgctgcccatcataaactcagtttttctgagcacggataatatacctggcatcaagtgttttggtttatagctaggttgtcattagcctgaatggatcctcatcagcaagacacagcttgccccaaaccttacctgttccaggaagccttcctaactttctaagttgcagggccccactgttcccttagggcccatggtaaggttagagtcacaaactttaaccctgtatttgcaagcctatttattcaggcattgctggagggggcctgggagcaaagcccatcaagttcatagctcatggcccagggcaggacttatcaattgtctctaaagtgaaggttttcttcacccaggggcaagtggctagctgttaagtagaagctcagagggtatgcaggtgttacagggtgagaacaatggaagccaagtcagagaggtctgggctcaaggaataatttctccagtttacagctcctccaatgagagctgtctctacagaagcaaaggtagatggacagaaggcaagtttgtgatccctagtaaggcaggcgagaatccatgagccccagatggttcaaggtggtttctaggctcacaaaggtgacgctctaagacgctgaaggaaatggccagagctttcagagccattcgaaaaaatagaaaataatttccaaaagtgagggcaggcaaaaatttagaaactgcagcccagttagtttgatgtcagctgctggcagaaatctatcaatgggggatcagccagatggtatgtgtaattggtgcttagaaatgtgctagggacagagtttagcttgtatgagcaaaacacttgataaaat

SEQ ID NO: 32092 - DNA, 1895 bp, Bovine  19866880563718
  misc_feature (1)..(1): n is a, c, g, or t
nccacatctgtagtcaggcagcattaaaccaggcatgggaaacacatcactgcagaaacagggaaccacagagacatggctgaaaggccagaaggaaaatgcaggcttgtaacctacttgcagaactaaatgaggggacaaaagcagaagcagtgaattcatttctctgggagctcattgatgaatcttcaccctgaactttcccagtctcttcctttgtttcaagtccaatgttcattgtgttttgcatacctaattaattacagcatgcatttccttactttgccaagggtgcgtaattgatcatgctgggctccggaaaccatctttggtaagttttttgagatcatgcaaattgacttgccaccagcgatgcaattcaacgatagaatccaggaggcctatgagaagctttggaagtgtactttcctttacttggagattgatgaaatcgccaagggattaggtaggcattttgctaatagttgaaataatgaagcagtatgtggtgtatttgaaatttctgagagtaagttcacaccttgctacagatgtgggtcattgaactagatggcttctgtgggagtgcgcacacatccctgtcacaaggcagcccagacagctccctttccttcttgagaccccatctctgcaaggctgctcccaatggagagcttggacccaggcttgggacacacaagcagggcaccaaaaaatgaagaaagtttgatttcatggacttattcaaaattgttaaatcttagaaatctaggaaaggctattttgactttcttgttgtatgttttgtgttcagatttagagtgtgttttgaatgacggatgtgggtaaggacagggaacaggataccatgatcttttcagagcttagggtcaccaaggactcagctggactcagtgtcagctagaggattctgtgcaggatgagatgaccagtaagactgtctttccagaacctcacagtgtaggctgtacaaggctggagtgtgaaaactgtttgaaatgcctgttaccgaatgctgtgtgagttcatgctcaggtgtgtctgatactttgcgactccatggactgtagcccaccaggcttcctctgtctatgggattttccaggcaagaatattagagtgggttgtcacttcctattccaggaagtcttcctgacccagggattgaacccaggtctctttcatctcttgcactggcaggcagattctttatcactgcaccagctgggacagcccatccaatgctacagagctcccaaatgaagccttcttactttccgtggcttttccaaataaggagtcagattttgtcagtataaatgtcaatgtaaatatgcatcttggttgtcaggcctattagtgacttacccagagggactttaccacctcagatgggttctttccgatgctggaaacagaatgagatcaggccatgctttcctcttgtaattgcttttccatttggagcataatttcaaagatgtcttgctagttttcaacagtctggtttggaggtgtcaatgtaaagggatgttctttgcatctctctttgggttttctgacttgctcgggccagatgactgttccatggaaaatatcaggcctgtacagggctaccagattattaatgctaggatcagctggtcacattctgttttggtccatgtcttatgtcaaggtcatttaatactttacatcagttgaaaccaaggctgagctggggaaatctttatggagcccaagcgattcacccacaaaggtcagaattacctgtatttagctgattagacctcaaggaagagcgctcaaattaagggctcacaaccagaaagttcccagatgactgaaaacgatgggttatcacacctcagaca

SEQ ID NO: 32093 - DNA, 861 bp, Bovine  19866880595795
  misc_feature (1)..(1): n is a, c, g, or t
natttttttgttatattgatgtattttatggtgatgccataaaaagaagattatgacttctcattatgaggcagatggaggagaagacgcagggttgattaccagagaggggagtatgttctttccaaccagttaccttaatagtcagcgagggccgtgctggacgtgaatgggaggtccaggcaaatgacttttttatgggccttgctttatagcagcttccttttgtacattttcaaatgagatccatcaaatggtaagctgatttttcagtttggctggaaaatgaaggttccacagattgtatatctttctgaaactcttattaaaaattaacagaattccctttctgcctctcttaatttagtagcaagaaactggcttacttaaaaaatccatgataattgaataacactttacatatataaagtattgtgagaatcatccatctttttttccttttaaaaatattttgtattataagaataatgcattttcattgtaataaattgaaaaaaatagtctttatatgaaaagaaaataaccaggtttgactactcatatgatgagcatgttcaccatatctctaattattgtttaaaacaccatttttatttatttatttatgaatgcatgcatgctgcactgtgtggccggcttgcaggatcttagttccctgaccagggactgaacttgcaccctcggcagtgaaagcagagtcctaatcactggactgccagggaattctctgtgttcgtttttatttttttcagctttatggaggtgaaagtcaaagtgttaggttctcagtcatgtccgactctttggaccccaggactgtagcccgccaggctcctctgc

SEQ ID NO: 32094 - DNA, 3876 bp, Bovine  19866880613412
  misc_feature (1)..(1): n is a, c, g, or t
nttcgatccctgggttaaaagatactctggaggaggaaatggcaacccactcgagtattcttgcctggataatcccgtggacagaggatacagtccatggggttgtagtgtcaaacacgactgaacacatgcatgcccatgacacgatgaagtgttaggtgaagggaagtacttttgatcatttaaagatatgttggaagagaaagggtagtggcttagctcagtttgagctgtttgtgatccttagtctctgttatgggcaccaccagctcagtttgaacttgacaaaccagtttcttagaaatcaatcctcagattaccagacaccagagggatagggagtcctggcacgctgtggtccatgaggtcagaaagacgtggacaagacttggcaactgactgaacaacaataccagacaccagagaaagcagctcctgcatgagtttactatagtgattgatgaacaagaattgtttctgtaagccagacttgacatgtggaactgttcttgttcttgtgaacctgtttggtaatgttgtctattgtaggacttgaaaaatattactagtgcctatgaagttaacctttgagctatgtaacacttgatgctaatgagatttcatgttaaattttatgctgggagttgttgacttggtttgggagattaatctatttctgctgttatacactctaaattaattagcaatatgtgactatgaatataaaaactgccagtagtaatcatttcaggagtaaattttcctaacctcttttttctttccctattacatggagttgaaataaaagtcttttccttattaatgactctggttacactctaatctggtagactgctccccagttaaatgtttcttctgtagtctaaacgagccttttgttttgctttctctataagggaggaatcttacagaaaagccttttgtcatgtacatttctgtgcattgacatttcatttacttttcagtttcagatgtttaaattttttatattgagtcagccagtccatatgaacagagtaaagtttaggtttattttatgaaatggtgtaattgtcttatagcctatattttttgatatttttcaatgaatttgattttcccctgaatgaagttatttcatgcttaagtgccatatttcttatcatgtttatattttttagtttctgtacttggattagttgataacactcagatcactccataaccctcttgagtagggagattctaaagatgagccagaattgaaaatgtgacatgaaaccttacctgaataacagttagttgctgtaagcataacatattagatttagaaaatgtttcttcaagcataggtacagtacaatcagacattcctgttcatatctacagtacaagctatccttcagtaactttcatacaccctgagcatgtagcaatcaacagacatcatctctgcccttgaaaagctgctgtctagttgagaagacagacagaaaaatcataattatggcaaatatattaaaagtaggcatgtaatgtaatgattgggaaggagaagagtatcttcttgacaggattttactgacagcaaaaataccacatttcaaggaagatacagaatttctttgtgaccttggagcaggagaagacttcatacaaaaaaaaaatactaattataaagtttaaaagctgataaattgaactaatttagaagtttgaaaacttcttttaatcaagacatcattaagataataaaatataatctgcagaataatagaaaatgtccataatttatatatctaataagggctatgaatccaaaatatacaaagaaaaaccaaaaaactgcaaatgaataagaaagacagacaaccaacagaagagtgggcagaaaatttgaacaggaacttgaagatcgtccactttcttttttctatggttggatccagaatccttgaatttctcttatctgacttatctcagtcccttttcgtctttagaagaaacaaataaaagcatttaaacttaaaaaatgcatttcagattcaaatataccttatggaaacctcttctattcccagtatcactgccttaattcagttcctgattattttatcttttttttaattgtacttttttttttttggccatgcaaggcagcttgtaggatcttagttccctaactgatcttgggtggcctccggctgcaaccacttggaacagggcttgggttcccagccacagatgggctgggtcgcggtggtaaaagcaccaggtcctagccactaggccagtggtcagtgtcaagggccctgactgaccctttggctttgcagaaaagaattgccacaaagacagaaaatagtgaagcaagtaaagtatttattaggagtaaaaagagtacattacctgaggatagacacaggcagactcagagagagagtccctgagttgctgagtcatgcctttgtggtagtttgaattactttcatggggcatttcttccgggtttcctttggcgagtcattgttatttgcctgcttcacagtccttacgtggtttatctcaggatcctcccatgtgggcacatgcatctctttgccaagatggatgctaccgcaaaggcatatgggtggaacatcccatgacatgactctcccttggcctccaaggagccttttctgcccatgtgtggttagggaggtctctgacttcgggaacaagaaatgtgtggtctgtgcagtgtctagcctcctccctttattcccctgctatttttgtcttggaatttccatcaacagagaatgaatctccaattactttaccctgggttggggggcgtggcgggcgtagtcccatctgcctcatgaccaagaattaaacccaggcccttggcagtgaaagcacagagtcctaacctctgggccactagggaattccccgagtccctgattattttaaatttggactaattcacctatctcctaatggattcctgctcctggaataagatttgtaaaacataaatctcgttatgttaactccttttgtttaaagcctcttgtccaggtgatgatggaggtgctttggtgtcatgtcagtaggtctcttgctggtcttgcctctgcctacctttgatcttcatgtgccctgaccttcatctttgtgtattcttttctataccgtcattgaatcaactcgagtttcctccaatatttcatgttggttcatgtctcttatttgtataagtctaccaggaacatcccctggaggagggaaaggctatccattccaatattctggcctggaggaggccatggactgtatagtccgtgaggtcgcaaagagtaggatacaactgagcgaattttactttcacttttcacctgaaatcatgggcgcttctctggtggctcagtggtaaataatccatatgccaatgcaggagacacaggtttgatccttggattgggaagatccccctgcagaagaaaatggcagcccactccagtattcttgcttgggaaatcccttggacagaggagcctggcagggtacaatccatggggtcccacaaagagtgggacacgacttagtaactaaacaacctgaaatcatcaccatttcttctttggaagcctgaaattctttcctgctgaaatattacttcttctgtgaagctttctatgatggtgcctctagacagaggacatagtgatttgtctgtatctctggcctccctttgtagtttctggagctcagtggctcccaagggcagaggctgtgtccttcttgtttttatcacctaattgactagtacaatatagtatgacatcaaataggagtcactcagtgaggatttgctgagtaggggaa

SEQ ID NO: 32095 - DNA, 2740 bp, Bovine  19866880659040
  misc_feature (1)..(1): n is a, c, g, or t
naccatgtagaaaattcttaagacgaaattcacatctatagtccatgaaacaggtacataagagttcttgattaacccataaaaccaggaaagaaagtagtatctattgagctcattattctgtatcattccctgtaagaatcactttacatgattagcaccctaaataggaattttatctcatttatccttttaaatcttcaatattacaagtatccagaaaatagtaggtactcaataaatgatttaaatcaatgaataaataaatgtatgaatgatgatgtcaagttaagatactcaaaattactgaaaatgttactggttttcctaactctcattcattcatacagtctcacctattattctgagttacacattgttggggaactagaacctttcataccttctgttgttggaaatacttcttctccttcggttttagtttctgccagtttcccagttctcagtaacacttctgcaaagctttctaccgggatatgctgataggtgtcataggtcacttcagactagacaagagaaggagtgacatcatttgatgggatggctttttctctatgaagatattcttagaaaagataatgataggatttttatcttctcataacttgaattatagcttctcacttactaaagcatattattcgatgtaaaattgtaaaacagattttattttagtctcataacacgtaacaaatcacataaaaccaatgcaaaacatgagtatgaacaaaagaagtacatcttcaaaaaaaccgcatattttgtttgtagtaaaatgctcgcagccaccatgatagttaaatctatgttcttaggcacactgcccttaccttctacaacaaagggattggagatgacagattcataaaaaggatgacagccttgtttttctaggccttcattggctctggttccaatttgataaacaccaccaaattcttgaccctaaacagaacaaagtgatgatcagtggataaaggaaagagagctgggagaggaggtggaggaggaaaggaaggaagaaagaacaaatagatttcaggagaaatggatcacgtgtactgtgtgagccgaagagagagtgtcagagcgacactgaaacccagcggagaatattaagaatcatcaccacgttctgagcagcgcttcagcctcaccctgaggtgctttttgattcttctggtcactttgacatcactgaatcagaaacactgaagcaatcggtgtcacacacatggccagttttctatacaacagtccggataacctttctaaaacatcattctatatatgctgttcccttgctccaaaaaacctttagtagctctgaataatgcagtcagcagtatcaaatctaaactacacaaaataacattcaaattcactaaatgctaattaccattaaaggctaacactccatgcaactactttgtccgttctactggcctctgtgccctcctcccgttacaagggtaatggtccatgctgactgcccacctctgcccccaggcccgccacagaccacacctgctgaaatcacagcagctggaggcaaggtaagactgggctcccttcaccagccccaccgcccccacaactacaacccacacgaacatctttattagactggtcttcagtattcattagcaatattttagtatccctactatggttaattatctttatgctttgctctcctcaaacagactgtaaagccccttattggaagacccaacaagaagacattcacccaatcctccaattcatggagcacttacttagggcaagcacagcctaggaaacaatcaagctgctgctgcgaatgatgttaaaatagtttcttcagagaaaactatatactaggcacagtggtaaccactttatctaagacgttgttgttgttcattagctcagtcatgtccgactctttgcaaccccatggactgtaaaatgccaagcttccctgtcctttactatctcccggagcatgcttaaactcatatccatcaagtcagtgatgccattcaaccatctcatcctctgtagactacttctcctcctgtcttcaatcttttccagcatcatgatcttttctaatgagccggctcttcacatcaggtggccgacgtattggagcttcagcatcagtccttccaaagaatattcaggactgatttcctttaggtttgactggtatggtctccttgcagtccaagggactctcaagagttttctccaacaccacagttcaaaagcattacttcttcagcactcagcctgctttacttaatggtccaactctaagactttcaaaaagccccaacaggtgagacagaaaataaccctaatcaaaatccagtgtgatgcatgcagcgatgagatgcacagacttcacccaaagtcaagcccacagcccatcagtaagtggtttcttctgggtgattatcctccattctctctcctgcatatcccacgttcagaccatcagcaggtccacaaagtacaccctcaaaccaaagacttctcatgtccctcatggctaccctaatctaagccatcaacatctctcagctggactcctggaagagagaagcatctttttgcttcactactgatgactctctgcacagaagttaaacagatgtattaaaagtaaccttggatcacatgactgcattgtcgaattttcaaacaacgctgtgttgctagaagcagatct

SEQ ID NO: 32096 - DNA, 1353 bp, Bovine  19866880669549
  misc_feature (1)..(1): n is a, c, g, or t
nccttgaaatcatcagcctatccaggggaagtgttatagttactgtacatgtaatttggaatcttatgtatcattggccatctctcagtttttaaatgagtaatttagaagattctgataatttaagtcttaagatttctttacagctgtaaacagttggtcagtatttcccaccatgttggctctactctagaatccactcttcaataagaaagcgttggtgctgctgctagattacctgctgtctttccattgaatctctcaaatgcttttgaagtctttgaagttaatttctacttatggcattctacttactgagaatgtgaaagagagcatggcctctttcttcaaggtagtcaacttgaaatgaatcttaattatttcacatatgctaccacagcttgaccttcagcaactatagaattttcttatgcatattctgaatggtggcaggtttcactgactgtgtcaccaatgaggttttaccatcttgaatgctgtactgttttctctctggaaaataacacatgccatcattccaaagtggtaactaatacgttgtgtttgtattcaggtatctctgtcagttttcaaatctcttgttatggtgcccccaagttctactcttggttcttatttactgcatgtattctgaaaagaccattggaaataatgtcttataatttgttttaattaaaacctgtacttacagctagccatgtgtgagcaagcattaataccatctgtcccgtgttgctggtttccagaagaacagctgggcatgagaacttgaattcaactagacagtgcccaggtctggttttatgaagcttgtgcaagagagacacttaatttttcaaacattttgctacttttttgcctgtaagccaaatttgaaagagccctttaattttttgaagtccacccaaagagttcacataccaacgtctaactaagggaagcacttcagggattatccttaaagacttgcaaatatgtcagcttgttttatgtgtttgtatgctggaaaagaatgtgttctcttaagctttattgcatatgggatagaaataattgttcattttgtgtaacaaatacgaaatgttgaaagcaaattttgtttttaatgcataagaaagaaaacaatgcatggaaaagaaacatccagttggtatttgacaaacacaaaacaaaacctgcccttttcaagcaatgagattcatgattatatagaacttcaacactagaaaataaacataaatggtgattacaaactcatagatattcaacaaagatgaactttgaagagaggggagagaattatatagcacattcgccctcctaccaggcaat

SEQ ID NO: 32097 - DNA, 625 bp, Bovine  19866880699331
  misc_feature (1)..(1): n is a, c, g, or t
ntagctttaaaagtgaggatcggaaaagatttttaatgttgcagaaagatctacaagtcttcatctggaacatataaaatgtaattcagaaagagtagaaaagtgttgttgttcagctgctaagtatcatctgagtctctgtgaccccatggactgcagtatgccagtctcccctgcccttcactctctcccggagtttgctcagattcacgtctaaatggaaaagtggctgcatggtaaatgaatcatgtgtactatttatgtaaatctcaaaagtattttgtccctgtagggaagcactactatgaggtatcctgtcatgaccaagggttgtgcagagttgggtggtcttccatgcaagcatccctagatcttggtaagtgttactaaataaactgagtttattgatttccatttgtgaatttttaatgttttgttttagtggggagtgaagtaataaacttaaccatacagagtttatatttagagacatagaaataatattatttacctattccctacctcattccaagaaagatttgaagtccaccaaaaatagatacggtaatatcataaaatcaggaggaataatgttgagggtaagagtaaagtcagtaaagttaat

SEQ ID NO: 32098 - DNA, 1735 bp, Bovine  19866880735928
  misc_feature (1)..(1): n is a, c, g, or t
ntttgtaggagcacaaatgttgtttaatacctttcgttaggcctttggtggctctgcatccatgccattcctttacttctctgctctgacaacaaagaccatctgagccaattgctggatttgagaaaaacacagaaaaccatgtcaatacagatgatgtaaatcacgcactctgaaataagcatcattcagtctcactaataagataaattttcacttgttgcaatgttccaaggactaagagctgctgattgctgaaggacagcagcatcctctgtgtgagtaaccgcccccattcaggccctcgagggccatgccaaaggtcggggactagtttctttactgtgacctgttgacctggacagcattttaccacaacaaaaaggagtcaacacagtacctaacctgacttgcaccgacgccagctgcaccaccaacacttagacaactgttctctagagtcccttaaggaatggatactaaggatgacactggttgctccgattttatgctgaaattagagtctgaatgaatgctaccctaaaaggaaaagagaaagtctccctggcttgttccctaatctgcagatccagcaatcacaaagggaaagcaggaaaagtctgaataaataaccctgtggctattattgctaacataggactctcaaacatgaagttctatattatatatcacagtcagtcatagcgctaattggtgcttttcggctttaagtaaagcatttggcctttatctttactagaaactgcaacttttgtcctggcttgggcttgcaaatcatatctggcacctgactatagaagaaaccttttgaaaaagcacctcatcacacattttcctttccttatcagaaactacattatttactcaaagtatgaattctcatgagtataatgatatactcatgtcacgagtataaacctctgaatttttaaaaagttctgtgataatggtaaatcctaaacatttttgtatttaaaattctttatgcatatgtacataattaatctagataccacatggtgaagagcagcattggggttgcttgtttttgtcatgattcctcaggccccctctacctttctctgtatcctgattttcttcctcactgacacctggggaaaattcctccaagtcaactctacagttctgacttgttcttcctaatggctacacaagagtccatggatacaccctaatctttgtttactattctggcagcagcatttactttgctggtagtttttatcattagaaataacgttgcatccaacagctgtgaatgtatatccttgcatacgggaaatttttccccaatgagcttgatcttccaggaatatacattctttaaatactaaaagataatgcggaactgcttcttagagaggcagccaatttgtatgtttgtatcactcttctggattcttgctaatcagatggtataacacaatcactgtaacttttacattccacttccctactacctgtaaacttgaccttgcatgtttattgccatttggatctgctcttctgtgaactgcctattcacatacttcgcccattttccttattggctgtttacctctttcttactaaaataagtaaccctttatcatccatcaacacaagaaccccttataagtttataaggattctttatctttcctcagcattgcattaaaaacaagctttgaattataaatatgcgctaaagtct

SEQ ID NO: 32099 - DNA, 812 bp, Bovine  19866880814057
  misc_feature (1)..(1): n is a, c, g, or t
nttgatgttactactgttaactgttttgcacttttctattaaggtatgcacattttttaaacataatgctattgcacacttaaaattacaatataatgtaaatgtacttttataggcactaagaaatcaaaaatgtgtgtgactccctttattgcaacaatatcccttttattgcagaggtctggaactgagtccacagtatctcggagttgtgcctggagtggcagaaattgactatgcaataatcagtgcagccccaacttgcaaagaaggacagaagaagggaagaacagctactgaggtccttctatgccaaggcatttcatgtgcactgcttttgaactgcctcaacaatgcaacgtgttctgtattatcttcattttacaaatatgaacagactcagagaacaaagagaaaagacattcctcagtgaatattcccaatgcccagtctggctccaagaagctcagcgtgccagacagatgagcatgaatgttcagaaggggactacaacaataccacagacattaaggcaactatacacaagaggaggaaatgaagccaaaataaaaatcagaacggacaatttcttccctctgaaactgcgccaaggcttctacatccactttaatactccactaaatatgagagcaaacggctgcttacctatgcccgggatggtaaatagctgtgttgattccatgaggataatgactgctgaagctgaaacagtggctctcctgatagctctgatgtgttccaacactaaattcaagaaggtaagtaagaaataaataccattaaaccacaat

SEQ ID NO: 32100 - DNA, 1360 bp, Bovine  19866880878618
  misc_feature (1)..(1): n is a, c, g, or t
ntgagaatatgtcctttaattctctgagaaaccctaaggggcaggcactgtcactgtcctcatacgacagagaaagaaagaagtcgggggattcaatcgttcgccgcagtcttcctgccttgagctagtattggagctgcagccaccccattctatttctgtttgtcgttgttgtttttgccactgtgtccctggaacccagaagagggcttgggaggtctctaggtacttggttacatttttattgaaggaacaaatgaatgaatgaatctgtggttcttggatctagataaaagcagagaaaaggccaaaagggttgctttttcaaatgaggattaagaataaaagtttatggctgtcttgcattgactgatggggtgtgggcgctctcgcacaaagcaggaagcagggttggaggctcaggctggaaaagcagagacagggaaagtgcaggaagacttcaaagcaccaacagcttctcctgggctgtgtctaaacacgtgaggcccagaagtgaggcaattaatcaggtaattccagcccccttccacccaatggcctcaattatctggctatttgaaaactacccgttttatgggtaatgagtgttaataggctattgtccggaaacagtctctcctccggttttgctctttggcattcaagaggccccaggcagcaagaaaggttcagttcctgctttcagagtcgcaatctctgtgtctttaacaggaggacaagatggccttcttcggcaggctgctggtgagattaaagagagcacagagcacctggtccagggtccgaaccctggctgcgaagcaaacatcctttgcactttggtcatcaccttcacgtctctccccagcagtctacagcctgacccggtgattacctgccttccaggcccaactcgtcttctccagttctgcagactcctcagagtgcagcaagagaactgtgggcagaagaactgctttccatcctccctgaatctctcccagaatagaacttgccctcctggggaaaaattactgagccaaaaaataaagagagagaaagggagactgagtagaagagggaactcccatctctagagttgctcgatgttgcaggccaccaattgtgctgggacctttcaaagcactttctcgtttaatcctcacagcgatcctgcagggaagggtactgttatgatcccattttaccaatagggagactgaagctcagcggtttaaatagcttgtctaaagtcaaacatccaggaagtggtgaagctgggacccaaactcagagctaatggggtcatcaactccagggattttcagatacacaaatattaagtcttaaaataatctat

SEQ ID NO: 32101 - DNA, 4126 bp, Bovine  19866880899101
  misc_feature (1)..(1): n is a, c, g, or t
nttatggtttagcttcctgtctactgtcatctttcagaccagtctctgtacacgtcccagaacaggaagcttactgtctctctatacagggagagagaaaggaataataggtaacctatatgaactattcttattgtgtcaggctttcttctaagggctttgcacttattcatgtattcatcactataaccctatgaagtaagtgatgatattatcgtccccattttgtagatgacgaaactgatgtattctacagctgttaagtaggagagctggggtttggacccaggcagtcagtctggctccagattgctcatcactataaccctatgctatatagctttcagagatagggattcttagtattcgggggtgtcctgccctcctgcatggaagaggggtgctttccattctggcagggctccccatagcgtcttatttctttaagtcaggagttaacaggcttttcctgtaaaggggcagataataaatattttagacttttcaggccttatggtctctgacataactaccattcagccagtaaagcagccatagtcagtatgtaaatgaatgggcatggctgtgttacagtaaaacttgatttactaaaacaagctgcagtcacacacacaaaaattgtggtttgcatgtttcaaatgtaaatagtatgaataaaagatcctgtggtaaatctggaaatagtctcctgcatatgcctatcccttgagattcacagttcatcctattactttaaaacttgtctctgtcatggaataaaacctatttctctcttattttatatttctcctcctcctctccctcctcccctcttctctccctttctctcccaccttctccttccttggggggagggggcagaatagcagttaggctcccttagcatcatacttcatgttcttgggacgtgcccatcttgagaatcccctttttctacagacaagtaaactgtctctggttgaagtacagctcaaacggctcctagacatgtgcaaacctacgctccttgacttcccccacagtatctgcttctcccgggaccacatttcatgattagctgtatggtctagactcttggaggaatctgctgtagacttcttcctcaactgactcacatctccacttccagttagtttctaattcttaccaatgctctcttctcattaatgtatttttctctactccatcctcattgctacttatttcccaagcatgtttgaccacaaaatcagtttctccagtttttcacagaacaaactatgaatctccaggtggaaagataaacggcatgattccagggaagaggacagggcaccttttggcagtgccttgtgtggtaactgcacagtcgctttcacatcctcctgagtatttcatcagggtatgcccaggctgtggtgtgacctgagtgagatttgtgactgtgtggcagcctgctttaaatgggggttagggtagaagagaatcagtgtctttaaaacaatgggattttagttcaggaagagatcttcattcttagccttctgattttacaatataagaaactaaggcccagagacttggcagtagttacagcaaattggaggaaagcctggactgaagcctggaccccttctcttccagtaaagcaccctttttactctgcctccagttccttataaaaacagctccgtgttactgaatgggtccttgttgagcgtcttgtaggcaaaagacctaaagccaagagaggtttcgtgatgtgtcaaccagaccaagtcaggatggaggaccacagggaagaatctccaacaacaccccattggagatccaaagccaaggtcccctggcactgtcccttcaactcagagagtggggctacctgatgatcgctcagtttccatagaatcattccatgttgtgattctctaaggacatagccttgttcctaagtggtttatgtttcaggtttttcctgtgaacttaggatctgactctcttttccagaaattcaaaggcagcatagtttgtgtgaatggctgattgtgaacttctcggagcctgacttctcagcccccctccccagcttctgtccaccctgctgaccagacgtggcctgggttccaggtcgatgtgaatcttttttattctgacttcagtctttcaagcagcggtggccctcccccaagccccaggaggggaggaaaagcaagccatgtagagcaaagtttttcagcatctcagaaaaggaggatctctgaatggtgttttgtatgaggtttccaccttaaaacctgacagggaagaagaggagtatggtggagagcagttcataaagggagagagatataaggaggaaagagagagtaagggagaaagcaagacagaagcagcagcagcagcagatgccccagggtactgagtgaagagatttaaaagcaagaagagagagtgcagtatagagcaagcagattgagggtctcccatccacatgtacctgcctgtctcatggtacaggtttcagaatcctagactgtccgagtttcaagggccccttaagagatcatctggtcccagcctcagagccctgagacacagagaaataaaagatgccacacatgcagccctatgcaccaggactgagggagctgcctctggggccagggctctctgggcagagccctgtactttgtctgttctcatctgtgtttccagcctggattcagcccatgcttgtctggggagtcgtgactgggacctgctgcctcccagcgatgctgttctgccaactaattggaagtctttcttattgccttggtacaggatatactgcggggacaccatacaaggtcccaccgacccagagtaatactgctccgcccccctactccccttcacccaacccctaccagacggccatgtatccaatcagaagtgcctacccccagcagaatctgtatgcccaggtaagtacatgtagaagcctgggtccacctcttctgcaggtaaaggagccaccagcctgggtgggtggggtggagggggaagaaaagagagtttgtggctctgatcagctgtcattcttgtgtcactgaagcagtaaccttacagcctatacataccctcactctacctcagtccacagtcagaggctcttgttattatttagtagaagcatttgagaagctctggattaagatgatccaggccctgtgtctactctgcccagagatcagcagacctgagggctgtgatggcagaaagcagtcatgtgatccaggcagtgggatgtcacctcagaccattgtctccatcgtcaacctttttgcctaaaaggaaatatatagtaagagacatttggggaagtgctctgcatttaggacatttttccagtatgtaaaatggaagcattcacaccagcacagtgcttccatgagcagagcctcagaccttgtgtccctgggccagagatcctcagacaccatcccttagggtttgagacaggctcccctcccctctctccccacctctccaaaagccggtgtgacaaaagcccctcttcccccagggagcttactatacacagccggtgtatgctgcccagccccatgtcatccaccacaccacggtcgtccagcccaacagcattccctctgccatctacccggcgcctgtcgccgctcccaggaccaacggcgtggccatgggaatggtggccggcaccaccatggcgatgtcagcaggtaagggcagcatctatgtcagtgtccattcccttcctccaggaactcatgacagtggaaaacacagtcatggaatcgactgtagcataacatgaagaatcctgtaccttgggagttctagggaccctctaactctctccacagggctgcggaagatttcaccatggaggatgtagtgagctaggccttaaaaggtgaacagaggctaatcagagagatgaaagagggaagggcagtccaggggagagaacatgagtaaagcacattcacagaatggacatggtgtaaatcgcttagaaaatgagagcatggagttggaagggtggctggagcagttgtcagagataaagtggtgggagagtctcgaatacgtaggtaacagg

SEQ ID NO: 32102 - DNA, 1018 bp, Bovine  19866880941129
  misc_feature (1)..(1): n is a, c, g, or t
ngaagcatctctcttttgacaaaaaatagcttgcaggtagctacctgccttgctaatcttcagtggaatattagttccatgtctacaatatctccagtctcgactgaacatacctttttttcatgatcagaagtcactatagaaaccacattgacaggacctattgaacattctgaaagctttggaagacactaacaaaaaagcgggtggagcaataaacaatgactttcgctgtacctgccttcccttttggcagtctggccacagcttcagcattatttaaaaagtaccaagggctgctgcagtttctttcccatgaattagggattcagctaaggaaagagcattcaggcaactagttgatgctttcgtcatgttgatgaatttactattatgcaaacctgggtgagtcatataaatgcccatttttgtttggtcttttaaaacaaaggcaaagagaaacaaaccaggtaaagcaagggctggaatactggggttcttctccctctcctggctcagtcatcaaccagctggatatctcagcatcctcagtgtctacacaacaagttaggtatcatcagagcaatcattaaaaagatatatataccaaaccccactgtttggggagcccctatacaagaaacagagaaagtggagctcctgtagttgggggaccctggacttcagcctgtcatttttattcccttttttttttttttgcccctaggaggcactcttgaagcttttggaggaattaggaatgtgctttgatgtatcagtctggaaatctcttcctggcaagccccagacaacgcattcatggggatgggctaagataggatagtgagccaagttcctgggtagctttacccagaaggccctgagatgcatctggggtggctgcagggaccctggttcttcagatgttcctctgctgggctcctgcagggaggaagccaaagcacttcacctgtaagggcatacatataattttaaagtgaaaatgttagtcactcag

SEQ ID NO: 32103 - DNA, 545 bp, Bovine  19866880951398
  misc_feature (1)..(1): n is a, c, g, or t
ntacttcgtgcttaaggaaatgcctcccgctctgcacttgcctttttaaatttcacaaccactaaatccactcccagcatttgttttttatagcgaatgaaagagcgagggctctgcaacggagaccttctagagagctagtctgtgagcagcatgagacaaccaggggcgaggggacccccagccccccagcttcccaactgcctctccaaagagacctaggcccatccacagagtcagccaagctggggttagaaaaatccctcccctagtaaagcctgagtcctcgttttttctctttttttggctacgctaggtctttattgctgggtgcaggctttctctcattgtggcaagtgggctactctctagttgcggttcccgggtttctcactgtggtggtttcttttactgtggaggctctagggcgtgcaggcttcagtggttgcagcatgcaagctcagtagttgtggtgcctgggcttttttgcctcaaagcatgtggaatcttcctggaccagagattgaacccatgtcccctgcatt

SEQ ID NO: 32104 - DNA, 1785 bp, Bovine  19866880976419
  misc_feature (1)..(1): n is a, c, g, or t
ntctgggaagctactttgtaggatacatggaagttattaaagaagatacagtctcaacaattaaatctgtaacagaaactgtgttttataggaatactgcagaaacacagtcactaaaactggaagagactccagagtggggtgacagagatagggtcgcacatgaaatgccttcacagcatcactcaggttatcccagcaaagaaatacaagctagagtgcatacagtgtcacagaataccactgataccattaaatatacaaggacaaggatatttgaagagtaggattttcacagaacttcatactaataatataaggtacgaccacgatcttccttttgaaatagtaactgaacgaactagaagatgggctatgcagctttcctttacaaagagacagggcttcaaatttggtgacctttcctgtgatgataagtggctctcaggagtgtgccacaggtagatagtttgtgaaaaataaacacacttcatttgaccctttaaggtcaagagtgagtgaagaagtaatgcttttccaaagaaattcaggtgcagaagagcctttctgaaagcattttcatcactacgtgtttcctcccaacacccttggttatcaactataataacatttatgtatgcacacataaaacagaagtctctagcctgcttaaaatctttcaaatgaagtttcaataggtttgggacccacttgtttaaaaatgtaaaaatgaaataccttccaattagtttgtgagatgaactgcctgacatcaggaagatggaaatttactagcccaatttcaacaaaaacctctgtataattggtggatgacgttgaaaaacgagaatcataatttaataaacaaagccaccaatgcgctcttccatttggattgacacttctttgtgagaattctttttttaaccctgacagccattaaaattaagtattttttcacaatgaacttctaacttcagtaccttgctttatcatctagtgttacaatttcaaaaataatgaagtatatcctatcttaatatgtactttaaaatattatcactaattacagtggcagcaaaaaaaagtggtagcaaaaaaggacttttgcaatataatttatagtattattatctatgtcatattgcccactaacctttcaattttctatggcttctctggtaactcagctggtaaagaattctcctgcaatgcaagagaccccagttcgattcctgggttgggatgacccactggagaagggataggctacccactccagtattcttgggattccctggtggctcagctggtaaaatatgcacctgcaatgagggagacctgggcccgatccctgggttgggaagatttcctggaatagaaaatgtcatattgctctcaaacctttaaattttatatttttgtgcctattacatgaaataatacatatacaaatagcttttatgtttatattacatataataataatgataatattagttgctcagttgtgtctgactctttgtaacccctgtggactgtagcccaccaggctcttctgttcatggagttcttcagacaagaatactggagtgggtagccattcctttttccaagagattctcctgaccctaagatggaacccaggtctcctgtgtctcctgccttgaagacagattctttaccatctgagccaccagctcagcagtaaagagatctacctgcaatgtaggaaatacaggagacacagatttgatccctgggttgggaagatcccctggaata

SEQ ID NO: 32105 - DNA, 440 bp, Bovine  19866881023234
  misc_feature (1)..(1): n is a, c, g, or t
nggtttttttttggtaatagagaaatgtatgtggtcaagtttcagatatcgaattagtaactttcagttttgagtttgccaatattctgtttttatattctaatggaaaaatccgtcttgttcactatagatctgctgtttataatatttacctactatatgtggttttcatgattagatttttaaaattagctaatgtgttgtggtttcagccctgctcctttcttgctccctgatggactggttcgcttggttaataaacagataaactggcatttggtacttgcaaggtaaggatgcataaaattcacctaatgtttctctacctggattagcatttaacttccattatggttattaattttaggatccttatggcttgctctcttggttttttattgtatgtaaattccctgtgtcgcacatgattaatattgttt

SEQ ID NO: 32106 - DNA, 748 bp, Bovine  19866881028076
  misc_feature (1)..(1): n is a, c, g, or t
natcatcgtgacactgcgacagctcagtaacatcacattcctgttccatttccttgtccaaagatcgaaagtgaagagtatgaggaagccttgtccctggctcagacctatggcctggacactgacctggtgtaccagaggcagtggaggaagtcagcggtcaacattgcttcaattcagaattacttggtatgtttacatagtttgataacatgtagtgagagtcgtagttcttcccctggtggcttagatggtaaggaatctgcctgcaatgcaggagaactgggttcaatctctgggttgggaagatcccctgaagaaggtaaggttcatacttaaaggactatctcatggctgtagggcttcatattggagtacttttcactgatgacttttctttgtgaagcgttttattcaacctggaaaaattaccttgtttccaggttctgttggctctgcagctggattgttggtaccaaagatctgtgtatgaatattccgtgataaaccagccaagtacctggtcttggcctaactctttcccttcatctacctcagtcacctcagttcactgccatgagtcagggtcctgtcaagagtcaggaaccacacaggaatttgaagagggacagttttaatacagagaattattttctggtaacgagacattaagtatatgagggcaaagataactctaaggaataacctggggctgaagggaatgtttccaaggaggtagaaaactcag

SEQ ID NO: 32107 - DNA, 992 bp, Bovine  19866881047150
  misc_feature (1)..(1): n is a, c, g, or t
ngaatccttgctgggatcaggtccaggcctacctgacaccaggttctttccaactccccaacacttctgaccagtaaaagtagaatctccacaagaaaaactagcattttagatggttttaatgaaagaaaattctttaaatccaaaaaatggaaaacaacagtaaaaattcccctcctactcctcccaccaaaggaatcctccatcaattactctgcagcagcaaaatattatccctccctttccttcctgttccactacattttttcccctctaacaaatattccttttccccccaaataaggtcacttggaaaaaaaaattcctgacagatgtcaacatcatagggaaataataaaattattatataaggaaaactaccccagatctcattttatattcacctacacatttttcagatttcagtcaagatacaataaagtgcgtaagttggaaggataaggtgaaaagtttgactacatagttttacccatttagaattgactgggaacttttttttttttttaatctggaccattttcggtcactgccacatatttctaccttaaaaagaaaagtgaagccctgcaccttatttacagcaagtctggatctctgtcgtttaatgctggcagtgggccaggagttggggagcgtggggggtacagagtcacgtgcaaagaggctgcaggtcagacataagaggacttctactcaccggccccaattcatacagcacatgaagagaaagggtgaaaacagactttcaatgcaacaagtactatttcagtgtaaaacaagttgcccagaattcttcccatattgttagtgtgaatgccaactggaacaaccctttcagaaagccacctgaagatgaccctgaaaagtgtacataaaatttctttgcttcaataatccagcttctaggaatccaagagaaggaaaacagtccagaagacagaacaaagatgttcacggttaacacaggacaa

SEQ ID NO: 32108 - DNA, 1864 bp, Bovine  19866881069447
  misc_feature (1)..(1): n is a, c, g, or t
ngaccattagcagttcacccttcctattatgagagtctgccacagcatctgacacgaggtgtgtactaagtattcacatctttattatatgataaaagtgggaagaaaccaaactatattctgttttcctcaaagtcaccctagccactgagatagtaataactaatacagacaaaaaaggacaactataacgtatgcacagaaaacaacggccattaaaatggacatacaattagtaagaaaataaagaatggacatgtttgaaggtggagctgcaaaacagaaggaagcaggttcttcaaggattcttttgtgtgagatgcgaaaatgctgtctccaaaccagaagtgctaactcagaaaactcatagatagtttgagatattttgaacgagccatctaaagactgctgtgtatatttataaacaacagattgtggagaagattctattatttatttatcaaaagcatatatttgtcctctaggatacgcttcaaatagcatgtgctagctggatgcttaaaaaaaaagacaagacaaagccctagcaaaatgtaattgatgatgtaaggcatgccttatcttgtcaacttgtatctgcataataaccctcttctaagaaaccataaacaatctcactcaggattaccaaatgcccaaagaaaagcccactggactcggcaataggaagcccaggctcaactcctggctctgcgaccttgaacaatgctttaaggctctgtgcttctcacattcctcttccaaaagtaaggagattggatgatattatctctttagtcactttcaaattggacattaaacgaacctaagaaattatgaacctccaggagaagagaggggaagagaaaaaaaaaatttgtacatttctcttaactgaattctcccataggctgtccctactatctttctttgatctccattttccctgcctcactctaaaaagaatttgagtgtcttctcataggaaaaaagcccaggataatataaagtactattagagtactgaagttattttgctgctttaagatttaagaataatgatgaaaaatagcaacggccactgccataatcaagaccatctttgctattttaaggtacttctcatgagtgcatgctaagtcacttcagtcatgtctgactctttgtgaccccatggactatagcccatcaggctcctctgtccatgtgattctccaggcaagaatactagagtgggttgccatgccctcctccaggggatcttcctgacccagggatcgaacccgcatttcctacggctcctgcattgcaggcagattctttaccactgattttaaggtacttatcaggagagattaataactgtaaaatgtaggcacaatctacccttgtttcaaaggctggaaacctagacagaactgcataccaatgcttctgggaaaattcaatcaggcagtgtgggcagggtgcgtggtgctgaagatgtgatgcctttggtaggtagcaggaaatcacagctgtgagcattaccatctatggaaacttgggccaattacttaataagctttaagttctttggaaaaggaaatggcaacccactccagccttcttgcctggagaatcccatggacagaggaggctggtgggctacagtccatggggttgcacagagtcagacacaactgagtgacaaacacttttaagttattcagctataacatggggataacattttataccagagggttacctttaaggattaaaagatgttttcaaaataaagtttatagagcatctaacaccattctaggcccataagaagcactccacaaatcggggtgttaaaaacaaaacatacctctaa

SEQ ID NO: 32109 - DNA, 3184 bp, Bovine  19866881098109
  misc_feature (1)..(1): n is a, c, g, or t
nttgggaagatcccctggaataggaaatggcaacccactccagtattcttgcctagagaatcccatagacagaggagtctggtaggctacagtccatggggtcacaaagagtcaaatgcaactgagcacacacacacatttaagatatagtatagtagtacataagtatatataagtttaataacacatatatagtatatagtaatacatatatgtatatttttaaatatacacatggaaaaaaagttaggattttcatcccatttgaatgtgcagtagggcagggccaagtgtgggtctattgaaggggtgagcctttaagcaaaactggcacctaaatcatgcctgcaactaaatcatggatggataaacacaaatttctttattcaatcttaggattccttcagaattagatagggatgagcctaaagcaaatcagagggtgttgccctttctatatagcaggatcctatagaaactcattttcctgcaagacgagagtgggtggaagcagatgtgggttccaggggagtgaacctcactcttcagtgactcatctgagggcttctgagtgtacaagccattcctgagcaagggactcattagggcagagatgcctctgcatgactttatgggcctcttcttatcctctttcgaggtatagtgacctgcccttcaagacccagtccaaagatcccttccacaacgctgtctcgaagccctggcttgcaggtgggttccgcttcccttcaactacctcgtccacagcacatgtcactgccgctctaagggaggagagtcttaggtgtcaagcgagctatcttatcactcaaggtaagacactcaatccaagcccagcatcacatgtcactgccgctctaagggaggagagtcttaggtgtcaagcgagctatcttatcactcaaggtaagacactcgatccaagcccagcatcacaatagaagacttgagttagctgttttgggaaccaatatagcccatggttattacagcccacatcaatattgttgctgttgttgttcagtcaacaagcgggttgcaactcttcacgaccctatggattacagtacacaaagcttctctgtccctcctcatctcccggagtttgcccaagttcatgtccagtgaatcaatgatgccatcctgccttctcatcctctgttgccccccctcttcttccgccctcaatttttccaagcatcagggtcttttccaatgagtcagctgttcgcatcagtggccaaagtataggagtttcagcttcagcatcagtcgttccaaagaatattcagggttgatttccctaaagattgactggtttgatctccttgctttccaagggactcggttatgaaaatgattagcaactagagtttaaacgttttcctttcatgcaacagtgaagtcatgcctttcttatctccctcacagtgtacttgtgggaaactgactttcagatggaatgtaggacttggaattaggcattctttcaggaatcattaattgtccatctaacctgtattcagcattcttctgtatcttttacataaataagacagtctttgttttctaggcgcaaacagcattacaagatcatttgtctgctactttttttattagaatgacgatgtccgcatagtaacacctttttgctgttgtattcattctttcacccagtgtttttatggtctctcccagcttactaccattaaagaatcagaaaatgtcctttatggtttcatcaaaaacattgcttaaaaactagcaaacagttcaggactaaggacaaaactctctggtgcctggaaacaaaaattcaggtcccatttagctcaaacttttaataaatctcttgtgtgtgctcagtgctgtcccgtctaactctttgtgaccccatagaccctacccaccaggctcctctgtccatgggatttccaggcaagaatactgaaatgggttgcaatttcctcctccaggggatcttcctgacctagggagcaaacccacatttcctatgtctcctacattggcaggtagattctttactgctgagtcatctgggaagcccaaccttgtattaaaaactttgcaaggcagtgggattcagagattaatcaggtacagccacaatgctctaagaactccccaaatatggctgtgacaggggcacagcacacacgcatagtttaacatgtcaatgaccattggccatgtctagatcatatttctgccttggtccccaagatcttcagagaagtatctccatgtccaagttgcacacacagagaaggctaagacttgtttggaacctaggatggcaaaatatttcctagatcatgattgccttttgccttgggctacatctgtccagattgaatttactccaacaacgggatagctattaaagaggcactccttcagcactgtaatctaatgagatggcttcggataccattaaaagttaaatcagtcgataaatgaaatattaaaatcaccagagaatagaccctatgcacaaaatattaataccacaagcttgaaatcaaatactgaacatgaatttagccaaagccattaaaacaagactctggactctagactgaaatttggagctgtgcctgaggagtttttttcaaaatctgagttttccctcttgtaagagccttggtgtgagggagctacatgttgagggctctctcaggaccttaattgtgggaaaacccctgggaactcatagcacttaggaaatgatgcatcaagtcacagggcaagtgctttatctggtagactgtgctttatcactagactgtgatgtccttaaggataggaaatgggtctcacccagctctgtatacccagctctgagccagcatctgtcacagcataggcgcttaccacatgttatgttcaatctccttttccacaatattctctctctctctcactctctctctccccctgcctccctctctttctctctctgtctcaacatctctttctttttctctccctcccttcctcctttctctctctgggttccacaagagttccctattaaagttgtatgcatctttcatggcctgcttgcttcatcctggctcttccgagaatcatctctggtccctatgtcagaaccactctctcctctgcagtgatccctttg

SEQ ID NO: 32110 - DNA, 4440 bp, Bovine  19866881106140
  misc_feature (1)..(1): n is a, c, g, or t
nagctgggtgtgttcattgctaatggggtgtccctgattatagaatttctcagcagacagagctaggaaatagatatatgtataatagtttatgtatgctgacaaaactctccttgaccaaactcttgttgggttcctgtgagccctcttcttgactagatcttgactttatacccaacctgaactttggtctacccagaacagtcttagcaatgaaagcttgcaaggtttcttgatatctaatcacctttgatatctggtcaagttcctcatcccctccccattttgattcctaagttcttgaccagcctttagcaagaatcctattgagtcagtctagcaggaatcctctattcttgatatatccttttagtaatttcccatccactgacccccttactctattggctatatgtccccagctgtatttgctgtgttaagagttgagcccaatccatctcctctattgaactacccctattgcaatagtcctgataaagttctccctaccattttttaactagctttagaataatttttattctgtaactgcatacacacacctataattatttccattactagtggtatacatactaacatatcaaaacaaatatgagttcttattgatatctctaaatctaatccagcaactcagggttcattctaaccttcatccctcttgcttatcagtattttctttctctaacagtgagaaacttcactcttattagctacagtttatgttgtcattgttttagaaactcagtcacttccaactcttttgtgaccccatggaccatagaccacaaggctcctccatccatggaattctccaggcaagaatactgcagtgggttcccatttccttctctgggggattttcctgacccaaggattgaacccacatctcctgcattggcaggcaaatttttaccactgagccaccagggaaaccatatctgttaaaccctagcagtcatatcatttcagaattgctagcctatattcagtgagaaacaaacttaccaatcagagtacaatgttggtcagtagttcttttccatctttatccttaaaacatccatccaaagtttcttaggtccttattccccaccacctccaccaaggttgtgtcacatgattgtatgcagttagattcacattcatcacaggttgtatttgatcctaggatcccctgccactctttattggtgaaggaagttctctactattcctaaattgcttaagtttatatcatgaatatgtgctaaattttcccaaatgcttttttatgcctctactgagatgaccatatagagttcatcttccttagcagctcagaggatgaggtggctggatggcatcaccgactcaatgggcatgagtttgagtaaactccaggagttggtgatggacagggaggcctggcgtgctgcagtccatggggtcacaaagaatcggacacgactaagcgactgaactgaactgaactgattgagatggtcatataaagttcatcttctttagcctcttaataagtgaattacattcttcaaaactccaaatgtgaaaccagtgttgaactcttgagatgagtcccacttgggcatgatgtatcaccttttatgtactgaagactttgatttaccagtattttcctaaggattgttgccttatattcataagacttagggtgatgttaaccttctaaagtgagtttagacaataaactcactggagaggatgtggcgaaaagggaaccctcctacattgttggtgggaatgtgaattggcacagctactatggcgaacactatggaggttccttaaaaacctagcaatagagctaccgtatgaccctgcaatcccactcctgggcatacatccaaagaaaaacatgatccaaaaggatacatgcactccaatattcactgcagcactgtttacaataaccagacatggaagcaacctaaatgtccattgacagaggagtggataaagaaaattggtccatatatacaaagcaatattactcaaccattagaaagaatgaaacaataccatttgcatcaacatggatggacctagagattgtcctactgagtgaagtaagtcagacagagaaggagaaatactgtatgacatcccttctacatgcaattaaaaaagaaatgatactaatgaacttacttacaaaacggaaagagactcacagacttagagaacaaaattatggctgccggtggggtgggacaattagggagttcgggatggacgtgtgcacactgctctatttgaaatggaataaacaacaaggatctgccgtagagtacatggaactctgctcagtggtatgtggcacgcctggataggagaggagtttgggggagaaaggacacgtgtatatgtactgagtccctttgctattcacctgaatctatcacaacattgttaactgactataccccaatacaaaattacaaaattaaaaaataaataaagtgagtttataaatgttcctgtttctatttactggaagaatttgtgtagaattgatattacttcttccttaaatgtttgatgtcattcaccagtgaaaccatctgggccttcagaatattaatcatagttatttaaaattccctgtcagatatgtcatatctgtgtcgggttctgatgattgctgtcttgggttttgtttttttttttctcagagggagggggaagtgttgcttttccttgccttttcaaacacctcgtgattttttgttgagcacagcatgaatgtgtaggacaggagaggctgaggtaaatagtttttgtggacatgcctttcctttggctgggtctccagtgtcaggggttgggctgggctgagacttgttgctgtagttaccctcagcataccatagtcttcaacattcctgtagagacagcttgtgtctagggtttaccagggcagcgtctgtttgattccaagtttggtcttccctttgtgactcagaaagggtctccttccatactcttgggctctcctgtccctctctctctcctctatttgtcactgaaatctccttagggcgggtggtgaggatgggtgagggggaaggtgccttctctggaatcccgattaggaattgacctcagattcctaatcagaactgaaccttgtacctcatccctggcttcctgcagtgtggtcctccaggtgttcctgcctcctcccttctgccactgtgggcctaggatctgatccctcccttcccccaggaggaggagtggtcttcccctctcccttccttcagttgatgccctgagtatttaatccccaatgaccatggacaggagagcagcccttctccagggccccaggttagaattattgttctgtagaggaagtggagggaggctggggcaggctttctcatctcatccctcccacgtggctcctttttccctgactcagatcttctatgggatagatgaggttcatagggcttatggaaaaggtctgcaagaggacacagacctctcttttcagcagctgcagagacctctctccgtcccagcagtccactcccagccttcacccacctgtcagtttttcctcatggtgagccacctgtggcccaggtgagcacagcgtcacctcttctctctctgtaggcaccgtctcacattcgattccctgcaagttgttccctctgtgacctcagctccctggtggtctcaaaaacagtcatgaacttgaaataggcccactatttttcatcacaggggtggttactaacactccttccagccctctacatcctggtgtagaggctgaattcttatctttttatgggtaatttttattttagttcttaaggcttcatttgaatgagctaaagacctatcttaataggaatgtcttattccagttcacataaatcttaaaactcttctaaaaacttgaaaaactatcattacaaatctaactcagagaaatctcttttaaccacaatatgcacctaactatagaatttgaaaggattatcacttagacccaacaaatgtaaactcgaacagtcctgtttttctgtttggtttttttttaagactccagaggcaattaaaatgagaataatttgaaattggagaaagcttcctttttgggataacagaaagtggctgctgctgtgtggaaatggagaaagcattctattttcattttatttattttattttttgccactttaatactgacagtggttttatttttagttcagttttaattagtggtgcagaagaagagtcggagtcattccaaggcaggaaaaaggagttattctaggcaactcaatactaacgataacctagaaagtactgcaaggagatggatttaactaactctacactaggggtgttaggaaaggaagccaaggaggttactcg

SEQ ID NO: 32111 - DNA, 747 bp, Bovine  19866881109404
  misc_feature (1)..(1): n is a, c, g, or t
naggaaattcaagtattttcagataaaaatttcattttgacaaacccaagctgcattttaatagcattaaaaccaggaaggctaaagggaaataagatttctaaagagatgaactcacaagtcacaatttataaactacaataaccaccacccattatgtcttgtaactcacagacaagagctgataatataaccttcatagataaatgcagtctattcttaccaattttagtgacactttgtgagccttacctgcatctcattgtaccatatggtacagccaccatcttccttgagtcttgtgttataacacccttttccacggctgctacatacatgataccaaacctatattaaagaaggaaaaacagattaacatgtatggtgactgacatactagatatctttgttctcaactagttttttttttttttttttttaaattttctgtcctcaaagcgtaagaaaaatagactgcagctatggtatgtgatcaatcactaccaccatcagtagctcactaactagggcttctgatagagttctttttgagaggaatccaaaagattttctaaaacagacttcaattagatgtcaatagaaaggaattctcagattaaaaaaaataacaaaaaatgtaaagtattagagaatgctatctcaagatcagtatcaaaaataaagttcaaaggttttccataagaataaaatatagcaaaaagcaaaatgcacaatatctagtttggg

SEQ ID NO: 32112 - DNA, 1760 bp, Bovine  19866881191698
  misc_feature (1)..(1): n is a, c, g, or t
nttttcatttggcttttcttgaccaatttctgaatttcattctcaatgtatttttgtaagcctcgtttcacaaatcaaaaaggagtctggctgtaggattttagattctgcgacataatctgaacacgcctgttgtctgcaggtagaattgcttgaaccatcatcgaaaggcttgaccatcagtagaaaagtctcacaaagtattgtgattggccattatcttctgggacaccaaggataccgagacacttggtttattctcttactcatttcttcattcatttactcatttatcaagagccttcttgacactcacggtgtttcattgggattggtctttgtcattggtttacactgtggcttccctgtctttttttttttgcccagtttttattacagtgtcttgaccatgtgactgcctattcctttggttctgtgacataacatccctactttattttctccagaacagctaatttgctccaataagaattccatttgttgtttttatgggacctcctccccctcagattttctgctttgaaatcgtgcatgcatgctaagttgctttagtcatgtctgactctgtggccctatggaatgtagccggccaggctcctctgtccatgggattctccaggcaagaatactggagtgggttgccatgccctcctccagaggctcttcccaatccagggatcaaacccacatctctaacacctcctgcattggtaggtgggtactttaccactagtgccacctgggaaaccctgcaaatcatgcttatttgatttatcatctatcaatttcaacctggatcaccttcctcctaacctcctggttctctttttcttgcagtcctcccccttccccaattttccagacgtctcagttttcttgtgttgctggtcatcactgtagtcagtgagtcagggctcactgctggtgagataaaattctcaggttgacagttataccagtaaacaatgcttcaggacattttccagagtttgcagagatattatcccactaacatgtctacacatacacagtttctctctcccccaccgcctctctctctctcgtttttctcttactccctcttacagaaaacatcatgtagaaaatgatggactggaagaacaaaagaaattatttttgcattgatcaagcacttcctgatctatagcagaaaggaaaaaaaaaaaaaaaaaaccaccaaaaagccagattcagaaagataggagaaatagccttccagttgagagtttgagcagttcaggagcttagtggtgctcttactggaggagggtgttattgtgagaatagagtcatcccctaccccccactctagcattgccgccacatatgcctgctgttcccagcatccccttttcttggcagtatcccaagggccacattcacatgtggaccgtctcccagtacatttagtctctcctaagagtcaatgtctttggaagccctactgaggaaggagagaactaactctgatctgattcccagtggaaacacaccttgtgagggccctgtgctattttaaaatgatgaattaactttaatgaatatttcctcactagatttctatccctattaagtattttgcaagatttttattacttgctaagaatctaagttatttcctctcatttttcttgcaaaggatgagttcaatatttcagctgttctcatttattgttaattctcttttcctactaatttattagaaggcttatttttct

SEQ ID NO: 32113 - DNA, 1369 bp, Bovine  19866881212452
  misc_feature (1)..(1): n is a, c, g, or t
ngagtggcagatgtagcggatggctgctacttgcatcaccccacttcctcatcatgggggttggtggcatctgctggattgcaggcaatgagtccgttgggagccctcattcacatttggggcttccctggtagctcagctggtaaagaatctgcctgcaatgcaggagaccccagttcgattactgggtcaggatgatgccctggagaagggataggctacccattccagtattcatgggcttccttatggccctccataatccatcctacatttctacccttctattataagatacataggagacccaagaaacacctatgggaggaataaaagataggaatgacaccaccccttcccacttaacatgcctgcattggccacactaaagggcttactcttgtcctccctgcctcccacacacacacacaaattaccacttttgcccttttttttttgtataggtgatccctccatctgatatgctgtattccatgaaatttcaccactgaaattatatttgtacttcatagtttggttataaatccctgtcttccaggaaatctccccaaatctcttcatctataaagagtcccttttcttctaggttaattagttcatcataacttctaaaataacaaacatgaactatgcccagtattatcattaatctgacagaattttctgaatgataaattaggaactaagggatacagatctgaataaggtaaagtgctattctccaggagtgcaaaatctagtagacagagtttttaaatagtcataatattgtaaaataagaacaaaagtatacataatatttagaaagcagcagaaaagaaaaactttggagaaatgcaagcatcaggaaaagactttgagagaaagtagagcaggattgaggaaatgaaaagaagacattccatacttcatactaaccattggcaaagtcttgaagatctgaatctccatgccaagtttgcaattccatttggcaagcaagttgtaactgatgctagaggtcaagagaaagagatcagagcagtgacagccttgggctccacctgaaggctggaacttcttatggaggtggcagaaggtcatcgttacatttcaagcaggaacactgatcatttcttgtccatctttgtaacctagggtcaacaagcacagtgcctggaaataataataatcaaacagacatttattgagtgcttactgtatgcctgtcactgttccaggcatttcgtacgcatcagttagtaggcactgaataaaagtttgtgccattaaattaaatggaattgcagctccatcccaaccagactgagtgaaaatagaaactgtcgttagatctttagcagagtga

SEQ ID NO: 32114 - DNA, 1160 bp, Bovine  19866881257184
  misc_feature (1)..(1): n is a, c, g, or t
naggagcatgccttcctattagaaaggctgtggcctaggtgagggcagtgatcgtggtcccctcagggcacgtggagctggaggggagtctttgcatgtggttcaggtcctgctgtttatatagaatgatgatcttgggcaagtgttgtcacacttcaggtcttcagtttcttcatctgtagactctgaagaatgggtagaaagttctttttattaacacagatcagtgcttcagaggcccgtcttgtgcagaaccatggagctagttgacatagagttgtgagaggaagatgccaggtccttcatctacttcttggggcttccctggtggctcagatggtgaagagtctgcatccagtttgggagacccaagtttgatccctggatcgggaggaatcccctagacaaggaaatggcaacccattccagtattcttggctggaaaatcccatctggcctcaaagagttggacacgactgagcaacttcactttcactttcatcttctactcattgttccatctccatcacagaggaagagatgtggtatatgcaggtttttgcttgatgtgcttttgcttgcgttgcttctccttctcaagcatttgtattttaatctcttacatttcattatgacaatctggaatagatttatatcccattaaagtgatcttgtctgttcactcatccagcagtatccctcacttccagaaattgttctccttgtttttgatggccagtatgcctagttgttttatacccgagcacttaaattctgtctgcagaggccaggtagataataatgttgaatcaagtctgttgtaaattctgttcttttttggtatagtcattgttacttttcacttctgcagctttcagccttaatcttggggccataatagaaaatatgggggttttggctggctggaaagctcatgacccttctaagaggataactactacctaattccagccgattatgtcctttgggccctgtgttgccagcttttctaaatgtgcaggagaaatatcgttatgggctgccgttttctggtctgttttattttttgtggggagactaccttagagcctgttcttaataaatggttgaatgggaaataggtcttcagttagtatttcttcagttcttccagctctgtt

SEQ ID NO: 32115 - DNA, 973 bp, Bovine  19866881273537
  misc_feature (1)..(1): n is a, c, g, or t
ngcttcccgaattttaatttctaaccagggattgaacccagaccacggcaatgaaagcactgagttctaaccactggaccaccaggggtgtccccgaagcttattttaaaatggctcaatcaaaaaataattttttaaaaagtgtacatatgcatacagaaaatgcaatcatggtgaaatgttaattggtgaactcaggtaaaaggtatatttggtatttcattgtgtagtcatttcagcttttcagtaactataaaatttgtcaaaatgttaaaggttgaggtgaaaaaaagaaagaataggtaagtgtggaggatataagatgagaaaagttggctgactttgaagggctgtttcagtggggtgtcatcaagtgtgtttatgacagagtctgggacaggggaggcatgaagaactgtctggtaccacgaagccttttttcactgtagcttctttgaattctctgtgctttcactttgctcctccctgaagtattggaatctgctctgctatgtatgatccttccttctctggcctgaagcttcaatattggagtctcttaaaagaaaattgcttgtgcactgacagaagaagtggggggaaatattgaattgcaaattgagggctccgctgtatgataaacttcttgaaatgctgcaagtgtattttaattacgttagtgccttttaaatgtgtcctgcagctaaactcgcaatcattctgcgtagccttcccctccttcaaagtaatttcaagctataggattagttcctcttgtcaggtggcagatattgttcgcatataaccgcttattgtttatttaaggctgctattgtgtttggggtggctattgacagaaaaagtgctgctgacacgtatattctcgtctctcaaggctgctaggttgtaaaagaggctatgcaaaattcaatagatgccttgaccaacgtttccaaattaatgtcagtgtcat

SEQ ID NO: 32116 - DNA, 806 bp, Bovine  19866881296989
  misc_feature (1)..(1): n is a, c, g, or t
ntttatctgggaaaaaagaaaaaggaactattttactgattttacggtatcgcaatgagagattgttaattttaaagttaaagcttatatttccttatgttaattccagttacccttcttccctagcaacagcaggtgggagggctttgggtggtcagagtaattcctccccgacttcctgccagggagcctgagtggatcaaaaggccaagagaatgaagagacttttctccttcaaaatagctccttggccccttgaaatgaatgagcagcttctttaacagactttctcccttcctccgctccccccggccccccggctcacattccccatggttggtgaggcagaaaattcacaagaacaaagctcttaccctaaaaagatcctcttttcactctagggtcagttccacactgggggcttccagaggagtcatcttgaaattaagaaaagtaaaaaagttgcagagatgtcagggagatcacacacaccaaggtgcctggcttcagccctcccaccccgcaccacacacatgtgctccatgggaacccatagatagaactcctcaggcaggctcccatgacgcagggtgtgcaaggaatctccgaacctgggagaccaaggaatggatcatctccctgcctggtgtgagtcctgggcaacttctagggactccatcttacccttctaaaaaaaatgggccaagagcccgcaccctgcctctctcgcacagcaggatgtctggccaagaggatgtgcatttgtgatagagttctgccttctccccgccccccaggacaggggc

SEQ ID NO: 32117 - DNA, 1092 bp, Bovine  19866881302242
  misc_feature (1)..(1): n is a, c, g, or t
nataagttacagaaaacaaactaatggttaccaatgggaaaagagggggaggataaagtaggagtttgggattaaaataaatacatatttaaataaataaataataaataaaataaatacatatataaattaggtaactaacaaggatctactgtatagcacagggaactctactcgaataacctataatggaggagaatgtaaaaaaaagaatacatatattaatacatatgtatgactgaaccactttactatacatctgaaactaacaaaatatgataaatcaactatatttcaataaattatttttaaacaaacagatgccatcattaaaatcacagggaacaaaaatgttttgtgtgggaatcctcaaatatcaacaattttttcaataaccatcttggcttcttttatcaaaaaccaaccttaaacaaaggtaagtaaccacctttaaaagtggaggcaaaagcacaaaacataaaccccacagttcaataaaatgatggatgatccagggcaacaaggtaactaaatattaactataacgttaaacaagcagttaacaaagattaatcttccagtctgtatgcagtgtacacagataacacattagcttgctaattctttttttttttttttctgttattctgaacaaatgaccctctttttagaaaaaatgagtgatcttgtctgtgtgaaaaggaatggggaaacagaagtgagcatcattttctgaaggatgtccaaggtgagcggggttgatgggcattcagccagaaggaactgtggtccacaggttctttcccaacactgccaagtctatgatgatctccttaattacctgcggctgctttgcagttattttcattccaatatcagaaatcctgtaactggcctttcatctggaattttagctactagaaataaaagtatttctcttttgaaagtcatgtttgtatgctattcacatgtatccacaggaaaggaaaatcattctaaggggaggtctcactgtgggtttttctcttaactgagaaaaacaaaacatcaggcggttttctatggggtacaaatacagaagagacatgtaaa

SEQ ID NO: 32118 - DNA, 1221 bp, Bovine  19866881306034
  misc_feature (1)..(1): n is a, c, g, or t
natccgatggcagaggagcctggtaggctacagtccagggggttgcaaagtctgacatgactgaaacgaatgagcacgccaacaacttttctccatcctccaaacccagagctttgtctgctcttcttttcaccaaggatggctgggtccttatctcagtgggagggtgtgggagagactgggaaggagagagtctcaccctggctgctaattcctgcccaccccccactcattcatcctctgcccacagcctcacggtgtggacaggggagctcagagcaaacagaccccgagagcatgagacctgaggggcccacccagggttacgggacttgcaagaccaatactcagtacccatcctggctgtcagcgctcccagtgatgtctttctgctgccccgtaacagattctggtgaccacttgactccactggaacgcccagggaggaaatgccaccccctggaatgccatcaaaatagttaaaaatcctttcattggcccatggggtgagatggctggaatctggggaaaacactgcagaaggacttgttcagcaacaccgcgattcaccctggaggtcccggcccccacatcgtggctccctggggggggccttggccccgacccagtatgtcacaccttcggcctcagtgcacagggctttccacacctgtttgacacccctcactgtgatcgcaccagcctgttgccacctcccgcgtggcatagtgctctaaggtcctggagggaaggaaccacacttgttcagaactgaccaggcagagaagtgaaggctcagctctgcccaccctgggtggcaccctgcccatctgggcccgagtcaggtgcaaaccttcatacaacccataccccccacctcttgcctgggcccccccgcccccgccgccccggctggcacaacatcaaggttccattccaagcagcctcggagccctcgcatgtggcccagggtcccagcccctcattaggtggtggcagctctcacataagccctttaatgtggtgcgatggcatttttcaggcctcttttcagaaggaaaaaagttaataacgtgaaagctttattacctctcccgtcccccactgtgagacatgcccttcggtcgtgcaacgtggggctagttaaggccacagcccgggatttcctcctctctgggagtaagtgaattacacacgcggccgggccaggctgtaaagcgg

SEQ ID NO: 32119 - DNA, 1253 bp, Bovine  19866881308628
  misc_feature (1)..(1): n is a, c, g, or t
ntgagagaatcgctttggttataatgtatagccaatctttcttttaaacagttggttatttctgtttctgcagaagcgaacttaataaaatcaaagtagggaaaagtacttcttcactatatgaaatatatatatatataaagaaaacacactccaaagaaatttgagttttcttttttttcctcacagatttacactccctggtgagatggacattgacaatatctcctatgaggagctttccccacctgaagaagaacctgctgagaagaaaaaggagaaggagctcaaaaagagacgagaactacttaaattagtgaacttttcaaagtaaatgatatattactgttcatttggtaatttctttaaaacagtgatctgagtgtgttccttactagtgataactgctctgcattatttctgcagctcaagtcaaatgcatttagtattgtgcccttgtgcttttgtgtgttgtcccatgagtttggggcttaatggaatattgatcatttttattctattttagatcatagagaaatgtgcttccaggtaaatataagtgacctaatatagtttttcaaaacaggttaacgctggaacaaaaggaactttgccgttgtagactgaaattattaacctacttagatcggcttgcaacatatgaggtaaagggaatggttttaatcaaagcaattatgttcattcgatctgtcattacacatgctgtggctgcctatcctgtgggatattcctggtctttagaactatttatgtgggaaaaatttgcacagaagcacattctcttgtatatcatttttgctaaaaattagggatttgtgagaggccagaagttgctttgttagtctagggagtagaaatgtgtgtgttatttcagcatttgtgtttcctagatttacaatccttttcatttatttttattttacatttaaacttttggttatggtagatagctgtctatagtagcaaattcagtatccactggggtttaataatcctaatatgaatattctgacctgctttattttaatgatttattaatgtcttgaatttagttggctaaacttcgatcctaatgacagccaaaattagacacttgaacttagagcaaacttcaaaattgtttcttcagggcagcaaacacaaatgtcccatgttggacatttcagtagtgccctgtcctgtcagatttgttagaggtgtgagaagcatttcacaaaatatacatagtttag

SEQ ID NO: 32120 - DNA, 1111 bp, Bovine  19866881414504
  misc_feature (1)..(1): n is a, c, g, or t
nccagccagccctttggcactcagctcaggttctccccgccaagaggatttccttgagtccatcccatgctgggctgccagggctctgttcatacctctgtgatgataaaaagtacccccagtgtaaaggctccctctgcccacagcctgagaacatgatgcgcctgggcagagatcctcttgttaatcctgctatccccacacacgtctgagtgcctggtattgagcagatgaacagtaaacagtgactggccaggtggataaatgagagagtcagtaaacaaagttcatggatgaggaaactgagaaactctcgctcagactttctcataaagtgttaggatgaacagaaaggaaaaaattttaactttcctttgctactacacaaaattaagacatctccctagttgtgtttctcgttatttagactctggatgacaaaattagcattctgtaaggctacctgtaatatgctgatacggccggattctcaggtaagaggggggagaaaaggtctttgcacggttgagttccccacatcactgaagcatcagtgacagctaacttgacaataaactccaagctcagaacccccacagtccaattatttcatctatcttcaagccaattgatgttacacatgcagaagaatgaacagcaaaactgtattaatgaggttttctacaaaacagagaaataaatgcaatctgcagcaaaacatactaacaaggggctcagtggagtatggaattaagagttcaccaaataactaaaaagacagagtttatacttagggtagccagggagactatggaggaaaaggttaccctctgagttgaatgggcttctcaggtgctgctagtggtaaagaactccccttgccaatgcaggagacacaaaagacttgggttccatccctgggttgggaagatcccctggaggaggacatggccacccactccagtattcttgcttggagaatcccatggacagaggagcctagagggctataatccataggctcacaaagagtcagagacaactgaagtgacttagcatggatgacttggaaccccagatcttatgtactacttagatgttcagaaattca

SEQ ID NO: 32121 - DNA, 824 bp, Bovine  19866881476787
  misc_feature (1)..(1): n is a, c, g, or t
ntgtacctccgtcgtgtccctggtcacgaatcatcagtgtgtcttcctttgtagtgcgattgtgctctgatcggatcggcctcgtcaaggagtgtatttgccagtcccccacgtgctacaagcagtccaccaagctgctgggccttgctgagctgctgagggtagcaggtaagttttgaaagcttaactgctgtgcaccatcctaggaaaacactggaatatgtgctactaggtgtgagaggagctgcttttcagcaaggttttgtcttttccagcaagattggcatgttattaagatgtgttcctatgttgagctgcttggacctctgttttctaaatgaaggcagacttttttggggttccatggtcatacagggtcagaaagagaagtcagagttaccatttataaccagaaaacttaaaaagtaggacaaggcagctcaactagttcaccttcagtttccacatttggtgtaatattttctttttaatataaatttatttattttaattggaagttaattactttacaatattatattggttttgccatacatcaacatgaatccgccatggatatacacgtgttccccatcctgaacccccctcccacctccctccccgtaccatccctctgggtcatcccaatgtaccagccccaagcatcctgtatcctgcatcgaacctggactggcaattcatttcatatatgatattatacgtgtttcaatgccattctcccaaatcaacatttttgaacctgaataattacttagaacaatttgtgcatttactgttggccaggttttctcacgcattgtctc

SEQ ID NO: 32122 - DNA, 1004 bp, Bovine  19866881561187
  misc_feature (1)..(1): n is a, c, g, or t
ntcctttgacctctccagtctcggtttcctcatctgcaaagtggctgttctaacaccgacttcagtggtttgtgaggcttgaatgacagcacgtgcaaagatctggggctcagtaagtggtaagctgtcaccatctctgtctcatagatgacaaggaggaggccttgaaagaaggagtctggagagcgaggcttaagtcccggttcagccacatctgctccctgggcctcgctctcctcatctctaggatgggggaaggattcccgccccattggcctacagggcagcttggagggcctgggagttaattggaggtcttaactctggctgtgcaccacgatcacctgaggcgctttaaaaatgacccaatccagtgatccacctctgatcaacctcatcagggtttgggggacaggaatccagccctgcgtgttgctcaaatgtccccagtgagtctaaggcactgccaggttgtgagtcactgagataaagatgtggtcttttccaaaccgtcgaggccttgcacatgcggggttcaggcaggaggactcccctccaggtactgctcctgctcgtggggtggggggagggtggatgggaggtttcctcggggtcaccattcctcccttcatggggttgggagccatcagcctctttgattccctttcaacacttcccaggacttctgtcccctctgaagagggaagcagggagctggcagtaaccggggcttgctgactttaacctttaaaaaaaacaagctttattgtgaagaccaaaaggtcttataaaccttaatgagcggcatatgtgaaacacatacgtgaattgcttgtttgaaaaatatttcccagctagccttcaatagcagagccttattattctaaacgggagcttgtcttaccagaggactgaacaaaaccccagttggagataattatcttagcagaattccccgtgggtccccggagaggggccgggggggggaagccgctcgaacacat

SEQ ID NO: 32123 - DNA, 1489 bp, Bovine  19866881683448
  misc_feature (1)..(1): n is a, c, g, or t
ntcccacaaccaggggtggcttggagttagactggctctgatctgggcctttatcttcgttctgcctctgacccactgtgatctcttaggccagttcgctgtcttcactgaatctgcgtctcatgaggtgtaaaaggcatcagacgcacacccatttctctgagcagtgacaattagctgagaccatgtctgtgggggctttctaggtggcgctagtggtaaagaacccgcctgccaatgcaggagatgtaagagatgcgggttcaatcctgggttgggatgatcccctggagggagggcatggccacccactccagaattcttgcctggagaatcccatggacagaagagcctggcaagctacgatccatagggtcgcacagagtcggacacaactgaagcgacatagcatgggcacctgtctgtgaagtcggtatgttgtccatggtgactttgtgacaggggttttgctgcatgtaggttattactctgtgactgcaaaaaccactgtctggcaccctggaggttttcatgccaggtccctgtatttgaagcaaattcctcatgggggtgcgaagagcttctttctaaagagagaatataagtgcagcctcctgggggcggggtatgagcctctactcacactgatagcccacctccctgagaggctggccccatcaggtccccagggtgcgggggatgggggagaggtcatgaacctgcacagcagtgtagagggaaattgactaatcttatccatcatttaattctcatactctccatagccatgatgactacctttctaacttctaaaataaacttaccttccccaaattaggggcttccctggtggctcagatagtaaagaatctgcctgcaatgcagaagacccgagtttgatccctgggtcgggaagatcccctggagaaggaaatggctacccactcgagtattcttgactgggaaatctcacagacagaggagcctggcaggctacagtccatagtgccgcagatggactgccaaggctcagagatgttaagtgatatatccgaggtcactgggccagtagagagtggccggggtgaaaaactctatctaagcatgaatctttccgaagccgcccagagcagaggtgctggaggcgctgttcgcccgcagtctgatgttgctcaggcctggctctgagccaggcctctgaagtttactgaaatgttctgagagttgttgggggaaatggagctttgaacttgcctaatataacacgggctggttctcaggatcataaacatgtttctgaacctaattaaagagtctcgtgaaaagagggagagcagagctgagacatgacggtccgtctaaaacctccccgtgggccagaacgggagcttggcttttcccagactcggggagaaccagccctctctgggggcagagagttaagaggctttagaaagaagaaaaggctcttttacagtccggctgggga

SEQ ID NO: 32124 - DNA, 1315 bp, Bovine  19866881726513
  misc_feature (1)..(1): n is a, c, g, or t
ngtggaatgaaaattctaggagggtctcctggttccttccctagaaactcccgccccacatttcctaagggagttttgtgcctgagagtcccttctcttttgtttttggatgacaggggggtgggcaaaatcctggtaccaaagaaagcagctggccaaaccctgattcctactgattaagactgattaaggaggaattcagcttgagttagtggttcccaggcttgtcagatgataaaaccctcttgatcagaactttcctgtgaagaacccgacaaatctttaaaagtaagagtcccttccccaacttttatcatggagtaagaccccaagggaaaaaagttgaattgagctagaaatgcaattcacaacgcattcatcttgtacttgagagatcctgaaggaatcaacactgataaaactgaaatgtaaaaagcccagcggatgtgagaaaaggcttcaaaagcactgcaaattttccacctttaattttaaatattattattttacaaacacttcatagcacttactgcaagccagacatgatgcttaacaaatatttgctcatttaattttcataaaatccaacagaagcccagtgagggtaagtcacttgcccagggtcgcatagaagtggtggaaccagatctccaaccttggctgtctggctcccgagtgttcgatttaaacttctaagctctacgtgtttataaaaatctcttttcacttggccacagggcaaaccccctcttcctaatcattgtaaatgatagaacagtttcgtcctggtgatctcaaatacttcctctgtgggctccaattagcggtgctgttttttatacggggcccgatctgcctttctcttttgatggagaaacatgcttattgttatggcaatcccaaatgccccatgacagcttttaagtacagatttgaatccctttgtttttcaccccaaatgttgaaacaaaccttaagagctctgctgagtcctgacagttttctgtggttctcagatatttcagactggtttgggagcaaaacacatgatattctgcttctttctcttgcatagtttatttttaaaagcatgcatctggctgctttttcatttcccagaaggaggagggaaattgctccccagaagacgagtattggatgggaacttctccccaaggctggaggtagctccatccgggtctagttccttattgggtgctgccccttgtctgatcttgtcctttagccctcaagttcagagcttccaggctcttccaggaatcctctgagctgctgggctccctgcacatggaca

SEQ ID NO: 32125 - DNA, 959 bp, Bovine  19866881749959
  misc_feature (1)..(1): n is a, c, g, or t
nagaaccagcaagccaggaatattcctctccattccaagtcgaataagcgacaatgcacagtcaacctaaaagggaaaggagacagtaagtctcttgagttttatgtcttctttcgcatattttctaaagtaaaagctccagtatagaatctaactcttacagtcattttatataaaatcacattatcaataatgttcttatttagtacaaaaacattagacttctttacaaaatataccagcaccaaactgcctcaaaagaattaaataatctgcaagaaatactgaaataaaaataaaagacaatcatcttcaattcatagagcattacagttttcagagctgttttacatgtatttgcctacttagttctcaaaacattaataagcttggggtgtggtgtggggaccatagatattaacagtaagtgataatgggcttcccctggtggggtcagtggtaaagaatctgcctgcaggagatgcaagtttgaccactgggtggagaagtctccctggagaaggaaatgacaatgcactccagtattcttgcctgggaaatgccatgtacagaggagcctggcaggctacagtccatagagtcacaagagtcagacataacttagtgattaaaccaccaccagttcgtgataatgtgaaattaatctgtattcattagaccattctgcccccaaaagaacgttttgcttccatattcctgttcagtacctcttctttcacaatgccacccatatatgacattcaataaatacttgatgaatgactaactctatacaactatttagaccttcttagagcaaaacaaagaacaattttcctatagatgctcaacatacagcaattccactcctatcacctaatccgatttataaaatgacatatgctcattgacagcaaagtcatctaatgctgccttaacccacagtgccttatactgct

SEQ ID NO: 32126 - DNA, 1074 bp, Bovine  19866881842369
  misc_feature (1)..(1): n is a, c, g, or t
nactttccttttcctttactgcgtacagttaatgtggcagcatgaatgagataataatgctttgagaactaatgttttattttgttggcttctgaatgtgtgaatttatgactttaatgctgcattaatggcttctttccatttcatataatgtgaggtaatgatcgtttgcttatcatctaactcatctttatgggcataactctcatctgccaaatgatgtttcctgtgtatgcctggagagaaggagccagattgttgttaccgcatttctgaaactcattgtagagtctgcagactgaaataggagctatttggttccacttcaatattttttcagttattgtttgataaaatatatgcagtttgaaggatgttttaaatgtggattgcaacttgttttggctgtgtttgccaggccataaatagtaatttcatcttctctgtcttgaataaagacttaaaaatagcacatggaattagacatttttagagctttcctatgttaatcaggagatttttttcatgtttctgagcttgagataccataacccagagcttcctaatgctgagtagcagcttgcctagatgtatgtgggctgaggcccccaattgtccatcagttgtccaccaggccatcaattgtccagtggcctggtggccctctgacagcacaaacccaggctggttgcctccagttttcagcagcctcatctacttacccacaggtgccatgctgttgtttagctgctaagttgtgtctgactctctgtgacccccatgaactgtagccctccagcttctctgtccatgggatttcccaggcaagaatactgaagtgggtttgccattccttcctccaggggatcttcccaacccagggagcgaatctgtgcctcctgcgttgcaggcggattctttttaccactgagccaccagtgctgtacagacacggtagtgtgtgtgtcttgataggaaaaattttgggaagcatagactgtttgaagcgccctggttttgaaatgaaacatttctctcttgaactgtgtgattcaggagcctcagcttatatag

SEQ ID NO: 32127 - DNA, 1727 bp, Bovine  19866880359880
  misc_feature (1)..(1): n is a, c, g, or t
ncaggcctgaaaattcatcagtggataagaatctggacttgtcctttacatcccagcagtcacctgccaggctgtgtgacacccacctcagctggagacttggagtgcccccctcccgttctgtcctcagcctctcactggggccaaaactcgtcctggtctgctggggcctccagcgtcaggtcccggtctctttcagcccaggctttcttgcatactgctttcttcccttcaagctctgttcagttgtggacatcagggaagaagggggttggtaacttgcccaactccaggagtgagggacctggcagtaacttgggggttgaggtgaattctgctggacctctgatttccatcagagcagggattctgtctggtcactccttatgtcagtagcagcaaacagcaccagacatagcaaatgctcagtaaaatccttgacaggattccactcctgctggggctttgtttctgttcatgtcctgatgcaatcctctctcctcagcactgccccccagatattgaataccagctctccagcacagcaggcagaaaatgaagccaaagccagctcttccatctcaatcgatgagtcacagcctaccacaaacatccaaatacggcttgctgacggcgggaggctggtgcagaagtttaaccacagccacaggtaccttgcattatggggcctggcttattctaagagggtcccagaaactcccacagatacgtgagtagagggagcagttcttccccctaaacaccagcagactctccaggcgctctccagaggaggcagtggggtaggaagctgtgcacgtctgaagcctttggtttggtccccgctcttccattaagtgtagccagtgactgttccctctccctcgtgtgggtcacagattcctcagatggatttgttccaaactatttgttcataggaagtttgatgcaaaagcccaagggtagaacagatgaaatctgaactgctgtggttgatggagcggggaggagacgaaacgcggcatcccgcttactcatcccactcatcccacttctctacctcccgacccccaggaggcctctgacaacctctaggctatgaaggtctctgaaatccggatttggagaattctagaatacctgttctatctcagcttatctgggccagattgaaacaaactacctctgcaacttaaagatggggaagccgaggcacagagtgatgaagggattagcaggggatgactgttgccagtaaagatatttggcaaaacaactctttttttccctagaatagcagtgtctaaatttcatcagtcataggccatataaatcagaacccatgtggggcccagggaatggcttgccttgagtgttaacaagcttcacatgaggttagtgtggagcaagtgtaatgaggattatagaagaggaatcaggcagagaagcccctgggaagagggaccagatgtgggcagagagcacagcacggtgaagaactgaaggggggaggtaggagagcaggggaaggaggctggtgtgtaattaggcaggacttgggactacagtcaggaggttggtgtttatagcaaggaaagaaagtttaaaagaaactttagttgctcagtcgtgtccgattctttgcgaccccatggactggggtctaccagtccatggtagactgtagcccaccaggctcctccatccatggcattttccaggcaaga

SEQ ID NO: 32128 - DNA, 772 bp, Bovine  19866880378761
  misc_feature (1)..(1): n is a, c, g, or t
nagctcctacttcccttagaagcagatgaaatttgtgagggacagggagtcagagaaagaagcatatttgttttcgtttcttttcagaaaatgactattcagataatacaacccactgtgaaattttaaaagacaaaaaacagaaaagaattgtaaaaatgcaagccactttcaattccaccatctagtgttaactgtcgttactagcgtatatccctcgggcctttgtgagtgtgtgtgtttaaacaaaattagactcatgctttatgcataatttcctatcctgctttctttaacattctatataaagcatttcagcacgtccatgaggccgtaggcagcatgagagtggggtaggaactgtgtctcttggataaacgccgtgcccccagggcctcgcatgtgtaccatgctcaaaaaatactgttgaaaaaaaacaataataacaggtaatatttattaggggacttctaggcatcacagcacatcacctaattgcatcctcatgacaagcctatgcagcaggtgcttctgggaaccacatcttattacagacaaggaaaatgaggccaggagaggagatgtccctcccctgaggtcacacatccctgatatgtctctgcagaaacacatccttgaacacgcaaaatgccaaactctcactcgatacgttttcttgccacattccacatttaatcagggactgaggggacatctctgcttggctgagacaggactctctgtttgggaaatgtttggcccacgctttaag

SEQ ID NO: 32129 - DNA, 2470 bp, Bovine  19866880482230
  misc_feature (1)..(1): n is a, c, g, or t
ntgaggtgatgttgactttgggtattggcaacccaagatgaacttttcagggcttctcacaaccaggctgatgggcactcccaaatatagtcaatctcatggaaggagctctttacaccaccacttggctggccttgctggctatactttgcatcaagctcctccctgtgcctctctcacaacagcagacagctgtaataaaggttcaagggtatggtggacagaacatgggctttggttctgccaatttctagttccatgacactggaaccccctctctgagcctcagtgtccttgcatgcaaaatgggagtgattccatgagctgatgatgcaaagtattaactctagccactcttcactgagatgcgcacagcacaccatgtgctgcccatgtattggtctgatctcagaagtgcccagtgcttaagtatggtgattcgtggcattagaacgtgggttcaagttccagtactgtctagtattgtcattgtggtcactgtcattatcaacaccatcgtcatcatgtttgactcctccctacttttatgaagtatatagtcatcccaggtttggtgagcctttaaacaactccttacatgtgttctttccaccattctgcattgcttctattcctctgtgtaaagtgtgttcagcatcctttatacccaggaaaggttgggggaactaactagtccctctggagtcagaagcagaagattatgggtgagcctagcagagcactatgggaagattttccttccaattttgacagtgtcatctgtagccatgggcccttgggaaagctggttcatctttcctcatcctccacatgggcataaagtcacttacctttaggcaccattgggagcatgaaagtgggtgccctgttgcttagcaatggttttttaattttctcagacactggacaggggactctctggagcaggagcttatggcttgatagtttgatggaggtggcattaccactgtggtcttttggggtttcttgcaggtttgctccctggaatgccaggctgccctgcagcctgctcaggagtgggagaggtgccagggccttctgtctttcctcactcccttcaccgttgggctcaatggcaaggaagacttgaagagcaagacagttttggaagagtccagcagtgagccagccaagcacatcaggccctacttgaaggaactagagaaaaacagattccttctcagcaccccagcagagaagaatgctctgagcagcagcctggcggagaagctcaggggtctctctggcaggttgggggaggatgcagagtctgagttgatgggggatgctcagctgaatgatggcgccctggaggctgaagcgcgggattccaatgaggaggaacccaaggagcaggtcaaacgctatgggggatttttgcgcaaataccccaagaggagctcagaggtgaccgggaaggaggctggggaaggggaggggggtgaggtgggccatgaggacctgtacaagcgctacgggggattcttacggcgcatccgtcccaagctcaagtgggacaaccagaagcgctatggtggcttcctccggcgtcagttcaaggtggtcactcggtctcaggaagacccccagtgcctattatgaagagctttttgatgtgtaaacacctccccatcatggagttgagtcaggagctttccataatgccctggagcttggagtgaactcattcatctgcccctgctcagatggtccccattcctcgtgctcagttcagcattgtctacaagacttccaaaccttgtctgcctctcttctgcccagatgcagtgtttgtctgggtcagtgaggagggaagagagacgtttccctctccaataggcttagtgcttggcttcaaccctacatctctaaaactaccaccagcagcagctttgctatcaattcccttgatatgactctccagtcccaggaatccagactgacctcttgatccctctggatctatgatcaagtattctgatcaatgcccctcagaagaaaaatgaacattcccctcccatgcagatatatatatatatctttctatatagatagatagcataaaacatataaaaggtagaaatttaaaacaaaatagatatataaaaaatcctaacagtttattctcaaacctcaaaagctctccctactatggagaccacgctttaggcaaaaagctcaaacactgctttttattggagcaggaattcctacgctacagagttccgtctcccagtggattaaatgttcagtcagtgtactctgagtttgcgttgtttagaaacacaccttttgaagaacctggttcctggactccagtccgtgttgataccctggacagcacccaacttctcacaggagaggatgggagtgaaaaatctttttccaaaatggttaatgagagccgctcgccttctgaatgctgaaa

SEQ ID NO: 32130 - DNA, 2381 bp, Bovine  19866880547784
  misc_feature (1)..(1): n is a, c, g, or t
ngccagaagggtgctggctctctttagtccctggtttcagactctagttcggtgagttactcctgttgtctatccagagcaaaaaaacagaaaattccaccactatcacctatgaactcagggcaccagtttgtttttgcttaagctgatttgagtagggttcccctcatttgcaaccaaaacggtccagatggtcaaagaaacaaagaagagaaatcaggaaaaaaaattgtttttccctcattcagggttagcaacaccaaaccctgtttggcaggcaacaagatgtatgatgtggcagaaccctcaattatatgggatggagtcataacttttaaaaattatatttgcctataagaaagacttttaaatggaacaggtgaaaataatgtcctggtgttaagatggtccaattatcatcaggctttttttgtttttgaaaatcttctggcacgttgttaggatattgtttttaatggctttgaaaaagtaaacccattgcataaggaggcaaagggtggggggagggttgtattatatatacagtgtccatagtcagactaacctggggctgtttctatacagtatttgatagtatgaaaaattgtactctatcaatggctgaatgcataaacgaaatgcagcacatacatacaatggaacattagtcagccttaaaaaggaaggaaattttagcactgctataacttgaagacatagggtgaaacttgaagacataatgctaagtgaaataagccaatcacaaaaggacaaatacagtatgattctactcacacgaggtacctagagtagtcaaattcatggagacagaaggtagttctggttgtcaggagttggggagcagggagtcatttaaggattgccgtgcttcagtgttaccaaatgacagaggttctgtggatggatgacggtgatggtggtataacagcgtgaacgtacttgatgccactatacaccttaaaatggttaaaatgatatttatcttatgttatatttcaccacagttaaaaataaatactttaaatttaaaaattacctgctctgtgatgctggggctggagctggttagactttgccaataagcagggtgagctagagggacaccgcaggactggaggaaggagaaaagacttgcttcttcatctttcttctctttagcttctctggtggccttcctgctcccatgagcatcatccagcaatgctccttcacctcacagcagcaattcctcctgtggcaccagtcagcaaccccttctcagggctctaggttcagctccatggggcacttcccccaactgcagagccaagagctccagccagaatctcctccccagaagtctgagttcctgccctcctggccccaccctgctttccaagactcgagccccagctgagcacaccttctttcttagatacctgaagtggagtactgcacgtctcctgcttaatgtttttcagttttgatcatctcagcctcttctctttgttccctcaggcctgggtgtgatagatgcttcctgaagtgctactttcattctatcttagagatctttttataaccttttggtcatccagttaacaacgttatacttggttagcaattctctatattaaattctctctgttaaaataactagggtggtttctgtctccagcctgtctctgactgacacagttttcaactttgggctatcattactgatgctgttgtaatcacgtctgttcgtgtgcataagcacagtggctctaggatatacaggtttcctccactatccaaaagtagagtgttcccatgaaacatctcacaagctgaaactgtgtaaagtgaagaaacagttaccttaggacagatcttgctaacagaggcacaaaatgagatagactgagataaagcacagacacaggtcaaagccagaccaaagctatggtggcctggtgcagagagatgctgagtgcagttcctggggaaattctcggggaaggagccttggtggccccagtcccccctgccccctgctgcccctccccagggtatttgctgcctctgtaacagctcaccccagatcaaacactgaacatcagtttcacttttcactcagttttgtaaaaatgaaaatcaacttgggctttctttcaattcacaaaaacagttacaaatgtatatctctcataaaagtgaaatggcatcaagtgaactttagaaaagcgacagatacctgtatagcaaagagttgaattggaggtatgtgaatactcaagtttacaagaaatgtattttccaaagtggggcatttgcttacactcccacaagctgtatccaagagctcctgttcctccatattctgccacacttggtat

SEQ ID NO: 32131 - DNA, 4486 bp, Bovine  19866880551050
  misc_feature (1)..(1): n is a, c, g, or t
nggagtcagctccgggaggcactgggaggcgggtaacagactggggcgaggctggggggacgcgtctccatcctcctccgctttcccttggggcagatctggttccccagcacctcggtccccagaaccgaagcctccagccggcccgggcgcaggggcggggcgcggggtgggtgctgaagaagacccctccctcggccgctggcctcgcccctcgtctggggagcccctactgcgccgggtccccacgcttactccgcttctcagcccctcccacacacgcaacccgctggagggactcggggtcctctccgaggtccttagggcgggatgctcttcggcgcgtgcggctccgtgactcgagggcgccacctgaaggcggaaaggaagcctctgatgaaccaacctctgtagtgccccctcccctgggaagcccactcgacaaccccacaggctccctggccccaggggcccttccagctgtgttctcttggcctgcattattgtccttatctctgggagctgtggttttcactgagtgtcagcctccttcctcagactggcaggtcctggaggccagggccgcagaccgacgctcccagagcccagcgtggcagtgggtggacaggtggtagtgggacacatttcaccgtttctttccttctggggctcagactaaggtgaattaaatttcacttcacttcaattaagtgaaatgcctagtgcactaaagttaaggagacactcgctctttgggagcccaggccaagcccagagaggagctggagctgaagatcaccagcttactggaagtctctgtgaacagctcactctggtggcctcaggtggaatcctcccacctctctgagcctcagtgttcgcctctgccaatgggatcatgaaaatgcagactccaggagctttggaggggtcagcagaggcaaaccgtccggaagtagaggcacggtcctgagtcctcagccgcgtcatggtagagctggacctgtcctgctccaaaggcctgtgccatccttgacgagtaggacagcagaggcagccccagaagccaggtgcccaggcctttgaggctagggtgatggacacctgggcagggcttccagtgctgggacgagtgggagggtgtcaggctcttcctgccttccagaggcctggcctactgttgttgctgtttagttcctcagtcaaatccgactctttgcgaccccaaggacagtagctttgggattttccaggcaagaatacctgagtggttgctattcccttctccaggggatcttcctgacccagggattgaacctgggtctcctgcattacaggcagattctttaccatctgagccaccagaaaaggcggattgttgggagacttcagaagagagctgtctgtggcaccagactcccaagggaatcctagctccaccacctttgtgtgaaggggcccctcttggagctatttcctcatctgtgtaatggactcagtaagggtaatgggattagatgaaatgttccctatacaacatcccaccatgtccaactcaatggacatgagtttgagcaagctcccggaagttggtgatggacagggaagcctggtgtgctgcagtccatggggtcgcaaagaatcaagcatgactcagcgactgaagtaaactgaactgaagggtaatgggaccagaagaagtactccctataaagttttcacagttcccttcctcagcctttgcctttgctgttccttctgcctgggacactcttcttcctgagaccccccagaatgtgccctcatatccttcacatatttactcaaatgtcaccttctcagagacaccttcccatggcatctttttaagactagcagtaccccagcaccctttactccttaattctgaatttttctccacagcatttatcagcttctgacatttgcttatttctttctttattttcatcaccactaaaatataaatgttaggaggcagagactttgccttattccctcttgctatatcctcagatgctagaaaaggagccaacacaaagggggcttttgataagtgtttaatgaataaagaatggagaaaatgagcatttattgagctcctattatgtactgattaatcaagacgactccatccccatcctaccttctagaagttcgtattctagtgggaggaaaggataagcaaaggtaatattgccacaaagcaaaggtaccctgcaagctttcagcaaggagctgaccttgtttgggactcaggatggctccaggttctcctgtagaattgagggctgagctgagactggaaggatgaataggagacagccaggtaaaagagagcaaggaagcgaggcccagcagagggactggcatgggcaaaggctctggcgtagaagggagtgtggtgagtgtgaggctttacggaagacaggatggttgccctgcagggctcaataaggaacatgggacatgaggctagactatcagtaagccaggtcactgcaaatacttgtaagccaagcagttggttctttgtccccaaagcagtggggagtcattgatcaatgtgaataaagggttaacaaaaacttttcctcttctgtgtgagaatttgacctttggttaactgtctagctctgtttccttggaaacagataaacatatgtcactatgttacctggcaacattgcaatgataaaatatgaccccggaggaggagcctccaatgatccatgtggtaatggatttgagttggagatattagtataaattcatgtttagcataatattgatacagatgattacatacttatgatacattttatatacaactgtaattgtgtatacacacaagttagtatacactgtatttcctttctctgtcagctaagaggacctggctgcatgatattgcatagtaataagcacatctactgcccagatcttggtttctaataccactctccaataaaaggaaccagaggaaaatggttgatgctaggactggagccgaaaacatacaagacaagcctggagcatctaatagtgccataaaataaagaaggaaccaacaacacacacacacaaaatgatgggagtatgtcaaaagacataggggttgactgaaagagctgatagccaaacttggaaaaatctgataaaaaataaataaataaagtaatattgaactataacctaaaatatgataaatgcaaaaatgggggaaaagataaatctctgatgaagaattccaaatactctatcctcaaggaagagaaatataactcccaattctttttttaagaattctgtgtagagattttttaaataaaatttgtaaacattactttccatttagtagttattaagaaatattgactaaattccctcagtttgtgcagtacatccttgtagcctatcttacacacaaaagtttgtatctcccagtcccctgctcctgtattgcccctccccctcctggtacccactagtttgttctctattatttgtgcgtaactccccaacccttaaacgtgggctgagcagagtgactttccgagagtgcaaagtggaagtgggggtggagaataactttgaaaaggagaaactgacaaccctgattaccttggccaagaacaaggtcaacctcggcagtcaaattatgttgatcgtaggtatcctggatatgatgtgatgacagtggcaatttacttctgtgatctctctccccaaacccataacccccgtctaaccatgagataaacatcagacaaatcccaactgagggacattttacaaagtacctggcctcaaaactgtcaaggtcatcaaaaacaaagagagtcttgagaaactgtcacagcctagcggagccttaaagaggtatgatgactatacataatatggtgtcctggatgagatcctggaacagaaaaaaagagcattaggcaaatactaaggaaatccgaataaaatatggattttagctaataataatagatcaatatcagttcattaattgtaacaaacttatcatactaatatacgatgttaatcatagaaattggcacaatgtcacttctgctgcattctgttgctttagggaagctcacaggccagcccagagacaagggtggggaggtctacataagtgtctgaatactgagaggcatggatcactggtgctattattttctctattttaagatgaggaagtggaggcaagaatgattaataacttgcccaaggtcacacaaccagtttacgatgtttctggggttcaaatccagaccccgactcagtgctgataaccacagttctgagttctgtcataattttcaaagcatgtgcaaaattcctgagctgttgttattccccctgacccccccatttttttttttttcctggttgcacctcaggttttcaggatcttagttccctgtccaggggtgaacccaggacaccacgg

SEQ ID NO: 32132 - DNA, 1750 bp, Bovine  19866880670209
  misc_feature (1)..(1): n is a, c, g, or t
ncctcaatgtggctgagtcttctctttattcacgcatactgaacacctactgtgagccagggcctggtccagatgctatggaagcagaagtgaacaaagcagaaaagggctcttattccatgaagcttatgttctctttcctctgaaagaagagagattcatctagggcaaggagtgaaaattttatctatttcctcttcagaagcatcacactgagaagaaattcctatagcacaggctcagtggttactctgatggccctgcttggaggagatgcctagaggttgggtgtttcctgggaatctgttaagaagaccctcctgtgattcagggattgactcacacagtcactgaaggctcccagcagagctgggtcatctcagaatgtccctccccagggaagaggttcatgtgggtgacttaggagcagccccactgaggtagcaacggtgatcatttagagcgttctgaccaaaactctggatcctgggctgtcagcagaggaaggacctttagacaccattctcccaacctcccacgtacacatgggggcctgagggcaagaggtataggggccctgaccacagtcacatggtcagtgaggggatccttccagaacccaatctatttcaaagcgagtcttcttcctacactggcactggaactcaattcatggaagaacctggcacataggatttgaagaataaaaattccttgaattaatcatggaataagttcttttcatggttttcccaaagtttctgaaggcccctcacattcagattctgagcctgatgtgactggaaaccactcccttacttttagcctcatgattccaaatccctcattccatatgagcacctagagctgccctgttttccaacagctacctaactctcagcatatggagacagcatcattcatcttacagtttcctgttgatggacactaagttgttcctaaccttgggctactgaaacagtgctgaggtcgataatctttctgtctgtcactctcctcaaaggggaggtaaccactggaagtggctttgctaggttgcagctgtcgactgaaaaaaaatgtacaatgtgagagttgtgggtttagttttatttggagcaaaaagaggactatagcctgggagacagcatttcaggtagctctgagagattgctccaaagaagttggggggtgggggcaatatatatgtgcttttggtgaagggagtacatgcaatcaagcacacgcgttttgcagaaggtttatgctagtcacaaggaacagatgtcaccatgaaagattttgatgcttttctagatatgaggagatgcaagaactgggctcataaaatcatctccagaaaatatctaaggatctgaaggcctgttctgccaggtttttccagatcacagagtgcctcctttctgatcttctttcaggaggtgttgaaggtcagcagctacagtggctcatagtttaacccttgtaaagatagaaagcaagtgtcaatttgtatgtgactaaggatacgtgtataatactttgagtggatattgctaaatttccctcttagtcatggtagccactgagcctcctcaaccttcagacatcagcagggaaggtggttttttcctgatctgcagctattacttagcttcctagatggtgggtcccttgctcaacctcggtcacaagtagtaagtggttccaccgccactcagatctgcagcttcccggaaggtggatcatc

SEQ ID NO: 32133 - DNA, 1318 bp, Bovine  19866880939472
  misc_feature (1)..(1): n is a, c, g, or t
ntaagtctactgattcataggttcttaaatgacattcaggttcaccttttcctattgaatgtccgcagtgcaaaagaaaggaaagattaagatggattcatcattccatgcttccgtccaagcatgcattcactcatgcacttacttatgcgtgcatttgttaaccaatacctaactcctctatggtaggccctgagcagaggacctctatctttagggagcttgccagttcccatggtgaacttcctataatacttgtctgctttctttgggctgtgacagtcccccctacagtgactgtgtcccagtcttcacactccttggacatggtgggcagttacctgccacgtgcagagattctatccacagaatgtgcatctcagctggttggagaactgccatacgttcaagagagctgtgcaaccctcgtccaagcagaatagtgatgggacctacaccttggaaagcttgcatctggtgaatgcctcagtgcgggagtctgaacgtgtacttacctgtaaagtgcagcatgagacccagcctcccatccaggccagcctcatactgtccacagcagtgcaggacacatacaaattccttgggagcacaggtaagcttacccctacacctgtgagcaactgggtggcctctgtctccaagtggaatgaggtattaactcacagagtcccgttttatatctcctctgccccttgtcacttaggtccagagatgcctgcccttatcttgatggctttcctcctgggcttcaaagtggtgctggtgatcagtttcatagccgcctattttcacaggtggtggaacctgtaacaggtgaggtggtggcagtcttattctttaaggaaggagatcagagccaccttcctggggtggcaagaggagtcaaggcaagctcaaatatcttatggcaatccagcttcaaaggagagatgggaacagacttattttctccaaatgtgtcttggaatttcagaggtttccaactctcattattctgtgcctgggaatttgaagtttttacaattaagttagttgggacctggcaggtgagagtccaaggtatgtaggacactggaggtgagggtccacagtcaaaaaagtttgagacccaaactccaaagagcccttccatagactgttgtatattcatttatcacatggtgtatcctcggaatgaataaggaaagtgttactaaaatcaacttatggaacctatcttggggacttggatgtgctatgtaataatacagatggatgtgggatgggagagactttagaactcagaaagaggtgtttgggg

SEQ ID NO: 32134 - DNA, 1545 bp, Bovine  19866881028032
  misc_feature (1)..(1): n is a, c, g, or t
nctatgacaaatctagacagcatattaaaaagcagagacataactttgctgataaaggtctgtctagtgaaagctatggttttccagtggtcatgtatggatgtgagagttggaccttaaagaaggctgagtgccaaagaattgatgcttttgaattgtggtgttggagaagactcttgagagtcccttggactgcaaggagatccaaccagtcaattctaaaggaaaacagtcctgaatattcattggaaggactgatgctgaagcttcaatcttttggccacataatgtgaagagccgactcattggaaaaggccttgatgctgggaaagatagaaggcaggaggagaaggggacaacaggggatgagatggttggatggcatcactgactcaatggacacgagtttgagcaagctttgggggatagtgaaggacagggaagcctggtgtgctgcagtccatgggatcgcagagagtcggatatgactgagtgactgaacaacaacaaggagtgtacatttcagcagggaagaacttgtaaagcaagcaagtatgaaaaataaatgaagagttactccagagatgagtgtaaaataaaggaagcagcaggggtggaggacaggggcctgaagataccactttgaagctgagatctgacagaggaggagggattggccaggtgggtgtgtgcgtggggactgggagggttttcagcggaaagagtagcatgggcagaggtgaaaggagcactgtgcacaggagagtctagaggaaagccagggtgctgagcaaggacatggagaggaagcttgatcctgcaagatccgtaggccatgctgtgatgggtgggctttattttaagaacaagggagtaagtaggggattttaagcaaagaagtgacatggtcaaatgtgctgaatcagagttttctggaacaagatgatcaggcatacgtatttctacgtaaacctccaacaaagaaaaaaataccacctttgatcccatctcttagtgatagttgcaattgcttgtagcatgtctcttcccaggctgggttctctgcttgtctctgaacactgaatgatatgcttttctcaattagcattatatgtcttaagcattttttacatattcttcataagtgtcatttataaatctatataatcataatagttcacaaattggatccactgtaatttactcaagtatttcctgataataaagggattgaacaacatcacgtctgattttcctgtgatacctttgctctgttgtcattaatagtacttctttcatttttaagagagccttggataaacaattatatggccacccttcctatgggatgaacatttgagttgcttacattattattaatagtaatgttattgctgttgtgaataacccagtgatggatatatttcagccaatcagcttcaacaaaccatataatcacaaacaatccttgttaaaaggatgctcagaatttctctgggtgggtttctcaaacttcaaacattcacatgccatctgctcagccac

SEQ ID NO: 32135 - DNA, 1461 bp, Bovine  19866881037540
  misc_feature (1)..(1): n is a, c, g, or t
natatcagctagctgactgcactttttcagacatgcgatggaatcaaatcaccaactattgatcccgcttagaagatggaagacatctaataaatacaataattgtgcaagaatggcccgagaagtgggcagtgggtggagtgggagagaggatcaatcaagaagacacttcaagcctgaggcaggagctgaagacataaaagtcttctgttggtgtggagagaagggagggggcagggaggggagtgccagccccacaaacagaagtattagacactacatcacatttcctggctgtagcacacagcgtgatgcagtgggatgataggctggggggcggggatggctccatttctgacactttgaacagtgaaaacttgaggagtcacaggagcatttgctgagcacctactaaatgccaggcatcttactgtatctatcccatgagaatctcacaataacctcaggaggtaaaattactgtccttattgcccagaggagcaattgctcagtaggaagcactactgtaggcccagtcacacagcaaatgagtggtggatctgggacttgaacccaacactgtcttgggtgttgtgagatgctcatttagatgtcaaatgaaaatctcctggctcttcaagaccctaattcctctccatatgcttaaggggacaagcctcagagctggtccctttgcccactctactaaaaaacgtgctagattctgctaagaagtctctgtggttatcccctcccagctgtagtggaaacacgggattcacctgccacccatcacacctctagctcctctggggcaaagcagtgggcttgagatcccttcagcaacctcccccaggcagcacagctcccccggctagggctgctgcaacagctcccccacgcagatctcaaagcctggagataaatgacctgtaaaaatagaacaaaagacaaggtgggggggcactggggggggagaaggtgagggaaagagatggaaggtgcagtggtggctcaggggtgcagggggagaaaatgcagagaagaggattgacatgctgtaacgtttggcaacagatcttcactggaaagcctgtcaaattagaaagacaagacttgtatattttcccaacccttggggaaaaaaatggtaatgaagacttttggtctgtgggaagggaactgaaatcagatccaataacctgaagaggttgtttctcttgggaagcttggaggtttaattaaggaatgtttgtaaagcttggagagattctatataaaagataaccaggaaaaagtctgaggtcacagaacttactattcaatctgggagtcatcagcaagttccccccccaccaacccccaaagctcaccagccttttttgcaagtcaaactttgagattcaataatactttctttgaatgcagatatctttttaccagagcaaatgtctttcccgt

SEQ ID NO: 32136 - DNA, 865 bp, Bovine  19866881050561
  misc_feature (1)..(1): n is a, c, g, or t
ncctttttcatctgtaaaatgggtaaaataatcatattacctcctcagtggggttgttttgagagtgaaatgaacataaagcacttagaaaattacctggcacatagtaaatgctcaataaatagtaactcttattatctacattccacataaactacatttttaaaggtctattcatctaagaaataagaggctagttctgtctaggtcagaattatttctaagtcactggttcccaaactcatatgagcatcagaattaattgtgtaagaaagacatattagtcagcgcagcaggtttggggtaggcctgggaataagctttttagcaagttccctgcattctgttctgacataggtggtctgaggccaaacacaaacccactgctccacaggggcataaaggagagctttgccatggaaacactcccgtaaccagcctatcttcaccccactccactgcaccagcagggaagtttgggaagtggcagagaagtcaaagccctcctctgagacaggaggcctgggttctaatcctggcttccttcttctgggccagtggcctctgctctctgtgccccagtaccttctctggaagatgctgaatcccacctccctgttgagagggttggaggcttctctccatccagaggccccctgagagagacacagtgagggctcagcaagccagggcgggtgttaacttcacccggctgccgtttgtcttctgaggcctgctctccctgagtgttttattttctggtgatggattccggctcatgtacaggaccagcacctgcatacaaatgccaagaggccagcgggccccggaatctgtcctcgcctgctctctgccaggcaccagg

SEQ ID NO: 32137 - DNA, 1461 bp, Bovine  19866881083568
  misc_feature (1)..(1): n is a, c, g, or t
ncccttcctgctggagaacaggttctggcagaactgctaattgggggagcaagtgcaaattccacttctgccacccactcacatgctgcgtgaccctgggtgggtcattctccctctcccaggttagatctcagtgctctaagtcacacgggtgggctggacattcattttcatctcaccacctttgcaaaaaggatcatgggaggaaagaaagggtctgtctggctcagaggttttgagcctgtgatgtggggcatcccacagagaagccactggggtttgccaccatttgactctgattttgctgtaaaattgtaattaaaaagcaacatgcacaggcaagtgtgctctgcatcacatattagcaggctggaggctgccacgctgcaagaattctcactgccagatgaacgcttggtgcctgggcaggtattgggtttttaggtgagtggtacccattagatgtagcagctcagcatctaacatttgaatggaggctgatgggctgccaagtgctgggacatgagtcacctcagggagtccaatgatgggacactgctcatctccattccacactaaggacaccagatgactccctaaggtcacgcaacgggaaagtgctagagctgaaattaggatatttcactgcgagtatgaggtagagggtggcagacacctccggggactgacaagggagagggggtgtctcattaggatagaggccaagtgcagtgtggtctcaaacatggtccctggagacccactgccatgtgaatcctggcaccagcactcaccagctgtgagacctgaccaagttctataactctcccatgcctcagtttcctcgtctataaagtggagttaggtctgtggtgacttcagtgcctggcacatcaaaagagctgactgagggccagccatcactgtcactaaagtctacatttgagacctggactctgcacacaagcagacccaccattcagggctgggtggccttcaccagcgtctgcagctctccaacccccatttcttctccagaacactggatggctgatacccaagcccacggaaatgagctcctgtgtgctagagcctgacgtggtgcccagggataaagctccaaaggaggctggggctttatgaacaggcactatgaatgctccatccaagggctggcttgtctcccaaggtgggcaagagaccctgtttccccatccaaagaggagtcctgcctgtgtaggggctccaggaatgttagggaaaccatcctgcagatcacctggaagaacctcttctagattctagaggtgccagccctcccaaatgggagtttgaggctcaggcagtctctcagggctgagtcctccaggcagtccagcggggagggaaacttgggggccagaggagagggggtgcaggaggggtgtgtggctgaggcacagaaagcccgtcaagctctgt

SEQ ID NO: 32138 - DNA, 720 bp, Bovine  19866881122568
  misc_feature (1)..(1): n is a, c, g, or t
ntttacagaaaaagcttgctgatccctgctttcattattttatagcccttttataattctaattattctaacagttttgaagctgattttcttggggaaatcagagactaatcaccccctcctcccagcccctgtcttctcatctgtcaatgggctgtgtgtcgcctgccatcgtggctccattcggacccctggacggacccagtaaaggccagcgcaccatagatctttcttcaccaagggcccagagttccttcaaaggtaagggactgcttgccctcttctcccctctcaatatttctaccttatagttagagggctctgaggagcagcgagcattttcatttaaaaagccagcaaggaataataatggcttgatttaacatcacaattatctctctgagcactttatcgcatatgattatccctatttgatagaagaggaaatgggaaaaggtagaaatgaagtcacttgtttaaggtcacaacatgagtcaggagggaaatggagacagaattggagcctcccacacccaggccacgactccagcaagcgctgcgctgccagtttgggccagaccccagtctcccatggaccctccagggtggtgctagtattataggctcaggctcctggtggaagagggaggaccatgtggacagagccccccaccccccaccccaacgcctaagcagggtgtgtagctgagacagaactca

SEQ ID NO: 32139 - DNA, 1945 bp, Bovine  19866881155742
  misc_feature (1)..(1): n is a, c, g, or t
nttgagggggacgctgaaaagctgtgaccttgtgaggggcctgacatccctgacttagggccaccaaggaaggctgcacaaggagaccaggatgtatgcagtggccctgggcctgctctggctatcttgactggtgagctcaggcccaacccctctcctcaccgtgcagtttcccagagctgcctttgggtcagctggtgccaaataaaggtaactgagctgaacaccaaaagtgatccgtgaggggctctgtgtcccaggctgctcccagaccatctgaggggaggacccacattgccagcgagtgttcccagggctgcagagccatctcaagaatatactgcattcttgggagtaaacagcatcacggacccttttgtttcttaacaaagatgagtgatcacttgggagccaggcaggtgtggccaagctcatggccagaataacatctttctcttctcccccttcccttcccaccagttttgtatcctaacctggcagaattggaaaactatatgggtctttccctctccagccaagaagtccagcagagcctgcctcagactccagaaagtgccagtgtaggtatttgtctcttgcctgatgcgggccctccttcctcggtcttgccatttaaacagatttgaatctcctctctctgtagcatccctgaggctctgtttcttgatgacacgtttcattttgaaccttcatgagaagtgccgtggggtttcatggtttcctgcaggccttggggctagacggccactgcctgccctttgacctctgacctgctggcctgagcctgctagatgagaagggaggacattaaacctggcgtgagcctgggtgcttctaatgagggggtgcctgtgacttgggagcagctgcatggttaggcagagcctgtgaggaggagcttgtcagccccaagtccccaaatgaaaaaataatgcttaactcttgctctctatgacttcagggagcaaaaaaaaaaaaaaaaaaaatcataacgtagaaatattcactcctgaaaatatattcacttatagaatcagtcccaaaactgtctacccatcagcttcaacattcctgggtggttcattgcgctggtccagtgcaaatcgactgcaaagtgcaaatacaaatcttggtaatgccgtgggatttcatgaaattgatagaagtgacgatgagagctgccacactgacaaatgaggatttcacaggagaaaccagcaagggatgaggacatgtaggatcctgagcaaagctggtgacaccctggagtggttttccaaaatgacgcccttgacagtcatgtaggggagcacacacaggaagcaaagtaggtcacattgtccattttaatccattgattgatctctctttggtcaatagcccagacaacctaaatttgatgggaaaaaaaaaaaagacgacagataatgcactttcataattaaaatttttaattattttaagtttttctttttaaatagtcggagattcagtcaggaagttgccaagacaagagaagtcccttgtactcttcactcagttttccattttatgtaactactataaggtcaaaaccaggcatgttacatcagtacaatgcgtctaaggttctgtgtgtttttatcacctgcagccaccagcacaatcaagatacagaactacatcatcacacagaagtctgtgtcatgctgcccctttatgatcacgcccagcctccccttcagcatcctcagccccttggcagtcactggcatgtttttgtccctataattttatcattttagaaggttatgtaagtgaagtcacatggtgtgtgaccttttcagatgggctctttccactcagcattgtgccctggagatccttccaggctgtcgcctgtttcaacagttcattcttttttattgcaggattgcgttccatg

SEQ ID NO: 32140 - DNA, 1106 bp, Bovine  19866881238220
  misc_feature (1)..(1): n is a, c, g, or t
nttcctatacgggtggaggacatggatgagccgttcccaacagaaacacaactgctgatcacatgtttggaccaaaggacttttcacaatgcactactttttttgtttgtttgtttaacctactttattatcaaggatctttaaaaactgtagtactcggtgctggggaagctgcggtgagactggcaggttcacgaactgctggtggaggggctgaccggcataatgctctctggaaacagcttgtcaaagtcaagagcttggaaggtgtcctcatcttttgactcataactgcacatttgggggtattggtattcaaaatatagaaaaagctttatgcactaaggcatttaccacagaacaagatgggagagggaggtttacatctcacagctccaccaattgggactggttaaggaaatcaggatagattttgtagataaagacttaagaggtttatgaggaggctttctttttttttattacaaatgattacattaaaatgataagcataaaattctctgtggaatgaccccaattatgaaaaatgtgtggataacactggaaggaaatctagtaaaatgctaacagcagtggtcttggggtggtattttttcttctttttagtttcctaatgttctatattctacacacctaagtcttatcattaagaaaagaaaagaggagggccatgtgttctgattaatcaaagaagccgttcatgcacttgattctgtaattggaggctgtggcttggctcactgcagggtcacagtcaaggtggtgagtaaaccagagtcactgattcggcagttgtgtaaattctcaagccagccactctggggacattagcctggctcatgtcagaaatgagcaatggggcttggcagcggggttattaatggatttggcatgagtgcttggctcagaaagcagttctggggcatgacgggccccacgtggccacagcaacagccctctgggagtagggacgctgtctggagaagactgctcactcggctccatccatgcccctcctgcttcccacctgtctgggtccccgctgactcggttcaagtccaacacctcgacctgcttgtaagtcc

SEQ ID NO: 32141 - DNA, 886 bp, Bovine  19866881263351
  misc_feature (1)..(1): n is a, c, g, or t
nattttttttttacttgttattctaactagtttaagcctcaaaatagtcttcacattttacaggtgtggaaattaagactcagagaggttaggcaacctaccccaaagtgaggagttggacaaaacagcatttgaacccagttcctctctgacttcaaaagccagtgccgtttcttgccattttgtcccgatttgcgctgttgggttctatgcagttttctgtgtctttcctgtgtgcttcttcccttccccctctgactttgaaactcctgtcttttcatccacatctcttcatacttagcagagaacctgacctatgggcaaagatgaggaaatttttgtggaatgaatgactcttctccttttgtttgcattcttaatgtttcatgccttctctagtccacacctgtctattaagtgggaggtgtgttaccagcagctcaggtgggatttaaatcaggcagctgttaacagtgagatgaggcctctgctaccagaggcgtgaggagcatggagtgacaccaagatggaggtggttcattagagaggaaaagaggtggttgacatcatgtaaacaagatctttgagggattaaaaaaattttttaagtcctaggacattgccaaggggctattcaacttcagtagtcatcaaaaaattcaaattaacaaacaaaatattagcataattaagaaaacaacacaggcattgatgaaagtacaaggagaaggtgctctcatatgctgctgatgacattataaatcagtactatttttctggaaagccatttagcaaagcttatcaaaagccttaaatatgttcatcccattgactcagcaatttcacaactagaacattctatcctaaggtatatcggacagggcac

SEQ ID NO: 32142 - DNA, 1560 bp, Bovine  19866881365017
  misc_feature (1)..(1): n is a, c, g, or t
ntcccagggaatcatcgtctgggaggaagatcactgccagaaaggtaggcttgtagagctggggtgggctggccgctcaattaccggggagtaagagatggtcaccttctggccctcccccgtcagaacccctggttatgaagggcagtagagggaaacgattccctctgtaagtcctggtgtgactctgggtttccaaccgcttaaagaagacaaactccaaacagggatcttctttcttgagttctcctggccaagctctggtcttccccttctcggtggttcttggcctctgatcatctccaaggcccaagggccagccaggagcagcccaccagggagtccagcagttcctgcacctggtggggaggcggcacagaggcctgcttctgtcctcatgctccctgatccaggagaggtccccagattctccacggaggggtaggccttctctggggaagtgaggtgttataagcagaactaagagatgggtaaaagaaaaaagacagggaaaataaaggacaaaaacaatatagttccctaaccccttataaaaattaaaaatgaaatttatacatatgctttgtccatattgagtttctttaaagaaagtggtgcctgtccacagcataacttcctgctcttctgaagtcttaatcatttaaattaaaaaaaaaaaaaaaacaaaggcagggggacaaaaaataaaaaataaagcaaaagtaagaggagggggaaaacccaaacgaaagcttcacattgctggagacccggctgtcaggagatcaccaaccggccaagccgccacctgtgccctctgctgaattctgtgcgagacacgatgagactgtgggtcccgagggtcaacctgaaagacagaaggcagggagtggacgtgggtcagtgggtgtgggtgcctccaagctccagatgcctccctaggtgccagcacccaacccagatgaattcaggagctgtgcaggggcggggtgggggagttggtttcactctcaggggtgaatccagcctcactacagacaccaggtgccggacacgctatccccacctttccagatcaactgtgatgcaggctaagcaccacacgtcagatcacctcactgcctgaggggcaggctccggctggaaatccacatgtgaggccctggctacaaatttgagtccctctctcctggcttccccaccctgttcagagaagatgaacaggatcctagtcatctgtccctgagccgtggcagccaggatgccctcatccccccctacccccccttccctagtgactaatcaggctgccctgagcattcacagcaaccctctcatcccatttcagagacaagaaaagtgaggctcagggctctgagaacctgcactaggctacccgcccaggtcataaggaaggccagagtcccacaggcagtggcgctgttcatctcacagccacccgctgggccctgtgctcaggacactgccgtgcttaggaaggaggctggagccagaactgcggcccagtccacaggctctgccacttgactgtgagcaaat

SEQ ID NO: 32143 - DNA, 1500 bp, Bovine  19866881494740
  misc_feature (1)..(1): n is a, c, g, or t
natatttaccttagaaaattagaaacttatattcatacaaaaactgtacacaggtatatgcagcagctctatttttaattgttaaacaatataaatgtctttcagggggtagatggatacataaactgtggtatatccagacaacagattgctacttaacaatacataggattgaacccctgatacatgctataatttgtactaatctcaaagatggaatgcaagaagtcagtctgaaaaaaggttacttactatatagttccatttgtatgacattcttaaaaagataaaactatagtcatgtagaagagtagttaccaggagttagaatgggggaagggtgtgactacaaagggttagtacaagggatttttttggtaccctggttctgatggtgctcacaggaatctatacctgtaaaattcattgaactgtgcactaaaataaaaaagtcaatctttcctgtgttaattaaaaattaaaggaaattttaaaaaagggaattttgacatctaaaacttatagttaatacattcaaaggggccatttagaatttagtctgtagcataattccagatacaatagtatggagctcacagagcattacatgaaaatctcttaactcaaacttcaactaagaaagaaaaactttggttttaatgtcaaaaatgctcagtatacaccatataaagaacatttattttagttaccttcacttgaattatagctgaaaacaacatgttgaataagcatccattaattttttctaatgttagttttgctgatacataaatgatagccataataatcattaatagtaaataaacaggttgcataaactataattagactaaagccatattatattagactcatataatttgagactaagaaaaattttataactcttcgattaagatattagattaaaagccagggcattatataaaaccaagagtgatatgcattataatcaaataaattattgttgtggagaaataagaaagtgttaattattaattactaatatgtattaagttataaaatttaataaataatccactttataaaaatccttgaagacataaagtatttttaaaatgtatcctaaatacaacattcaagtcaaggaaatggtaaatgatatgcattcaagtcaactaagttaaaaatattacttagctacagttatttctggaagcatataggtttctaattatgcctatgattattctgaacttacaaagaggaaatatgggctcaacctatctatctatgaaatatgagctcaacctatctatgaaatggatcagaccttcagctgcttccagacagcttctgcgttaaactgaacaatctatacagaaattccaatgatgacataaatctgcagtgttctggatttccttcacattttagggaacattggtcccactgtagctagtaagtatctgcatagggagcactcggctcagctcaatagccgagtttttttagcat

SEQ ID NO: 32144 - DNA, 1225 bp, Bovine  19866880413075
  misc_feature (1)..(1): n is a, c, g, or t
ngcagggtgatggctgtgcagatggctgcctgcagtcaggaggagcagaggggtgcagggttccccggcggctctccgttctgctcaagccacggcagaaccgattcccatcactcttccaatccacgccggtgccacagcatctgccccaggacaaaccgcccttctgcaggccaggaggctctgttggctgtcttgtctcaggccggcgtccactgaattcctgacggtcctcgggtggggaaaagccccagcagatgcgctgcctagtttggccaagtagagtcacaggcggcatggcatgttcctgcctggccagggccaagggtacaggaagctggcgcaggggggtgtcttccgttgggctgcccctcccaggggtagcactcctgcccgcctttcgggctggggtctcagccggaggcacgagccctgaaggacgctcagaatcctcacattttgccagtaagctgggccttcaccttggccttccccttcctcctccctttctcctctcccaggcttagtgtgctggtctcctgctccatgtaaagtgctcccaggaaagacctgggtgttgagaataatccccagagcctggaaggaaggtcacgttaggccagaggaaggaggtaacgtcagggactgaagcccaggccggccctgggctcagagagtgagtgtagatgcccagagggacactgggcagagggcaccccaggtggggccctgccagtgcgggaggggcaggtgggcacacagcagggggtgggtgagggacacatccagtggaggggaatggttaaggccagacacagatggggtgttgttacctctctgacctgtgcactttgaaaaagcctctgatacagagatgttttctaaagctttggggggacattttgaggtttgttctcagggaatgaacgggtcatggtgggagccagggagggaagtggagggcaggtggctatggaaggtcatcagagggacagaggacagggccccaggcagggacaggggaagtgggagggagggagggaggaagtgcagggccggaaggtgagcagagtcgggttacagggatgggaggaggcgaggcctgggcgctggagtgaaggagaccaggtttaggaggagagaggagagaggtgacagggaggccaggagagcctgggcctggccagaaggggagagacagatctggggacctcggtagcatccc

SEQ ID NO: 32145 - DNA, 1821 bp, Bovine  19866880423746
  misc_feature (1)..(1): n is a, c, g, or t
ntatagctgcattattcacaagagccaaaaaagcacaaaaaatctaaatgcctatcggttgataaatggatatcaacatggtacatccatgtgatggaatgttattcagcctttaaaagggctggaactctggcacatgctacaacatggatgatccttgaagatattacactgcatgaaagaggcagacactaagcccacacgtataattccatttatatgaaatatccagaataggcacatttatagaaataggaagtagattagtgatttccaggggctcaggggcagggaaggatgggaagtgaccgctaataggagcagtgtttctatggggaggtggtcatcttctgggattagatggtgagtgggtagataaatgactttttgaatatacccaaaactactgaactgtacacttgaaaaggatgaaccttatgatatgtgaattatatatcaataaaacaccctagacctatctctaatatttgcaagagcataaatggagatccacacaccatatgcctaaatatttaaaaatcaagcaaacaagctgttaaataaaatatgttcccttctcttaccttaacaaatatacctccatagtggtaaaattgaaaagtatgtataaagctatgctttgtatatgcttgaaagctggtgtgtttgggtattctgctgattgaacggctgtgtttggacaagtgataaagacatgcattattcataaattattatagttttattccacaaaaaatgttcatgccttcatttcaccaaaaatactaatttgtgttctagtaaaaggagtgatctgaaaagactaaagagacaaaatatgttttcatgacaatgatgaattatagtaaaatgtaaaaatgttttaatatttttcaaaaaatatatatttctaacatattaaaattatttattgacattataaggcagaatacaaattcagttaagaaaacatctaagtcaaattttaattttttaattaattaaaattaaatgttataagacattaaaaaaaatactctcagccattctagtgttcaatgcccatctacttggtaatgtaaagaatcagtatcatactccactcacgttatatctaaatttatctgtacggatttaaaagtaatagaaattgtttaaacattgcaagataaatgttcctcagccaccacgggcatcgttgtggatacggcattaattcacaggaactgctggaaccaagagttactacgtgaaaaagaaccagaaaacgactctcgccccctggtctgagggtgggttcattctcacgaatgtttccatgcagctggcacccattctgcatggttgtctaatctatgtcttcggagacgcagaacgtctgagccaggagacacctgggggctgcttcaaacgctagcccaacgcctgttccttctttctggcttattgcccactcctccacactccactcctccatgtagcacagtgtggcttctcaaaccccagggctgacctccactcaccccccatcctcctctctcttctctgccgttcacacggcagctccgaagcccctccctgcccagccaacaggcctggagccgtgcaagtcccactccctgggaaccctccttccctccctttctctgtcctcacctctcacgtttccccagctctcctcctctggaatagaagctctccgggctgacctgagtgtgagcccttggagggcagggacctgttgcctggctcagggctccttcccagatcagggccttggccaagttggctgagcaaggaggccccagcccaaggggccag

SEQ ID NO: 32146 - DNA, 794 bp, Bovine  19866880447225
  misc_feature (1)..(1): n is a, c, g, or t
ngatcatttttttcagtggccagtttgtgcagttccagttgtgactgattcacacttctctccaagcacagcgcacattccattgcagtcagcccattctcccagtcatcacggtctggtttctgaacgagaggagcttaggtcagtgtacctgcaacctctacataaaaacgccaaaccagcaagcatctagtgtgtaacaaacaactgcgactggcaaaaggaagcgcgccaaggtccccctgacaacggtttccaatttaatatcctggcccactttagcttaaatggtaagcttgaaaaagcacaaaagactaaagcccaatgtctcatctaacgatgacaactgctggcatcagggatttctgatactcgaggattgctaagacaacccaaggatctttcgtttaccttgatatcctgaaggaagattcggccgcctcgctggttctgcagcttcatcagtctctcagcatgttccctctcctcatgagattggtgaagaaagtatttggcaaagttcttcaaagccacatcatcacggtcaaaatagtacgactgaaagtagaacatgaacatgttagacacaaaagaaggcagtctgctagctggtttctcaaaacccagcaaggctctgagcctaaggagactggagtagggtgtgttcctggattgaacaataactcatttttactctgaaacacaaaaatgaaacttggtccttgaaactgaagtttgcttcctgtagaatagcatgggaactgtctctaccacggaactcttattaaacactt

SEQ ID NO: 32147 - DNA, 2529 bp, Bovine  19866880497858
  misc_feature (1)..(1): n is a, c, g, or t
ngagtgagaaggagttgccttttaagcacgatatcagggaaggcttcacagagcaaagacagggaggaggtgagccacacggacaactgggaagaggattccaggcagtggggagccagtgcaaaggccctgcggcatgttcacatctcaacacacctcacatttgtacactcgtgcccacagtgattccccggtggctcagtaggtaaagaatctgcctgcagtgaaggagactaaggagatgtgtgcttaattcctgggtcgggaagattctctggaggaggaaatggcaacctgctctttgtgccgggaaaatcccacggacagaggagcccggcgggctacagtcgataggattgcaaacagctggacacgactgagtgagcacgcacgtgtgcctgcagtgctcgctgacccaaggcaggcccaggccagcacacctccccatcagctccaggtgaagccagtccagctgagcgaactcggtgtaagccagtccaactccgtcaccaaaggcagcccactccaagttagcaaagcaggggatgcgtatcttgggaaagcccctcaccctctctggactgctcagagaggagctcccagctcccccctccctccaagaccacagaccccaggagaagaatcatggtggggagaagggagcacgggggactgaggtgatgaagaagggagtgacgggggtgggtccccaagctcctcagagagacagaggctgtggttgtgcattagtggggctggagggatctaggtcagatggaggaaaacctttcccaccgatgagcaaggaggcagggagaggccaggaagccctgaagcccactgtccatggtccaggccaggggctgcttaggagccaattgcccctcgacccagggttttccctcccttcctccagcctcaacagtcttggggtctcactgcttctgtcacacaaccctgaccatctgagtgaggggtctgaggtccagagaggtccaggggctggacagcagtcacccagcacagtcgcacgtgaagggtcaggccccccagcacacagacaagaggccccctcccgccccactccaagctggcacccagctgtgatgggctgcaggtcaggagaccggatcccacccagctctgccaccatggctgccctgagtgagcctccccatcacctcctcctcctgcctcagcagccccctctcagaagtgaggggacctcagccgcacttccacagggcccctgagagacaacacacgcctaaacctctggcctgggtgcggctggcaaagacaaaggatggtcaagccccttcccccagccaccagcccgagttcctcatctctgagctggagggtggggcaggccctgctggaggcactgggaaccaggagtggcatcagggccaggcagggccacggagtggcctctgagtacagggtgctccacaaggtgacagcttcccttcagccctggaatgagcagcccagagagggtgaggggctttcccaagacacacagcgccagccacaggccccagcctgacgctgggggtactgacctacccttggaccgataaagtggggagcatagtacctggtgtgagcctcccaggggagagcaatcacagtccaggccacaggcaccccaccaggcaccgtcccagaccccgtttatctaatccccacggaaaccctgagaggcaggtacgacgcctacagctgtgttgccattctacagatgggaaggtggaggcacaaagaggtttagggacaggaccaggagaaggctaaggacagacccacagcccacctcaatgaatgcagagacccacatgggttcaaggggctgcccaacatgctggcagcaggggctggagaccaagatgggagaggatacctctccatacacacacccaggctgtgggggaaactgaggcccataggagggctcggtgaaaaggaagaaggtgggagaaaaagggcaggcagcctgggtagggcggggccagccccggttaataattcagttaatgatttcttctctccatccttatcgagcgggcaaagtccaagggcagcagccaatcagcagcccccgctgggcagttacccagcggcctctgctgccagggctcccagtcctgcgaggaatcagagagcgggggccaggtccccaggagggggccgttttgcccagagcagcctatctttccccccaacaccctgcttggctctgcctaagacccccggggcccctctgcccaggccctcagactcaggagaggccctggggtcggcaggctggaagcagcctgctccgctcctttgtgctgaaccaggccccccgaccctgcctctgtttacatggtcattgttgcttccatctcctgccctccccccaccctgtgcggccctacactgggtgctgggaacagggggatgagtcagtcgctaccccccaccccgcccccgctacctaccacttcccttccagctggggtcaggacctagggaggtggg

SEQ ID NO: 32148 - DNA, 3302 bp, Bovine  19866880627416
  misc_feature (1)..(1): n is a, c, g, or t
naggagagaggagggctgggagggtagacatcctggggccgtagcacaggacacgcgtctggtgtgtgtgtgtgtgcgcgcgcgtgcgcgcacgccaggctgtgtctctctgggtacctgagcgactgcccgtgcgtgttgttcccgagcgtggctgtgagccttcgtgggttggtggtggtgtgtgcttgtgtagaggcacacgcttatggcactgaatttctgtgacacctgtgagccttggttgttacaccatttgtgagcgtgccgtgtgcctgtttgtatgtgggctctgtgcaccaccaggggggtttcagaggaaatgagaatcagagtcaacgctcattcaggcttaaaacagacggaagttctgacatgctacacatggatgaaccttgaagacattatgctaagtgacaagtcagtaacacagactatatgattcctcttctaagtgtcaattctttctgttttttttttttttctggccgagctgcatgacttacaggactttagtttcctgaccagggattgaacctgtgccctgtgcagtggaagcataaagtcctaaccactgaaccaccagggaatttccttcaagtcaattcacagagagccgtacctatggttttcggaggctgtgaagtgagagtcgctcagttgtgtctgactctttgcgaccccatggactatacagtccgtggaaattctccaggccaggatactggagtgggtagcctttcctttctccaggggatcttcccaacccagggatcaaacccaggtctcccacactgcaggcggattctttacagctgagccaccagggaagcccaagaaaaccggagtgtgtagcttatcccttctccaggaggtcttcccgacccggagtctaactggggtctcctgcactgcaggcagattctttatcaactgagctctgagggctgggagaggtagaaatggggagctagtgtttcatggggacagagttccagctgaggtagataaagaagttttggagatggatggcagggatggttgcccaacaagtgaatacatttaatgtcactgaactgtacacttcaaaatggtgaaaatggtcgattttatgtatgtttgactacaattaaaaagaaaaaaaaaagttaatgctcttggctctagagccagaaaggtctggagtctcatcccttgggtttgccccctggatttgcctagttccaggcaggagaacagacttgctcggggtcacggtgagcggggtcagccaagcacagcaattttcctcttagctccccggccaacactccccaggtggccagggccatggcagcttcctggggggccagcctcccctcgaccacctgtctccccggggtgctgcccccccccccatcagagctcttccctggagacagatctataccaatacagccctgtcccctactgtgagctccagggaggggccccaagtcagccttcccaaggacctaggttattccagaagctacacccttggagcccccaggtcctcaggctgctctgggccaggaggggagagcagctaacaaggaaaggggaaccccttgggtgaatcctgcaggtgcggcctctaggtgggggctggaggggcctgaggttcttctgagcccggcacaggatggtgtgggggatgtcgtgcagtaatgcccaccaggtgctgctagtctcattagcgagaggacaatagcagccagcagtcaccttcctgaggacatcccccatcccaactggccccagacactgcttccgcagtccaggcttctggtcagctggggctggctcactcagaaagtccaaggataaaaacccgtttgcgaacgacagtgagccaaagacatgagggctacatcaggaaggctgagccctaggtgtgatgttcaagtttactcacagttcagcgctgtcgagcatgaacgatgggggtcacttcctgaccagtccctctcctctttatctttatccctcagccctttatcttgcttgaggtcgctctcttcctctaaccccttctgctttgcaccctgcccccaccccccgccaccattacacagaataacaggaatgttagattgtttattaaacttatttaaaaaaaaaacaaaacttattttgtcctcctgcttttcaaattagagaagtttaactgttcgagcatcttcaggctgtgtggtcttcggtggattttttttttttctcctggtggcccagtggtcatcaattgccaatctcctcactcacacgttactcactgcttatgtttgtaaaagctggtagatctgacatttgtgaccctgtagaaaagcatgtgattttgagaaagctttcccgctatcttttttggaaaagtcaaaccctttcatgaacggaagcagagtgtttcagggaaaactttctgtaaatccagattttaaaacacccaaccaagtttgaggaaaggccccatggcagggtgaagcagctggagtccagtaggtgaggggtacccaagcagggcacccagggcctgggaaggaccagggaggactcatgggcaaggctgaccgtcattcagttgtgactaatgaacaactagctgcctgcctgcctgtttgcccttccatcagcagcccttctgctttgtctctgcctgctgcctctgggtgctgacccagctgtctgtctgtctgtccacctgactctctgctctccttcaggatgccttccacgccttccaccaggacctcagttttgtgcgcaagttcctgcagcctctcctgattggagagctggccccagaggagcccagccaggatggaccccagaatgtgagcagggccctggtggaggctaagcccctcgtgtggggctggaagaatgggggcattgctggtaacagcttcatggtttgccagccctcccgagcagacagttgctggcagagctgtagggacgcctgcaccagcatttcctgggggactccaggaagacccccttccttgctctgggccctgcatccccatctatgatgaggatttagatgaactgagctctaagggttttccctgcttctcaggctccctacaccttttgtggggatgggggaaccccaagctggcactccatcccctttggccacacaccttggaccctaggaggagtggctgtggagggtggtggggatggagggtgggagtggggggcctccctcgcttcctcggctaaccagctgttccgccccgacagacccagctgatcgaggacttccgagccctgcgcca

SEQ ID NO: 32149 - DNA, 1298 bp, Bovine  19866880640409
  misc_feature (1)..(1): n is a, c, g, or t
ntctccaggaagggcagggtcaaggctctgtccaggaaaaacgaggcagagcaaagcgaagagcaaggccagcagcctgagcagggaggccagagaggacgggcacaaagcctgctcccagcaggacgtcctgtccctcaagaaacccagccagggtccccacaaacccgccagaccggttagcggccacctcactgctgccggtcgcctgagggtgccaaggtgggggggccccactgagcaagatcctgcctagcgggtgcctcactgtcgaccccgcccactccgttattccgttccctcccagcctgacacctgcccagggaggaccatttctggacccaggtgagggcagggagatgttctgagtatgctcgaccctctacctcaggtgggctctcagaccaggggtgggaaagctgacaccgcccctgccccgccccagccaatgcactcaatgggatcttaagaaggagcctaggagctgtgaacgtgaaggtgacaagccccaaccctgaggagctcacggtgcagaatgatgaggacacccacacgcggatcagtgaatacagggctctaatgccagggaccccacagcgaggacagctgcttagcccaaggcaagacagacaaggcttcgagctgggtgctgatgctgagtaggagttcaccaccaggccgaaagagggggtaggcacttgtcactcttgtcctcccccttctcctgtgcccatacacactagcctcccagaacccctggggggcaaacacagtctcagcattcagcctgccacactcacctctgccctggaggtgctctgggctgagcatcagggctagctcccaactcgggcctctgggttgctgccaggcagggaagctggtgaagggagagacccagaaacccatccatttctttcaaagagcactgaagcgatgtgaccacaaatcccatgagtttactgaaatgtctttaaagcaaacggcttgaatggatttctcccacccttctctccactgaggcgctcactggaaaacagcagctcacaaggtagagacttggggctgctggggcctgatggaaacaaagtctcagctgcaaagccaggcaagaggcactgggataaaggcagctctgggcaggagatgaaaaatgacatcgaaccacgggcagggcaaaggtgatggaggagggctcgtgggaggccagtatcagatccagaaacgctcggatactctcaagccctcgactactggtggctttcccagcaccacgggtctccctctttcctgttcct

SEQ ID NO: 32150 - DNA, 1418 bp, Bovine  19866880661311
  misc_feature (1)..(1): n is a, c, g, or t
nctggagtgctgatcctgtgtggccctgggcaaggttcccaccttctcagggccagtatctccttcacaattaagtgtggaggtggccaggacccggttggtggcttttctgaaagttgcagccatgggaggacagtttaaattgggcatgggggtgtgaggagctccggctggagctggaggggtggctgtggggtttccccctttcccagggcgctgtgcgtcccccaacccccaggactgatccagccccaactcctgccaggcctccaatccaggccagtttgagagtgatagcgaggtgctgtggcagcgggcgcaggtgccggacacggtcttccaccatggccgtgtaggcatcaacacggaccggcccgatgaggcgctggtggtgcacggcaacgtcaaggtcatgggctcgctcatgcacccctcggacctgcgggcgaaggagcacgtgcaggaggtgggggcaggaccgggggcggggactccctaagcggggaggagccgatggctggggcggggctatcttgtgggcggggctccagggaaaggccttggaggaggttggccctgggtctctggatcccccacactggtggtagcagggtctaccccctccacactcctgccaccggatgggcccaggaggggagaggttcagttgggccctggctcccgcgcaggtggacaccaccgagcagctgaagaggatctcgcgcatgcggctggtgcactacaggtacaagccggagtttgccgccactgccggcatcgaagccgctgcgccagaaacgggtaaagatctaggggctggggtctggcatctggtaaccccgagccctgtccctgtcctctgggaactctgcttccaagaacccctttcctcgactcatggaaccccgcccctgggaatcccggccctctgggagacctttcccctcgccctgagcccctgcactttgacactggacgtctggcacttgtggtgccgggatccccgctcctcttccctgcatgaatcttgcctttattctcctggatctctgtcccctttcccttgtggtccttacttctgagaatctgcccctacccgcacctacccctcggaaccccacaccttggtccctggaactgccaccctgctccagggctccctggatctcagatctctagctcccagaatttcaccctcaccagtcccagcccctgcctacattatggtgctgtgggcacaccttcctccaacacacacttggcttgtccctccccaggtgtcatcgctcatgaggtgaaggagatcctgcccgaggccgtgaaggacacgggagacgtggtctttgccaatgggaaaaccatagagaacttcctggtggtgaacaaggtctctgggtgggggaactggaaggagccca

SEQ ID NO: 32151 - DNA, 1748 bp, Bovine  19866880671230
  misc_feature (1)..(1): n is a, c, g, or t
ntgggatctcatgtgctcgtagccggacatccttcctaatgcctaacgtcagtccctctggctgcaggctttccattcccctgaaccaccgagaggcactgacgtgcaactggccttcccaggagctcctcgtgatctgcctgtctggagcctggagaagccaccgggacccccacgcgcggaaaggggagctcacccagcacgaaggagatggggatgagctggatgtagctgtcgcaatacagagtcagcttctcaaaaatcacttgctgttcatctgtgagggccatcctgggggagggagggggttggggtaaagatgtgtagacactaggaggagatggctgagacccgtcccaggtccggccagtcccaggataagacagtgatagcctcatttcctccctgtctctcattggcctgcctggggcccctcctctggcctgagctgggtccctcttctttctcccaaagcccccaaaccccaaaggggcctctgctccatccctggaggagaaaccctcaggaggttttctctgaggtcaaggaaggtaggtcctgctgaaggagtcagttttaggcactgccgacccttttaaaggatccaaaagacagttgtttgaaagcaggttgagggacttccctggtggtccagtggctaagacttccacctcccaatacaggggcccaggttcgattcctggtctgtacgacactgtaatggtggatgcaagtcatcacacatttgtccaaacccatagagtgtacatcaccaaggaggaaccctaacgtaaactatggactttgggtgataatgaggtgtcagtgtgggttcatctattatcacagacatcccactctctggtaggatgttgatagtggggaaggctgtatgtgtggcaggagggggtggggtacatgcgaattctgtaccttctgctcagtcttgctactaccgtaaaactgctctaaaaaataaagcctaattttctaaagtatattggtgccctagtaatggcaccccactccagtactcttgcctggaaaatcccatggatggaggagcctggtaggctgcagtccatggggtcgagaagagtaggacatgactgagtgacttcactttcacttttcactttcctgcattggagaaggaaatggcaacccactccagtgttcttgcctggagaatcccagggatgggggaacctggtggctgccgtctatggggtcacacagagttggacacgactgaagtgacttagcagcagcagtaacaaccaaagaaaacaaatgtgctctgttattagtattatccttatgaactcaagaaatttatgtatttggtatttttcaattcattgtcatcattaatgcttttcttattaaaaatgctattatatattttgtagttttattgaccacagaatatattgctatattgcttaaataagtgtttgtattggggaaaaaaaagagcatggtctgggcctgtgagagaaaccatgtgggattcaggaaaaccggctaactggatgggaccagataagggccctccctgggatggaggaaagggtttctgagatgctctgacctgtactgcgtttccctcccaggctgtctcctttcttctccccagcccccaggtccccagcccctggccctagggcttttccacaagcttagcgcagccttataggtctctgtgcattggcctcctagatcgctgaggtccttggagctccaag

SEQ ID NO: 32152 - DNA, 1716 bp, Bovine  19866880688350
  misc_feature (1)..(1): n is a, c, g, or t
ncgcaacgggggataagggaggtcatgtcccccagtccagggcttgcggagggataacaaattgctaacgacccccccagccccgccggccgcccgcgcagactcacttgactgcaccgcgtctccttaactgctgttgcgatccaagtccggcgaccctcccaacacaaatcccagccggcccaagccccacggctcccggcctccaaggcttgcggctgcagtgaacaaacggggcggtacagcgcgggccaaacctacgattttcaaaactgaaggttcgaccaatccccgtcaagtttgtctgggcggctgcaaaactctaagccaatcaagtaaaaggaagcaccagtcaggccatcgattggctacgtggattggcagtctaccggactaagaggaagggagaggaagcgttgaaactttaacctgtacagcttccgggaacagcggcgcgcggcctagagaggagatcgctcgaggtgggggttgcgcgcgcaagacctcacacgccagaactacaagtcccagcgtgcattgcgagtgccctgagggacctggaagatcggtgaggccttatttgtggatagtgctcttttcgggagtcttcactttgccatttcttcacccaactgtgtcctcaatatgggccgacctcagccattttacagaaataatatatacgatgatgtttcttaatgatttcaacttaaaattacaaagcaagacagcaagatttataatacagagaaattgtttccataacaattaacactgtctgagtcacaagtgaagccaaattgcttatatgctttccatgctgtcaaaggttaaattaagaatccacatttccatttccacacaaattgccaacctcaaactgcagttccagcatactttttcagactttgatgcaaatgcagaggaaatttccattatttcataatccatttaactctgttattcaggactttccacttaatctccaactggaagtcattaatctgcaatgcgatgacctgctaaaaggcaaatatcaagagaagaagctaacaattctacacatacctttctggtgatagttaagtcgttaagtcgtgttggactctcctgagactccatggactatagctgaccctgtggactgtagctcaccaggctcctctgtccatgggattctccaggcaagaatactggagtgggttgccatttccttctccaggggacattccccacccagtgatggaaccctggccgaccactgaaggcagattccttactaactgagcccactcagttcagttcagtcactcagtcgtgtccgactctttgcgacccgctggactgcaggcacgccaaggccttcctgtccatcactaactcctggagtttacccaaactcatgtccattgagttggtgatgccatccaaccacctcatcctctgtcgtccccttctcctcctgccctcaatcttacccagcatgagggtcttttctaatgagtcagccctttgcatcaggtggccaaagtattggagttttagcttcaacatcagtccttctagtgaacattcaggaatgatttcctttaggatgtactggttggatctccttgaagtccaagggactctaaagagtctcctctaacactacagttcaaaagaataaaatcttggactctcatcgttctttacagtccaactctcacatccata

SEQ ID NO: 32153 - DNA, 1068 bp, Bovine  19866880708159
  misc_feature (1)..(1): n is a, c, g, or t
naggtgggggacaaaggctactcatccccctagcaggcagagggggcgggaagaggaaccgggagctgggggagctagaaggtggggaggggagggatgaggaagtgcttctaatcagtgagctgggagaggcaccagctggaaaggctccatgaggatggggaggccccagtccagcctgccccccatcctgcccaccctcaccttgctggccaccttggggggcctcttcttgtgggggacgctgcctgcccggctgaactggctccctgcatggctgcagcaagaggaccaggtcagaggtgcccctgggaagggggtcaggccctcccccggcctgcgcccccacctgaaggcgcccgagctgccggtggacttgaggctgtcgagacgccgcagcttggccagcttgtggctccagcgctccagctcgtcgatgcgcgtctccaggttgtccgtcagcttgcacagctccttcacggcacccacgttctccatgaagatgcgctcctgccgcaggcgatggccagtgtcgagggcacagtcagcccctgggggccccaggccatgggcccatggggagcaggagggagccctcgaagccccacccaggccagcctcacctctcgtccagcctcagctccccctgttccctgttccctgctccctgttcctgcctctgaacaccatcccacctctgcacctttccccacccgtgttcagaacccgtggtcctcagagcctctcgcctccatctccccctttgatggacgcagtgtctaagacttcagcagaggccaagacctaggacatgctcactggcacccagcgtcatgccaggaaagttacaaacatcatcctcaacaaaccacgtgtttaaactttgccataaccctatgacagaggatgagatggctggattgcatcaccgactcaatggacatgaatttgagcaaattctgggagatggcgaaggacagggaagcctgaagtgctgcagtccatgggtcacaaagagtcggacatgactgagccactgaacaacaaaacaacatgagacgttctcag

SEQ ID NO: 32154 - DNA, 1286 bp, Bovine  19866880760025
  misc_feature (1)..(1): n is a, c, g, or t
naaatctgtggctgcctcctacatgctgtttgataagcttttattgtcacctccctctggtgctgtatccccaggtcctggggcagcttgtttgccaggaaccaggatgctgccaggtcagggggcaggggcagtgggtggcacagagccctggctgggagccactacccagctgtgttcctttgagcacaaggcttgccctttctggtctcacctggaaacagctctccataatgtgacccggcttctctgtctagcagccctttcgccagtccactcctgggtgcagccccaagtctgagacaaagtaacccattcttgggtcactaagccagccctcccacccccagccctaacccttggcccaagcaatcattccaggatcctcccatctcttccgggcagagtctcctagaatcccttcttcattgctgcccctctgttttctgagctcccagcacaccctgtctaggctcaccctggacagtgtcttgggccactgtgcatgtgggtgctccacggagctggggctgaatgccctacacaagcctgggacatagttgatcgctatagatgtccattcagtcgttaaacaaacatcgcttggggcaaactataccccgctccgtgctgggtagtggatatggatattaaaagctaataaggcaccgctccttaccctcaaggagctccaagtctgctgctgagaaacacagctacatagcaggtgattcgcgcactagcaggggaagcccaggaagcagttgggagcacacaacagggtgtacttgaccctgggaaagccaaggaaggctccctggaggaggcaacatcgaaactgacttgaagaatcagtagaagttagctagtggagggaaggatttctggaagagggagcagctgaggcagagtctggagtatagaggaagcgtggttcattctggaaactaagtatttcggctagcctcctgattgcctggctctttcccacccctctaatatcaacaaaagaaagatcattctctcccatggattgagtttcccaaattcctctccctgcttgaagagaccaggggactcccaagaggctgaccattggccccaagccccctgagctgccagtcacttctccactctgagcttcagctgcctcatctgttaaatgggctggggccctccggcccacatggttaatattttgagagacccaaaggaaaacagagcaggcacagtcctttcctggcctggccagggggtgcagcccggattggggactgaatctgcag

SEQ ID NO: 32155 - DNA, 1236 bp, Bovine  19866880782350
  misc_feature (1)..(1): n is a, c, g, or t
nagcccactggtcacagggcaccccccccttcccaggagcgtccagaggtccgatgcagagttggctcaagactcaagctgccagcccatgagcacaatgggctcctgacacccacagctgctgagccctcggagtcacaagtgggtacctgccctcctggggggctccaggccctgctcacctcgggcccagctggggatgggcttccggggatgggcctcgtcatcggtggagtcatcactgtttagatccatcccgtagtcatccgcattgatcttggggggggccctgtgcccctgaggggtcatctgatacgaggtacaagctggagactggaaaagatgaacatggctactggctgcccgccctgcatgctggcctctcctgaagctgagaagcaccaggctctggccacctcccctcatttcacagggaaaagaaagaaaaaggttcaggggtcgctttttgattgggggaaaaaaaaaaccatgccacatacatgactcttgtgtcttcctttttcatgtaaaagtgtgttacaaacgttcttccgggtcagtgtgtgtgtgtgtgtatgtgtcctttgaatggctgcagggcgctgcactgggagcgccatggtttgtaatttaaccacccggttcagcgaccgtccaagttttcagcatcctaaactatattgcaacgaaaacctttcctcacactatatccgtctgtaacagcattaacagcctaaatgcttgtcgggaagggctgattaaagaaactctggtaccaactaagtggaacacagccagcaaaggaaattaataaatggtgaaacaggcgtgtacaatacattaaacacgcaaaaaaaggaggggaaacaggcgtgtacaatacattaaacacgcacaaaaaaggaggggaaacaggcgtgtacaacacattaaacacgcaaaaaaaggaggggaaacaggcgtgtacaacacattaaacacgcaaaaaaaggaggggaaacaggcgtgtacaatacattaaacaccaaaaaaaggaggggaaacaggcgtgtacaacacattaaacacgcaaaaaaaggaggggaaacaggcgtgtacaacacattaaacaagcaaaaaaaggaggggaaacaggcgtgtacaacacattaaacatgcaaaaaaaggaggggaaacaggcgtgtacaacacattaaacacgcaaaaaaaggaggggaaacaggcgtgtacaacaca

SEQ ID NO: 32156 - DNA, 1305 bp, Bovine  19866880811709
  misc_feature (1)..(1): n is a, c, g, or t
ncaagcagcttgcttgcattagccataaactagacattattttacccatatcatcttgataaagttgatgagggttggttttggttcctcttcctgccgcatgaatcatttatagattttcctgccaggctaacttcaatccgctcacgtgttgagggtgtaaaactgcagctttcctacagatccatcagtttaggctatatattgacacggcaagggcaagtccttggattctgcagtgttgcaatgattctgcaatgttgattctgcaacgatggccatgtttagtaataactactcctcttcagcttcctttaagaataaatctaactgagatttctctggtggtccagtaattaagattccacactcccaatgctgggggcaggggttcgatacctggtctggaaactaagatcttgcaagtcacatggggtggccaaaaaataaatagtaattgttcttttggttgcaggttgtgggagtaatatatttgtttttaaaaaatttctcccagattcacagtttagtttataacatgatcaggaaatggggtctttcctctgggcttttcaaaagtacgaatgctaaaagtaatatagtgctaataatacatttcttgcttttaacttgtttggctttattgagatacattttacatttcttatttaaaaaaatttttttttactgtatttaattttaaaaacctatttatttatttggccgcgagagatcttagctgcagcatgcacgatctttagctgtggcgtgtgggatctagttcccagaccagggattgaacctgggtcccctgcctttggagtgtggagtgttagccactggaccatcaggaaggttccatgcacattacattttcactttatacagtttgtgcataatgcttctcaaactcaggaagcttctattcattacactggcctccttgcatttcagagtttagcatattcatagtgaaaaaggctgatcatataattatatatttatctaactagggctggacgcacttctcctcatcctctttcttcaaatgtaaaaatccttcttagcttgaggtctgttcaaagataagccacggccccagtgtggccaggcagaaaagaaaaaaaagacaaaaaagaatcccatgacattctttcatttctctaatttttttctgctttcccgaaacatgagtcacacagatatgtgctctttctgtggctgtgatcagttcatcttgcattctgctcttttaaaactgaatgtacatttctgtgtgctgacagctcgaattcttgggatcgc

SEQ ID NO: 32157 - DNA, 1402 bp, Bovine  19866880892720
  misc_feature (1)..(1): n is a, c, g, or t
ngggaccctgcgggcaggggtttgggcttccggcaggaagttcttagaaagcttggaaacccagagggcgctgcatccagagaagtccctcatcaagacatccctgggtcctggccgccaggaggcaggtctggggggctccctcccaggtccttagagactcggcccattggaggagaacgttagtctcttctggcacatggtgggttggccatcctgcgccttctcctgggtccctcttcctggagatctggggaatagccaccaaggctttggggtccagttcaggggcctttccttggagaatcagtccagaaggcgccaaggggcaaagagagagagagagagacagaaagtgcaggaagctggcaaggtctgtagagagcctggcaggactcgagggacctgtgtccacagtcagggtggtctggaggaatcgtgccctgaggaaggctcagttcagatggcctaggaatcatcatgtgggcagcagcgtggggccagaggtcaaggggtgacgtcttccaggccagcttctctcagagaaccgctgggcggttgttgggctgcctgccctttccaggggtgaaaagtgcccctctgcccctctagtccattgcagtttgtaggtttttctgggtgcttggctgagctccccctgctttggcttctcaactgaacacagggagagcgattctcagaagcggcaggcaagccaccaagggaaagatggccagcctgatgggacgtcccagagggtgggagtcctgggccaggaggtctcccgcttcaaccaccgtccaagagcacgaagaggttggtcgccctggagagttgctggagaggtcgtcataaaggcgagtgatacatgacaacagaggggaaggggcgggggtcttagaaagtgggggaaggccgtggggtctggagccggtggatgctgacttctttgtctttgcatcttcgtcctggccacggctgctccaggctgacacctgcaccggcatctaactttcggaaagaacgcccccctttcctcaggacgaatcctcgttttttcctttgttccctgcccactggtactgtttcacagttggtaaaattccatttgactgcctggaagctggttgtgctgggggaagtcaaacccaacgaaaacaacatgtttttccctggttaatgcatttttcagatactccttttgctcttcttaaaaacaaaacggctgctctgcataagttcctggtttgtcattctccatggcatcgcaggccgcagaggcacgagtgaagggcaagaggaagagatgtggggagaagctggcggtgttgagggggggtggtcacatcctggaagcaggaggaacgccttctccctgcaagaggtagtgggatttgggggg

SEQ ID NO: 32158 - DNA, 1848 bp, Bovine  19866880947772
  misc_feature (1)..(1): n is a, c, g, or t
ncccagcagccacacagagaacatggacagctgccccctctcctgggcagtgctgggagagttgctgaggctggcttggggtggaggactctggatacttaccaggtctgcagaagagagtcagggtgaccaggacgatggcgatggtgagcttcatggtgggcaggaggctggtgggggaggctctggccctgtctctggatctggtctcatgggtgatgtgcccactgggataccttcttatactctcttgcagtggggagggcagggcatgggatccacttacgggatcacattgtttacttgggcatcagctcggtggaaaaagtaaatattctcgtttctcaacccagtttctgtccccagtgaaacagagctcacacaatgggccacctgggcgaggggaaccagagtctaacgtggaggcagtgagagtgcctgagtcataggttttggagagctggccgcctttgcttctcccttcggacctgagtgctgggcagtgcagatggacagacagcagagcccgcctgatcctatcgtcccaggagaaactgaggcccaaggccccgtaccagtggcggtgacaggactaagactggggtttcctgatactccaatgggctctgctccaaggaagtggctggacttcaagcctctggagtcatgcggtccagagtgtcttgtggtcagacttgggcgagaccctggactgaagcacgttgacagattaagttctccagaaacctaatgcccaggtcgggttggaggacgcactgtgccagccgggtctggagtcctgccttcctgatgacaaatccatgggcgcttcaggcctcatagcacttgacctcttcatggccttaacctctcaccatttccttcttggattgttctctctcctgtgctcccacgactctctgctttcctgttttcctccctggccatccttgttctttgaatgttgattctttattgaccgagctcctgtgttggtggctccaggctgtgaccgtggccccttctgacaccatgtcagtggcagcctcctttcttctccaaagcctgtgccttagaacacaggcctccccgactcagagtcacctcctaaatggccttctgcctcctggctcttcctccttggccatcctgggaaaggccactagaatgatctgtctaaagtctgcttatcgtatcctcctccttcttgaaacacttttaaagctgccttgggcggatgcgataaaattcaagtgcaacttatgaggcccttgtccactggcccttgcttaccatttgaatctcattcctctgctctcctgcgtggaatcttttttcttttttttcccagaataaattcgataacagaattgtggacttttcagtttacttatcaaactgctgctgctgctgctgctaggtcacttcagtcgtgtccaactctgtgcgaccccatagacggcagcccaccaggctcctctgtccctgggattctccaggcgagaacactgaagtgggttgccatttccttctccaatgcatgaaagtgaaaagtgaaagtgaagtcgctcagttgtgtccgactcttagcgaccccatggattgcagcctaccaggctcctccatccatgggattttccaggcaagagtactggagtgggttgccattgtcttctccaaactactagaaaatttaattttacataatttataaagtctccacatcactatcctaaacttcatttaattttcacttaagtttctgttttaaatttatttttacttgattgatcaatactttacagtattggtttgatttctgtcatacatcaacatgaattaaccata

SEQ ID NO: 32159 - DNA, 923 bp, Bovine  19866880976462
  misc_feature (1)..(1): n is a, c, g, or t
nttcctttgagggcacctttcttttgctttgtattcttttataaagttcaatttctttttttttttgaactactttctactttcagaataaagaacaatacatatatcaaaaatagtggggggagaaaaaaacacttgggccaattgtatccttcctgtttctcatgaaggaaagtgaaggtcgctcagtcgtgttcaactttttgcgaccccatggactgtacagtccatggaattctccaggccagaatactggagtgggtagcctttcccttctccaggggattttcccaacccagggatcgaacccaggtctccctcattacaggtggattctttaccagttgagccacaagggaagcccccctctttctcatggtcctaatatactcagcctgtgcctccagctcctgggaagagaatcatcagagacagagggccctctccaccctgacgcccagggctcacctgcacgtccacggtcacattcaggctattgctggcagccgcggcctccttggccttcttctcctgttcctcctgtagccgctgctcagccaggcgctgctgctcttcctggggcccggagacagcaggaggcaggatgtcacagaccaggggagtgcactcccctcctctgcgccaaccccagcacagccaggcgggcacagcagctcctgcccgaaccactggagccaggcggccccagcccagagctcagtgcagagcccatgggagccacacacccagccccccgttacctttctcttcttctcctccagctcccgctgcagccgctccttctgtaaccgcaaggccttctctctctcctgcagctccctgaggaccaagacagagcaggtcagggcgggaagccgagcccctgttccgtccctgccagggaagccaggccccctggccca

SEQ ID NO: 32160 - DNA, 1726 bp, Bovine  19866881131318
  misc_feature (1)..(1): n is a, c, g, or t
ncgttttctgtatttaaaaatttcttaaaaaaaaacaaacaacacaatggatttggaggtgggtgggacagttctagctcctgaccagaattggagaaactgtttcagggggcctgaggggcctggcctttggacatttttccagcacgtgtgggcagaggggctggctggggtctgggtgaattcctggagctgtcagagcccctcctggctcccaggtttcagtttcctgcctttcgggggagtgggaaaaggctgagaggccccgtgctggggctgaagctaattcattagtgacgcctcgacaagggctgggcgcccgcagcgccggcgtgattcatcaacacgattgccccgctgccagcctgcgtgggcccagaacgacagcgcgctttacctttccccactgagaagggcctggtgggaggcgaggtacagcatctaccgagagcaagaaagaaagaagagggctggtcccctgtacccttgagcccaggaagctctgccaaggccggggctggggtggcaggggcttgggtgtcctgccagtgctggcagagcccaagagggctgcctggtgctgcagtgccagccccgagcatgtggtgaggggggttggctgggccccctcctccgcagcaaatgttcccttggggaagctgctggcgggggtgggggtggcaccaggaggtggggtggatggggaggcgctctttcctgtcccagatgcctggctgggttttcctcagctttctggtctctgaggtgtcagctcttcccagaagttctcccaaatgagtagaagggagagagttggtttggggcttaggggagatccagaaggagcttgaaatcctgctgcctggggctcagaatcctcctccatcccagatctggtatctcagccctacttatcctctgcctggttcctctactcagctcggatcttgttagtcttcattccagggcagctagctcctggctcagagcaacacctgcctctgtgttctccatcatctgtttgccccgtgacatccctcagctgattacaactgctattgctctgcccttctgttcccttatccaacacatagatatcaagcatctgagcaaaagatgccaggaccaaaaaaaaaaaaaaaaaaggtacacacggaataattctatttatatgaaattcaagagcaggcaaacctgatccatgatgatagaggtcaggatcaccgttgcctctgggagatggggattgtctggaagaggcaggtaggagggaactctgagtgatggaaatattacacggtgtttacatttgtcagaactcaccaaaccgtatacttatggcctaggcatttcacagtatgtaaggtttgccttcatcttttaaaatgttgacaattctcattgaaccaccactatgtgccagaccctgtgccagcagggaaggagacaagcgtgcctgccccacccagcttatatttcagggcttgtggtttgcatccttttcttgcatcagccactgctgtctgcccttggactggcctcctgccctgcctgtagtgggaaaaaatgggatgggtcaaagggcaagatgcagtctagaggtctgtcccatcagccaattatctttttttttaatttactatttcatttatttggctgtgccaggtcttagttgcagcatgcaaactcgtagttgcagcatgtgggatctagttcccagaacagg

SEQ ID NO: 32161 - DNA, 1005 bp, Bovine  19866881143548
  misc_feature (1)..(1): n is a, c, g, or t
ntggccctcacagtgtatagccccaatctgccctttcggccggccctgattcttgtcccacacaccagccagcagcctctgcccctcacttgtgcccacaggtggaggggttggtcttggggttgagagagaagacctgctgtgccaaggccccctggcccgtggggtgttctccacactccttaggaatgacgtacccggcagagctgctgtaggggggagcagagtccgctagcaggtggacagacagaggagactttaagtactactatccccaaggacaagttcagggagggctggggccagagctggcggccctcaggacctgaactctctcccagagcgaccgcaccagcccaggctttccttctctggccttgctcactcgctcaccgcaaggtcacctatccctgcctccctctctgctgccgtcctgcctgcccactgcaacgctgacccctgtgggccggccaaggccctgccctgccaggggacagggacacagagcggccaggccagcccagcttcgggatgaacagaagatggaggccgtgggccgggagagggctgcctgtctacgggaaggtggaggagagcttgcaggcctggctgggaggggggaggcggggcagagtttggagcaggaatgatggaggtgtggggtggggggctggtcttccttcttcactgggctcgggctttgccccacagttccgttgcttcagccaaggaagagaattcagatccggaagagaatggcctgtgggccaggggcccacacaggcttgcctgtcccctgttggggtaatggtcttagcagtaggctgagccatgtggggacttgcagagggcatggattacaggagagagtaccacagggaccttctggaaccagccgggggcagtggggagcatgagaggacaggagacaaagatctttttttgaaaggattgggccgcaggtgttccacgcagtgggatgaagtgatgaggatgtaaaaggtc

SEQ ID NO: 32162 - DNA, 1481 bp, Bovine  19866881207269
  misc_feature (1)..(1): n is a, c, g, or t
ngaatgggaatttggtggaagctaaagtggcatttcattgggagggagggcaagaatgggttcaaatgatgttgaaacaattgatagtcatgtgggggaaaatgactcagtatttcaaaatatgttctagatggattaaagatccaagccttaaaacaaaccctataatgtcaccagaagactatatagaggattatcttttagaacttgggcgtagggagtgttcttctgaggctgtcataagaaagaagccagttggcagatttgactacttgaaaaactgggcggctgactggtttggtgatgtggatggtggaacattctgggctacaggaggggccaaggtcacccccactcccaccgcacctcaccccagcctccacggagaggcgatgacagaggaagaaggaccaactattgaacgcaaagcaaaaagaccaagtctttggaaaagaaagaatctgccaaactagagaaaacaaaagacacctcaagttcctgaaagagcttcaaaaagtaacagggttgcagagcagaatgttacaagagtgccttggttatctggtgcatttaattacaggaaagagatgaattcagaacagaactgggctctgcaagcaggagtgaaggggaaagtaacaaatccaaaatttctgggacttgtagtatttaagatagatctctgtttttttcaattagtaaaaaataaaatcaagaaatactttgagtaacaaaggctgattaagatgaatcctcctggcagtgaccaaatcaaggtcatggatgtcacatagtttggtaaaatgtcttgaatggatcaagggtagttgcaaggaagttctttcagttggaccaagcacccagggaaagagaacaaagggtgtgattccaccaaagcttgatgaattcaaaatatgtggagttatatctttgaggaggcacacctagaaaaatattctgaatctaggaatatgaagctgactggtaccaagcaggttaagagccaacaaaattcttttctttgcaaaaatgagtgatttttcattttaaaaaaattaaggtataattaacataaataaaatgcagaatcttgggtgtttcattaaatgtgttttgacatttgaatacagctgaaacaagatgcagaacattttcattatcccagaaattcccctttgaacccctttccagtagatttcccccacttccctcaaaaccaccactcttctgatattttccaatattgattaattaactttgcatgttctagaatttcacttaaatgaaatcatacaattataaaaatgaaaagctgtaagacaaaagatgccatgttgttgtatagtcactaagtcatgtcagactcaggggctggcagctcacctggctcctctgtccatgggatttcctagacaagaacattggagtggattgccatttccttctccaggagatcttccagacccaggggcgaacccaga

SEQ ID NO: 32163 - DNA, 1241 bp, Bovine  19866881329897
  misc_feature (1)..(1): n is a, c, g, or t
nctaaaaagtgcttagtgcactgcctgggaagatccccctggaggagggcgtggcaacccattccagtgttcttgcctggagaatcccatggacagaggagcctggtaaggcttcatacagtccatagggtcacaaagggttggacgcaactgaggggacagcacacacacacgcactgcctggcgcccagtaagtgctgaagacatagaagaaaccatcgtttcctgttcttttttcctcctacaatgcccagcacaatttcagccaatggttagtgcttgcttgcggagctgaacctcagcaatcttctggaacagtggagacacgctactctgacctgcccgtacatctcagcaacgactctaattctctatgactcaaggcaagtcaatttctgcctctacactttggtttctttgtctacagcctgtgaaactgcttacatgcccatttgacagatgagaaagctgaggctcctgactcgtggggaatgcctaacagcaccttgtgctctcacagccagtgcagtcccccttcaaggccgctcttccccctcctctgccaattagccccactcctgagctggtgggttggggggtgtggatggggtctatgcctcacctggtggacctcagggggacacagtccatggggatggggtaactcggagatcccggggttctccccagtgctgtgatgagtcctctcacttcgcatcagtagttgggccggctctggcctattccatgctattccattgtcattagcaggacggagcttggtaaagctggatctgagtatgtcccagcctctctgcctctcctggtccctgttgtcttcctgcagtagccagagctcatgtgttcatatctgtgactgtggagtctgtttgacccttcagggatcagggctgctgtctccagggtggaggtgtcgtcaactgtcttgcttccaggccccaggctggcaggatccctccactcccctgtccagctgtgccaagacctcacctttcctttcttggcttctgccctgttcgtacagtgattggcccaagaaaggggtatgggctggcaggtgccctacacagagcctggaggcagcatccaggcctggctgacccacctcagggccccctgccagtgtccccagccaagctgggtcccctccttcctgcccagctgagacagggcctggaagggcacagtggcaggccctctgtgatgttcctgttgccacg

SEQ ID NO: 32164 - DNA, 722 bp, Bovine  19866881362159
  misc_feature (1)..(1): n is a, c, g, or t
ntcagcgctcaggctgctcattcggtgtcgttaccgcatgcccttcccccaagccaccgcgcctagcccagtcacgaggggacactcacaaggctgccagcgcccgctgccacctcccggggtgaggcggccacatgcacctggatcctccccaccaggggaagaccactgcctgacttcttccgtccagtgtagcaggagggcgtgttgggggctcttgatcctcttggccatggtgaacccccttaaaacaactcacgggctggccctccaagtgagaatgcagccatttccatgaaaacaacagcccgagggctccctgagagctgggctctggcccctccctccgccagctgtgcagagtgtttggacaactggatggaatatttggcagggagagtcttccccggatctctgagctcagatttcaagaggaggggaaagagaggatgctggctccagaaagaggctcaagaggtcatttgtgggcttggaggccccccacccaggcctgaccaatactgccaccagcccagccccctgtgtggtggggagctggagtcaggcccctgggggaaggacgggacagagggtggaggcagcagaatggtgtcagaggtttgctggggccagttgggtgaagtcaggcccaggggacagtctgggctcagggagtggcagggccaggacagcgttttgatcccacgaccatgatctgtttg

SEQ ID NO: 32165 - DNA, 1877 bp, Bovine  19866881383372
  misc_feature (1)..(1): n is a, c, g, or t
ntgatggggcaatcagaggcccttaccccttcctctttccttggaaggcgccctccatttgccttcctgcaccagaaactgtccaaagacatagccttgagacgtggtattgagatcatctggatggtatgcatggctgaacctagataaggcctctaaataaacttttcagattctggtgggcacgaacagagggctacttatccagcaagacaagcctctagtgtatgttcccatgcttattagatctgccacctaccaatctggagtgatttgccttttcctgcagtctctccatggcctcactccctccattcaaatgacaccctgaagctccaaggttgccatgttttgtggggtaagcagtctattcccttaccccataaaaagatgtaataaaacagcctcttggtatgtgaaatccagaaagcagattaaagaagaaagggtgaataatgaattttaaaattctttaaagcaacttgttcagtcactaagtcttgtctgactctcttgcgaccccatggactccccagaggagcccagcaggctcctctgtccgtgggacttcccaggcaagagtactggagaggattgtcatttccttctccaggggatcttccccacccagggatggaaccagagtcttccgcattggcaggtggattccttacccctgagtcaccaggcaagccccaaagcaacttggtcaacaggtagaaaaactaagccttttcagcatattaggtaagagatccagcgactctttagaaaggttctgtttatctggcgtgggaagctgaacccggtgtggcgctggtcactagccgcggtgcacatttacctgcgttgaagtcgggatcgtcttccagcactgtcacggctccttccaccgcgtcaacggcgctccctccctgcttgaggatgttgtaacccacggtggcggctctgaggatgccctggcgcacccgctctttccggtctttggagatattgctggctccgccaccgtggaccacgacgacggggttcatggcgatggatcctaggggttaggaagacgaaagcgttctttcagacgggtccaagagaaccgcatggggcttatgtctcccgctggggacaaggtctggtttccactgctggacaggggcagtttttacaacctcaggcgaattcccgagacccagggagtccggcgagcagaagaggcggctgggtgtgaactttgcacgaaaagcccagggtgcccttccttgcccggcccggggcacctgcccgcctcgcagcagcagtgcgatgctccgcgccccctccttgcccgctgacatccggcctcagtttccccgaggaaccccggctcaaggcccgggccgggaaggggcggagatggcaccccttccagccacccacacctaccccgacccggggccgcagctccagccttcctcccgggccccacgtcgagcctcagtttcccgggggcctgtccgcgctcccacctgcgccgcggggccagggggaggcctgggggctagaactcgctagcgccctcccactatcggccccggcacccacgaggtgccttcccgggtctggggaggcggcttcccgcagggcccgtcgacttaccgagcacgccgcaggaggcggacgccggggattcaggctcgggcgagccgccctggcggcctcggaacctgcacaagcgggtttctccgcaaagctgctctggaaactgctccgccggcaaccgctcggcgggcaacggctctgcgcctgcgcacgagggcggggcagcgagccccgctgaattaccgcaaggcctcaacgcgcggcgggggagcaaggactcctgccctcgtagccagcgcgcg

SEQ ID NO: 32166 - DNA, 1081 bp, Bovine  19866881403496
  misc_feature (1)..(1): n is a, c, g, or t
natgctatacagtaggtcttttaaatcctatatgtaatctcagtagaaagaacagaaaaactaaaagagtacaagctactgcccttgatgatgctatatcttagaatgagcatgaaaaagaagacatgaatccactgtgggccaaggactccctgcttctgatggtgagagctgacagcatgtcctgtactctggggaaatttaaagaattttcagggaaaaatattgattctatgtaatatttatcttatggcttatgattatgatctaaccacagagtaaaatgcatttcccatagagtgaaaggggtttccctggtagctcagctggtaaagaatctacctgcaatgcaagagacctggattcaattcctggatcaggaaaatcccctggagaaggaataggctacccactccaggatttgccgggtttcccctggtggctcagacagtaaagaatccacctgcaatgcaagagacctgggttccatccctgggttgggaagatccccgggaggagggcatggcaatccactccagtattcttgcctggagaatcctatggacagagaagctggcaggctacagtctatggagtcacaaggagtcggacacgacagagcaactaagcacagcacagcacagaaagcccagtgaggtctgggtaggccaggggcacacttgacctctcccttaggggacgtgaagtttgggggaccatgcagtccatgcagtgagggactgggagagacctaccagaggctcccattttacagataaggaaagggaggtgcagagggaggaagagatcgcccaaggtgagcccaaaaggcagagctgagtgtagaacgtggggcgcacagctcccagtgtgggttgggcggttgttctggcgggggctctgggctgcgggagaatggctggccttgaccagtgagggtctgacctgtgcatgtcctctccaggggcgcccacccgcgatgtcctgctggtctctgccatcatcaccgtcagccttagcgtcactgtcgtcctctgcggcctctgccactggtgtcagcgcaaactggtgaggctcttaa

SEQ ID NO: 32167 - DNA, 797 bp, Bovine  19866881473900
  misc_feature (1)..(1): n is a, c, g, or t
ntggaggtgcaggggagccggcgggctgggggacccgtgtgtgatgtgcaggttgatggagcacccaggacccgggttgagggaggaggcagaccatggggggaatgaaggcagccagagatagggctgggggccctggagccttgagagggttctgggaggcacgggcagagtaggtggggccctggagtcactctgaggtgctgggagggcgtatatgggcgtgcgggcggagagagcacagcacccaggtgtaaaggagaaactatgaccacacccgggggctcctcccacctggactgcctgcgtgcccctccccagactcgaagcctggcacctacttgatggccttcttctcactgcgcccacgccctgagtctggcgtgcccaccgtctccaaggagttcttgtagcgtttgccctgtggagacagcaccggggtcagtcctgggagacagggcctggactctccctgcctccccagagcaaggtcccagcggggaggggagtggatgggagcccagcctcagcagcaagggccagggccaatgcctgagggtgccaccagccaggagtgccggcccccacccatccctgctccccggttggcagttcctaggctccatgccccgccctgttgacctgcaccacatccctgacccctggggacaaggcccctcccgcctgcctgtctcctggggctctggctcggctcccagaaacatatctccctctgccatggacagacggctctcaggcgcctggccacgtcacacgggccacgtcactgcccccag

SEQ ID NO: 32168 - DNA, 641 bp, Bovine  19866881485611
  misc_feature (1)..(1): n is a, c, g, or t
ngaatctgcctgcaatgcaggagacccggttccatccctaggccaggaagatcccctagagaaggaaatggcaacccactccggtatccttgcctggaaaattccacggacagaggagcctggtgggctacagtccatggggttgcaaagtcagacacgactgaatgagtaacacatggatgctcgtgtgtgtggagaggacaccgcagggaggtccggcttcaaagcctgacttggcccctcgctcagtaggcccctcggaacctcagtttccccatctgtgacatgaaaacagtcctacctacccacaggctcctagtgatgggagtaggaggcacctccccgggtccttcaaggctgccctggttgtggggggtggcggtgcaggaaaggtgctcatgagcctgagaccctggttgggggcggtgcggcgtcgggtgggagtagagacagcagcgtccccgccactgccccaacgcgggcctcaccaggcacctgtttcgtcccagggcttgggcgtgtgaggacccatttcttgccgaaatccgtccccagccctgggcaggctcgcctctgccttctgctccggcacagctgacgtgtgaaaagcaacagctttcgggccccggactccggttgcg

SEQ ID NO: 32169 - DNA, 1524 bp, Bovine  19866880372037
  misc_feature (1)..(1): n is a, c, g, or t
naaatacatatgaggaggaaagaatagagaccaagcccagggagacagggtaaatagaaatcaggaatacgatgcgtgtgtactaacagtgagggcttcccaggcggcgctagtggtgattcagctgccaatgcaggagactaaagagacgtggcttcgatcctagggttgggaagatcccctggagtaggaaatggcccctcactccagtattcttgtctggaaaattccatggtcagaagagcctggtgggctacagtcgtggggtcgcaaagagtcagacacaactcaacgactgagcacacacatctatataaaaataacttgaacataaaatagactacaagattatcttttctagagttggaagatgaatttagtaagtctggcatttttgcattaaaaagtatataatacatttgtgtgaaattagagtagattatcagtgttctttctgagtagtccagataattagaaaaagaagtgggcgggagggggaacccagtagaagtaagatttaattttatatgtaatcagaagaaatattctaagtaattcatcactaattcaaagagtcaagagaaatctaggaaaagtcctaggagacataattagctatgcagaggttgaaacatttgcaaaatgtcacagttataaattgtaactttttccctcatgagacctgaataatgtttcatccacaaatctcaaaagaattttcagcaagtctcaacaagaaatacttgcacttgataaaggagttttcacctcaacagaagagtctggctttggaaggtttgcttcttgttttttggaaagctttctggaagtctgccccttacactttctgggcttcacttcctctttatgaaaaatgggggaaccatgcctgtggccagttcacccccaagggcgctgcagagtgactggagtccatctgctcgcagtcctgggctgtgagagggctcagtcagcgccagcggccaattggttctgggctccgcttccgtggcctcggtgtgaggcctcctgcacgggaccgggggcaggactaggcaggactgaccctgcttcagggtgaccagccttacagataccctcagacacgggatgtgggacgagccctggtgaaaggtgagcgaatcccctgagaggaggctctgtggaggggctgatgtagggcctgctgagggcgggctgtcatcccgggggcagtgggcacggaccgcctccgtggcccaggctgtccctctgggggggtcacttggcttctcaggccttcggccccgcagtctgctggtgggttgatggtagcgtgggctgatgagtcatttgctcagaacagggcagaaaggggttagggcctggggcggggcctgggggtccagtggagacgcgcacgagcttggccttgcctctgcccctggggaggaggcatggagcaatgtgggtgcagtgaccgctcctgtccccaggccctgcccgcattggcccctcaggctccgggttggggagctcgtgggt

SEQ ID NO: 32170 - DNA, 2794 bp, Bovine  19866880392593
  misc_feature (1)..(1): n is a, c, g, or t
ntactcggtagaataatcgggaataatcgatacctttccactcttgtcctcagctttataacccaggtcatcacagaaacacttgagcatttttgctgttttctaagaaggtggggaaatgtgcaaagtgggaaaagtttaagaaagatgctgtcaagcgttactaaaaagtgctctggcgtgggagaccggggagattcttgggagggagaactcgcggcctccacagagaaccctctccctgtgtacagctcagggcccacgggggactgggaggagccggcaagggagtgggaggagcccgcgggggagtgggaggagctggtgagggagtgggaggagccggcggagggagtgggaggagcccgcggggggaatgggaaggaaccggcgagggagtgggaggagcccgcgggggagtgggaggagctggtgagggacagggaggagccagcgaggcgtcctaacttgctgtgttcctcctgtggccccggggtcgctgaccccgtcagtcccttgggcagagctgtcgccggagccccacgtgttgcggggacctcaggagtctggcttttcccttcggaaagcttgatggatggactctgtagatgctcgctgggggctgtggtaccagagcggagggcacagtcctctctttgtgaggcaggatcagcggaaaagaaaccaaaacccaaaaagcaacgacaaaataatatgtctgagtcacacaccctctttgcatttttttctgcttttgtttcctgctaatacagagaacataataagtcaggagtgggaaggttgctgtcctgtgactggtgtgtgttacttatgtgtaaaacgttcagttccttgctgtctggtatataattttgtttctttctttattcgttttttaagcagaggaatcttgtaaatgcaatggctggaaaaaccccaatccttcgcccacgccccccagagccgacctgcagcagatcatcgtcagcctgacggagtcctgccggagctgcagccatgccctcggtgagtcccgcacctccgggagaccaagcggtgtcccctgagactctgccctgctgggctcggcgggttagccagacttgtacacctcgcctctgaggaggccgcaacacgacccctgaacctcctggtgctgctgggaggcttctcgtgggaggcgaatcatgccccgtgtgccctcattcttctttttcttgaatttatcgcctgtgccgggtcttcgctgcggctcaggcttttcttgagctgtggcaagcagagcctgctctctgatcgcggttcgagagggcttcccatctggcggctcctctggatgggcttcagctgttgggctcaggagttgtgacactcgggcttagcccatctggcgcgcggcatcttctgggatccgggctcgcactgtgtgtcctgcgagcggattcttcgcattctccacagccgctttcatccctctttgtctccgctcacttttcccaagagctgggctgaccgctgacgggggcggggcaggggattgccaaatgggacaaaacgtggccgctgaactagttaggataatacgtagcatgtcctgattcactctgattttttttttttaattcttttctgattccctgaactttctgggagtgcttcattttatcttcatattctttaatttcctgggtctgctatctcttttcttccttggaattgtgtttggtaaatatttacttgtctcttccctttcaacgttcttatctgtccctgcaagctaatcactgtcagcctagccagactctgccgagttagttaccaggactgtggtaatatagtctgtgtcctgatactagttttaggacaaacattttctttttaaattatattctgtctgagtggataaaggttactgagtagttttccctagatattcaaattcagattcacaagggatcctggactgttgtccatacttttctgccttcagtcatccggtctcccgaagaatggcgccccggccacacagcctaatatacttttatcttttccacctgcccccttgtgaggggtgggtgctcttagccatcatctttctctcaagcttcccgctcatctcagatggagcatcagccttcgttagccagcagttaggtctagtttgaagtgtgattgtgtgttcagctagagagggtttcagtctgtatagaacaaagtaggaaatagtgcgatctcctcaggaagttaccacaccagagtgacctgaggaaaggaactggagacactcagttaccacaccagagtgacctgagaaaaggaactggagaaactcagttaccacaccagagtgacctgaggaaaggaactggagacactcagtctcatggggaggtgtaaatgcacctacagtcacatcaccgtgttgatttaactggtgtctcttctggctcttgaagcagccagtgcaaagcaaagaggccaagagtcacaggaccgtctttgcttgtaactcaccttttccacagtcatccctgagtgatgccctttagaattgcctcagggaatgtgacgcaatagagctcctcaaacactggacttgaactggacttggtattgattgggaaatcctattatccttcaccaattaacatttaaaaacagagtcttcttccttatttagctgagcagattgtctcctttccgagcacacaggaatgcccaaaggcagaaacagcctttctcaaagaaaagctgactttggtctctttttatatttcttaacaagctgtaaaaa

SEQ ID NO: 32171 - DNA, 2532 bp, Bovine  19866880392597
  misc_feature (1)..(1): n is a, c, g, or t
nccatgttatacttggaaacaaaaagataaaatggagaaatgaaagtatgttgccaatggaaaccaatgtgctaatggttaaagccattgatttccatgcggaactcatattgaaaagaacagataagttcatttattaggagttgggaaacttacattttgcacaaagtagagtcttccaaaaagcccctccttgcatttgggaatcagagcaattagcagagaaatcgggctgctctgctgggcttacggacattttctaacaaagcctagtgtgaatacgaaattcttaatcaacactccaagagcatgctcacatgggggcagtgtgcccagggtgcttggaggagctgctttgtttgagtgaagttccctcgtattaacagttggatatttgcagattaagtgcagacaatacttagacagtcaaaaaagtaattttttaatgctttcactagcagctgctgacagattatctggggatgttatccaggttccttcactgtagctgataaaacttcatgaaagaagcacatgaatttctatattattgttaattttgctagggaaagaatttgggaactctgttgctcttcttttatgggttgtgaatcagctagtctaggctttccttgctagacattgcttctgttgggacgaaacattttattataagcaattaattaagggaaaaccatgcaaaacaattattctagttgtctctctggcatccattctgtctcatttcattttgttggccaccgtgatccacgtctcctgcattgggctgtgaatagccaaagtcaccagggttatctgatgtcccccgctataaagattggtcagagtcagaattcctgatctgtaatcaattcctttgattacaggagttggccacagggatgatccatttagagtaaagtttaggggttttgttctattgttatgggaaactataaagcctgaatacgtttgagaaagaattgtagctcctgtcttatttagcagtgctcctagttgatgaaaaaagccaccttcaagataccagttgatcatggtgtatgattctttgaatgtattgttgaattccatgagctagctttttgctgagaaattttgcatctatgttcattagggatttgatctgtaatttcttttttggtaaagtaatgtctctgctttttaatatgctgtctaggttggtcatagcttttcttccaaggagcaagtgtcttttaatttctgtggctgcagtcaccatccgcagtgattttggagcccaagaaaataaagtcagtcactgtttctccatctatttgtcataaagtgatgggaccagagtgccatgatcttaattttctgaaagttgagttttaatccaatttctcctctcctctttcattttcaagaggctctttagttcctctttgctttctgccataagggtggtgtcatctgcatatctgaagttattgatatttctcccagcaatcttgattccagcttgtgcttcatccagcctgacatttcgcatgatgtactctgctgtaagttaaataagcagggtgacaatatacagccttgacttcttcctttcccaatttggaaccagtctgttgttccatgtccagttctaactgttgcttcttgatctccataacctataaatgtatatatgttattactttaggttgatgatctcttaagatcaaacacattctaaaaaaactgcatttctatatctccccccatgtttaacgttttcaatataatattttacatctttttattttgtgttaccccttaactaattattgtgtctatatataattttactggtggcactagtggtaaagaacccacctgccaatgcaggagtcgtaagagatgtgggttcgatccatgggtctggaggatttcctggaggagggcatggaaacccactcatgtattcttgcctggaaaatctcatggacagaggagcctggcgggctacagtccatagtatcgcagagtcagacacgactgaagcaactcagcatgcatgcatagttgtattacttttgtcttttagctattctactagttttatgggtggttgatctactatctttactgtatgtttgccttcaccaatgagatttttctttttgtaattttcctgtttctagttgtggccttttttttactattattacagaggtccctttaacgtttcttataaaaccaatttaggggtgcattagctctttcagtttttgcttgtctataaaagtctgtatcgctcatatatatcttgctggtagagcattctgggtgtaggattttttcctttcatcattttgaaaatattgtgacactccaggatggcttgtaatgttacaactaaaaaatcaactgactctcttaggcaagtaacctcttttttgactagttgcttttcttttactgctttaagattcttttctttattttttgtcattttaattataatgtgctgtggcatgaacttttttgggttcatcttgtttg

SEQ ID NO: 32172 - DNA, 1872 bp, Bovine  19866880410218
  misc_feature (1)..(1): n is a, c, g, or t
ngggcagttttccaccagagggtatttgacaatgccaagagacggttttgatgtcacactggaggagagagttgttcatgagttgaggccagcaatgccgctgcacatcctacaaagcacaagaaagcccccgaaacaaagacgtgtctagccaaaatgccgatgtgtcactgttgagaaatcccgatctaaataacagtgtctgaggctctcttgcttcttagagtcttgtattggaaaaatgttagcttcacattttgaggtagcatatggaactaaattgtctggtggaatacctgattaactacatatggctatcaggcgcttgacgtgtgactagtctgcatgtgtaaaacacacactgggtttcttagtatgaaaagaataatgcaaaatgtgtgtgtgttaagttgcttcagtcatgttcgactctgcgaccccatgggtgtagcccaccaggctcctctgtccatgggattccccaggcaagaataccggagtgggttgccatgccctcctccaggggatcttcctgacccacggattgcacccctgtctcttcaccactagcaccatctgcgaagcccaaaatgtaaaatacttcataataatttaaaaatattatttacatgttgaaatcataattttgaaatatggaattaagtaaaatagatgattccatttgtttctttttcctttctttgtggttactagataatttaaagttgtatatgtggcttccatttccattggacagctttggtctagaaaaaggaggaagagttgagttagattttagacattaactaccctgatcacattgaaaataatgaaagctaaaagaagtggtctttcatttattcttcagttgctccatccaataggcatttttgaacataggctgtgcactcatcactgggcatattaaagacaagtacatcttcctttgtgaagagctcataatctactgaagaagtcacagagctaaaggagggaattgcagaaaagtatgtacatcggtgtgtgttgctgtgtcgttgttcagtcgctaaattgtgtctgactctttgccacacgggggactgtggcctgccaggctcctcagtccatgggattctccaggccagaacactggagtgggtggctgctcccttctccaggagatcttcccaacccagggatcgaacccaggtctcccacattgcaggtggattctgaagaaaattaaacactgaggggagtgagatgcaaactgttaaggatttgtacgcagtttagtgtacatttgtatagtgtttatcaactattggatataaaaatactattttttatataaaaacactattggatataaaaaataatgccaaacaaatattttgtgtgaataaaaaggaaaagggtaatatttaaggtagcactgacaacatgcatacaccattctgttgaaaattaaaaggtataagatcaatgtcatttttcagaaggaagaaagaaatcttgaacagcttcagatttagaaaaatgaagactccaataagtacgttaaactctattaataagagtagcctctacttttctccagaagaggggaaaaagggagattctgaaagtttattaatccaacaaagggcagcaaagagaaagcgggtgaaaaggaagatggtggagaaaggagagttgtgtttacaacacgacccctgctcattgctctgctggccgcagcagtctctcagcgttgcctgcggaagtgtggaaatcagatcatgtgacctcacataccacctgttcttaatcatcctgatagccctttgactctggtctcagggagaatgctctagcaactctccataatcctactcagagatgcgctat

SEQ ID NO: 32173 - DNA, 1216 bp, Bovine  19866880479756
  misc_feature (1)..(1): n is a, c, g, or t
ntatttttcacagagctagaacaaataatttcacaatttgtatggaaatacaaaaaacctcaaatagccaaagcaatcttgagaaagaagaatggaactggaggaatcaacctgcctgacttcaggctttactacaaagccacagtcatcaaaacagtatggtactggcacaaagacagaaatatagatcaatggaacaaaatagaaagccaagagataaatccacacacctatggacaccttatctttgacaaaggaggcaagaatatacaatggagaaaagacaatctctttaataagtggtgctgggaaaactggtcaaccacttgtaaaagaatgaaactagaacactttttaactccatgtcttggctattgcaaacagtgcttcagtgaatattgtggtgcctgtatttttgcaattagagttgtctccagatacgtaccaaggagtaggatttctggatcatctgtttttagcaactaagttttaactcataaaatcttccaggatgacccattgatgtatctcactttaaattgaattgtttaaaattgagaagcttcttccatttcatttttatttttttaaagaataacaaattttaaagagtgactcttgaaaaacaaaaataactcctccaacactttctgagagttttcaagcttaaaaggcacttgctttatgccctgtagacttgaccttaacattctaagagtgttactgccttcagttgactccaatgtatgacaagcgattcctcacattttatcagcttttgacaataggcacttatggggctgagtgatctaaaaaagattaacaaggtcctaaattactttaatgaataatagagaactttaaattttattttgttttttaattcacttaactgaaatccatttagcagccaaaacactccctcctgaacatattagaaggaatagtatgttgaggttttattaatttattatgtttcagttcacttatcatttattcttttattaatttattcactgaattgagtttcaccttataaacattgtagaaatcaataactttgtggggctttatgtgcaacaaaataaatttttagcaggttatccagggaatttggaatctatgagcaagaacaccattggtataatgtaaaagtacagttagcatttcaaagaacataagatgtcagggatgcactcaagaatttttattccat

SEQ ID NO: 32174 - DNA, 2725 bp, Bovine  19866880671237
  misc_feature (1)..(1): n is a, c, g, or t
naaaaagaaccctgctgtgtaacacaggaaatgccactcagtactctgtaatgacctacatgagaaaagactctaaaacagagtggatgtatgtacccacatgaccgattcgctttgctgtacacctgatgctaacacaacattgtaaacaaactctagtaaaaagtttaagaatacaagtggctattaggaaatgttaagttacagacatgtgctcacgttctgttcctattgatgttgctgcactagagtttaaagggaattcacccctccaaacccaagtcttcactatggagcctaactgcttaggtacagaagagtccccatatttcttaaatgcttctaagtgatgaaagttatacccaattgaaacatctgaaagtctctggattttgctcacttgtttctggatttttcatgttggtgggaaagaacagtacttcctacatgtgtacaaatatcacaggacatgctgaaccccaagtgcaccgtatttttaacgtgtgcgggaccttcagcccagtttacgagagaggacgtactaagtcctgagaaaacactcagcatcacccctgatgccagcagcgcattttctgccaagtgccccaagctgctgctacctgccctccgccttggcctccctatctcccttccagatgttccagccgccactgttctctgagataagaaggctcccttcaaaacaccttaattagaccagacggctgctggctcggggaactcccaagggggttggccttgcagcttcaacaaagtatcagctgcaggacaacctcgcagggagtgactgccaagccaattactgtggcagctataacccgggcatgggggggtggggagctcattccccaggagctcatctctacagagcagcagcaccaagagagaaaaggccgcctcagtgctgccgacaagctgaaggcataaaaatggtctctgccccggcagggtccagggtgagaggtcagaggatgcagaagccaggacagaaggaagcagaactggataaacaagtaaccatgacctagatggcaggcagacagggagcggggtgctccgggcctgaagagtcctggttggcacccagaggagccgcagcaggagcgccaggccctccagcaggacgctgtcaggcttaaaatgccagagagtcgtgcttccccaagaagttagaccagtggcagggaatgtcccacagcaaaaacatacagacgggattagggagtaaaactgtgactccaacattacggcactggctaaaacaggcacttgcatacacattcccgtctcagcctgtgtgaggaagggatttattgctcccgctactcagaagagaaggcagaaactctagacgttaagacacctccctgcgtttgctcagtctgccctgagaagcaccgagtgcgttcaggccctgtggttgtgcacgtgtgtctgtctgttctgctacctctctgttccaggctggacaaaagcaaaacgttcaaaggttaagaacaaaaaccacagtgggatacaacttctccccaacgaggatgaccgcaatccaaagagcaggtgatacgtctgatcatgaagacacacgagtccttgggcactgctgaaggggcctgtaacacggagcagctgctttggaagacaactcagcagtttcataaaaagttaaactaacagaaaacccccaaataaaccctcacatcggtggtcaaatgatttttgacaagggggccaagaccattcaatgggaaaagggcaaccttttcgacaaagggaaaaactgaatattcacatgcaaaagaatcaagttgttggactcctccatcatatagaaaaactaacctcaaatggattaaagacctaaaacaatgaaactcttaacagaaaacataagggaaaagcttcttgacattagacttgttgatgatttcttggacaggacaccaaaagcatagacagcaacaacaaaaacacgacttaatcaaaatgtaaaatttctgtgcatcagaagaacacagagtgaaacgcagtcaaatcatagcaacaaggggaggttgccaggaattgagtaactgaagctgtggggagctgttgttcaataagaacagagtttccgtttgcaggatgaaatacactagagagacaatgattggttgtacaacagggtgaatttctcaacactgctgaacttaaaaatggttaagatgataaattttatgtgatacgtattctaccacaacttaaaaaaaatcattttcagtaacattattcatattagccaaaagtgaaaagaacccaaagtccatcaacaggtgaattcataaaatggcgcatacctcctggaatacgacacggcagaaaccagcaatgggatgatacgagctaccacagggaagagctgcaaagcattatgcaaggagccagtcaccaaaacatcgcatagaatacatttcagttatataaatctccagaaaaggcaaatgtatggaggtggaaagttgactgggcttccctggcggctcatcggtaaagcaactgcctgcaatgcaggagacccgggttcgatccctgggttggcaagatccgctcgaggagggatggcaacccacaccagtactctcatctggagcatcccacagacagaggagcctggggggctgcagtccacggggttgcacagtcggacccggctgagcagcaacagcag

SEQ ID NO: 32175 - DNA, 1523 bp, Bovine  19866880861339
  misc_feature (1)..(1): n is a, c, g, or t
ncctagaggctacaggctgaatattaataaagaggtgtctggagtaaatattgatcatgaatttctgcttatgcttagagtatttgagaacctgagatcaaaagagcaatgaaaatgagaagggctaaccttttctagaatattaactaatccaagtgtttcctatatacaacaaatcagcaatccttccaaagaattgtatcatcacacacaaaggatcttcaacttggtcttttcagacctttcccagcaaagtctgaggagccccgaagctctgagtgagactaagaacagtgacagcagatgggatggttggacggcatcaccgattcgacggacgtgaatttgggcaactctcggagatggtgagggacagggaggcctggtgtgctgcagtccatggggtcatgaagagttggacgtgacttagcaactgaacaacagcagtgaaaacagtgaacaatgttgaataaattaatgattgaaatatgaaaaaaaaaagtaaacaagttttttggtgatggacaaagcttaaagaaaatgtacagatttaaagggatggtttgagaatctaataaaagatgaaagtaaacccagacacgaataccattacatcagtattttagaatatgacgacatgtttttctaaagaactcaaagaggctcacagctatgacgtcatggaacctcagcaccacagggagaagggtcttaggaagtcatttgcctaattcttccccatgtgaagctaggagtctcctgccatctacctcggggaggtcagctgctagaaaacccccagcttagggtgctcgctgagtccttgggccagttcatattcagccgctgttgtggttgggaagttctttctaattttcacctgtgatctgatcccttgctctttctacctattgaccttagttctgctccgagagtacagtggctcttccctgctcttcacaactccccaagcttcacctgtgatctgatcccttgctctttctacctactgaccttagttctgctccgagagtacagtgactcttccctgctcttcacaactccccaagcccttggaaatcacccacgcccatccctgccgcccaggtcccaggtccagcctcatcgaggcttcagtcctgcctcgcacgcacgactggaagaccctatctcaagttactcgtatctttcaaggcttgctcctgtgtaacaatacacttctaaagcacggatcccaagaccaagcataataatatccaggggaggatctgtccagtatgtaggaaaagagtacaaccgtctccctattttggaaattattctcccgttggtattaaccatagacatgttagcttttcccaaagatatcacaatactgacacacttcaaatctgaatataactcagattaaaggatgaaggaaacctctcttaaggagaagagagtgaaatggggaaaataaacatataaactcataattacagtatacaactagctgttcaatacggcaacaactagtcatg

SEQ ID NO: 32176 - DNA, 1353 bp, Bovine  19866880912281
  misc_feature (1)..(1): n is a, c, g, or t
ntcactatagcagaagtcaacacatttggatcacttaatgtctttgtaagagaaaagtgaagacttcatcctttcagtcagtctgttctttcaggcccacagtctctcctgcagtcctctacgtggttacctctgtggacgctggcgcgcttctcccagtcctttgcgccatgttggtggctggcaggccattctaggtacagcactcatcggaagaggggaacctcacccaaggtgcatcccctcccggggcggcgctccgtcagcaaacggctggtgctggattaaaggcgggctgactcgctgagagctgagaccgcactgaatggccatcacaggccctgaactgtgcagggcattggttaaggacctcgtgggaactgcatctcagttcagtccctcttcctgcctccatcacgtccctgcagttaaccttaagggcgctccccagtagcatttctatatgtgactgttcctgtcagaatctgcatcccagggaacctgatctaagaaagttaccctctaaaaaagagtgcagagagtcccctatgttttaaaatgtcttgtttttataaatctaacatcacctaccacatccattgctgtcttatgcattgtctttgctaccaataccttgcctgtgaatgatggagggaatacattccatgtggggtatcagtactttatctgtacctttgcttgggaatttctacaattcagttgaagtagttttctgaacttttctatgtattataggttttctaaaagatgttatttttagctgagggaaaatattatttggttctttttttgtgtgtggttcataaaaaatagttcttcatgtattttgttattggaaacagaatccagaaaataccataagctgaaatgtgttagaaatatcagtgcttcatacaaatacatagcaaacgttcaacactatgtaatttgttccaacagttgttcctttagtcttctataatgctttcacatgtcatgcaacaagatttgactaacaaagatacacattttgggtttcgccgtatgcttttttggtattatttcagccaccttaactgtgacagaacaactatttcctcactggatgtggctgtgcttttgtaaaatgccttcgatttacatgagaaacctcaaaagaagcttctcagcatgtatattaccacatttcatgacactgtagagttctgtgtgtgctgttgcatgattgtagaaatccctgaaaaactgtaagcgtttttcctcaagtctgagatgcttcgttttaacctattccgttcatctttatggcatcatgctaccatttgctatgtctggttctggcaatatgggaaa

SEQ ID NO: 32177 - DNA, 2579 bp, Bovine  19866880966579
  misc_feature (1)..(1): n is a, c, g, or t
natgataaaaatcttagttaaattctgatatgcatggtttgtttaaacaggggcaaccggctgtcaagaaccacctaaaacaaaatctcaacaatacttcttttaggagacatggaggagctgttggttttgcttcttagtatttccggcaatctatttgttgggctatccctgatccctcttcagtggctgggaagagtcatggaaatagtgctgtccaatgaggtatgagcagaagcagtaagtgaatgtcacttcaaggtcagagcatctaactgtgggtgtgagatacccgtaacacctagagccaccagcagtatcccagtgctggctgctccatccacttggatctggggttcaagataatacaagcagaagcccttgctaatctacagcagacatgagacgtacacaggaataaacctttgttggtttaagctgctgagatttggggcttgtttattactttattataaccccacctatattaaccaactgaaaaatgaacaaaataaagatcttattctccctatcctgaccaccaaatcatttttaacacagtgagaactattaaaagaaaagatcagtacacatgatctagaagtaaaaacagaaaatgaaaagccaatacctcaggagcaggactgaacagtctaccttcagagcaagaaagaggtctgtgctgaaccctgggcgggtgcaggggccacctgctcacgtgtgcacatgtgtgagctacacagtggcgaggaacggagagccaggagccaaaaccatggtaaatggtgcattaatttttggcagaacagaggtaacgataatggtgaaaactataagcataaaagcaatgaagcctcaaaagaaggcaatgaggcagaaaagagatttaacaatagactgaaagggtttccccccgccccccccatgcaatggctatctggtataagacttcctggtaaaactacattgcagacggactttatcactctgtttgtaggcatttccctgtaacacttgaatacaatttttactacatttggaacgtttgaatttgaccatcatttttagggcctgaattacttcgttttaactgaagggcatctcaaggtctggatatgttcaaatttgtgtttgcaaaggccccactgccagacacaaagcgattgctgggacaggcttcctgctgaggcaaatcagcgagcgttcacacggccttggcactctatgtttgcttttagggatgcttaatttttttctgggggttgttcaaaaccataggaaatagaaaacacataaagggtaaaaattaaggcattcaatcttatattcagaaggaattagcgtggtcactgttttgaaaatccagactctttttctggcatccctatacatcttatatatctttctatctatacattttcatgtgtctgcaaagagtcggacatgaccgagcgactgaactgaaatgaactgatacatcttaatgtgatctttagtacttaggtccctgcatttttctttacacaacgtttaataatgagaaatattctagaagattaaatatatccctaaatatatatacaatcattttttttctctaatattttcaaggttgataactttttatgattataaataatactaggatgagcagaaataccttccacgtttctgattatttcacagaagaagaattaacaaaggaaatgatggatgttgtaggaatcttaaagtaccaaacttggttaattttcataattgccatgaactcttctactgctctgctcatacctcgttggacagaactagttccatgactctctactcctatatgtttatgagagtgccatttcctcactctctatacacagaaaattatacctttcaaatgtttaacaatttgtttgatcaaaaaatgacactgcagtgttgtattaatttgctttaatttttttgactaatagtcaacataaaaatttcctcacatgtttaaaaataatttgcatttcttacattttgtttgaacttgtatgactatttcatttttctatttagagtactagtctcatttctactggtttttaagtttcctatatacagttaggctattaaccttttgcatataagatttcagagtcaggatatttagggtcagtaagaggagttattatatgtgaaagttgtttttaagcatacagtactatagaatgattgggttttgatttttttttctttagattttcaaatcttggatttctgattcatttttcttttgacattattaaccctaacactgaaagtgaaagtgaaagagaagactgaaaaagttggcttaaagctcaacattcagaaaactaagaccatggcatctggtcccatcacttcatggcaaatagatgtggaaacagtggaaacactagctgactttactttcttgggctccaaaatcactgcagatggtgatttcagccatgaaattaaaagacacttactccttggaaggaaagttatgaccaacctagacagcatattaaaaagcagagatatcacttagccaacaaaggtccatctagtcaagg

SEQ ID NO: 32178 - DNA, 1005 bp, Bovine  19866880988519
  misc_feature (1)..(1): n is a, c, g, or t
ngaaatgcactaatttgatttgtcatagaaatgttctttcttttaagatccaagataaatcagcaaatgctttcaaagctgacatttaatccatgaattcaaatcatttccaagacttatgacccattagaaagacagtttcaatttcccttgcccttgtgagagtctaatgtatagctggcagaaaacacatttacatggcacaccacccaggacaaaagtaccatttattgataaggcttttcaagtttaaaaaaaatgatcttgctagtcgtgttcattttgatttgtttatctgtcagtagatggatgatccactctggtgaagtttcctaagatgtaacaggttaacagatgtccatgtgacaaaggctgcctactggagactagaagaaatctcccacaatcatcatgatgacttcataagtagatgggaatatctaagctggctagatgtccatatatagacatagactgatacagaaacaggtatagatataagtaggataaagaatcaaactcacaaaagagttggatgaacctatctccaatttctcttctttctctactctattctttaccctttgttctaaatatgatgattctgcctcaaaaatatcagtaaaattcattgaaccctctagcagaagttctcaaaggacattaatccagatttaacattcagagtcagtatctgtggatacaatatccattagagaagatgctctttttttccagcaactcatgtttgtaatatataattatgaaattgtacatatatcaattactgtactaggaaaagaactctataaagcataactataagttcagcctttgaggagcttactgtgttagtttataagtggaatagatttattactatatctgtggttaaacataggaaaaaaaatgttctctttaaggacaatttgtccctggcaccattcacttcactcgctcagtcgtgtccgactctttgtgaccccagaactgcagcacgccagg

SEQ ID NO: 32179 - DNA, 1687 bp, Bovine  19866881019400
  misc_feature (1)..(1): n is a, c, g, or t
naaaatttaaaattatatcaacccccaatattacaaaattattactatttaatagatataatatcatgggcctttctcactgttggagagaagatgcaaactcttaagttttaaaatttcagaccttaatacatgttaaagaacaaagaccacaaaaaggtaaaactaaatattcacaatagccacagtcttagtttttttttaatgtacaaaatatattttaattgttaagacttctcccaaatctcagtttaaccaatattttctttctaaaatatttttcattactaattagctctctaaaaagcaaaggtatctcttttgcatcaaaggttgtaattttccatagctttaacttttaataccctgtaaagaactctgtacatttttgctgaatttaaaattctaccactctgtaaggtaaagaactaagtgaaatgtgaaaccaaagtcttccttgaaaacgtgtgcctctgagaaaaataaataaataaataaatgtgccagatatatcaccataaagaaaggaaagacattcttcctcctgtctactccaggaataacctccccagggagaattttgaaaggatttgagcgttttaaatgccctgatctaaattagttaattaaaaatatgagtgagcaaagtccactaaggttaaaaggagaagaatagtcagcaatcatctatcacagtgccctgttcaaggatttcaagatacctgattaacagtggcaattctcatttagattccctatctgatgaagcagagttgttattgatccaacagttgacctcactgcaggcttagggtgtgacaataataatctctccatacagtgtgcctgcagtcattgacagctttgagtaatgattagatgaaataaatgattaaatagctaattcctaaaaacacttattccatttctattgacgtttcagactttccacatacttcatatcttcccttatccttctttcttcatttcttcctttaaaatgatttatgaattttttaaagtgttagttgagttaaaattgttagggaggaataagttttcctctgcctctcagattcagtgactagaggcatgtaaatttaactgacgaaagacacattaacattaaaaaaaaaatgtattaatattctgcatccacaggcgttcaaagaaaaaaaagtgaaattcaagcagttagactcaagtgtttatataccattttaataaaggaaaagcagttattctttgaggaaaaataaactacagaaaagttactaggaaatatatagggaaaactaatggaagagaagtgttattataataattttgttgatgcaattcatctcaatgcagttcctcgctgagaaaaagttgtgcttaaaactgaacaggaccctgggttaccaagtccaagcttagtctgcttgccacaatggcaggccagtgactctgagagtcgaggtgttgaggcaaagaatatgactttatttggaaagccaagaagagagcagactaatatctcaaagtaagcatctagccaaggtctggatgctaaattctgttctatagccagagagagaggcaataaggaactaaggtcaaaaggcagaacagagagggaggggcagtggggacgtgaaatgaagagagggagagggagccagcacaggaaagggccttcagtctc

SEQ ID NO: 32180 - DNA, 2252 bp, Bovine  19866881051407
  misc_feature (1)..(1): n is a, c, g, or t
natagaggctgaattgagctaatgttcatggtgccccaagtgaaatgattgtctctgtgataatgaaattgaaaccatgatagctcagaaccccgaatgttagatactgtcagaattcagaattcagcaagtggtaggagacttatttttggctgcaccatgaagcatgtggggttttattttcctgaccaggggtcacactgatgcccccacattgagagcctggaatcttaaccactggaccaccaggggagtcccaagtggtgggagacttaaatcaagtgattcttagctaaaaacagatttcccctcagaatttgaggagctgttagagaacagttccttcgttttcattctccatctgttaatctgctagggctgtcgcaacaaataccacaaactgaatggttaaacagcagaaattgatcgtctcttttttggatttccttcctgtttaggtcaccactcagatccgctttgctgttgcagtagaaactgacacagtgttgtaaagccactgtattgcaataaaaatcaatttaaataaaattaaaaaaaaaagaaaaacagaaattcgtgattccacgatggccagatgtgtgagatcagggtgttgtcaggctggcttccttctgaggctgtgaggggccttttctccaggcccgtcctggcttctgggtgtgtgttggcaagtctttggtgctgctcgctttctgctgcgtcaccccaatctctgccttcaccttcatgtggttttctcccgtgtgagtgtctctgcccccgcgtccccttttataagaactccaggcatattggaccaagggtccgtccttctccagtatgaccatattgtaattattctcgcagtgaccctatttccaaataaggtcacctcttgaggtactagggttaggactttaacattagagtctggggaggatacaattcaactcatagaccccggaatctcagtaccaatcatgatgaatgctggttatttagaaaggctcttttatgtcggttaagatcccttttttggagtaaggccatgattaaggatttacacgtttttctttactggatttcatagacacactttacattctgttgtgatgagatctcactgttctctgtggaatagtcctgtccaacagaaatacaatcatcgtcatgtatttaaaattttttagtagccacattaagaaaaagaaacaagtgcaatgaactttaatagtgtattgggaattccctggcagcccagtggctaggactcagtgctgtctcagctgtggcccagattcaatacctggttagggaactaagatcctgagagccgcatggagcagccaaaagtgttcttttaaatagtacatattgtactattgtatgtacatatagtacacagtgtgtatctccaaagcattgccatctcaacaaggaatcagtataagatggctaattaaatgttccacattctttctttgggtactgcctaaatctttgaaattgtgtgttttacactcacagcacatctcagtttggactggccacatttccagtgctcagtggcagctgctatatttagaatgtctgtttttcccctcgattgatgtcctaggttaccccacatatggcgttccaaccattcggtcggatattcctgcccccctaattcgccgagtcagcgacaggaccagttacggtgaggagggaaatgcctactcactgctgcatcctaccatctttgcccagaaaggggtctttgaaagggacttcttcaagaccagatccaaacaagaggtaccgcatgggatttcaaaagggttgaaagaaaggccaactttacattggcacacaaagatggaaaggtttatttgtttgagctcttgtattataaaagtcatcaaggagcccctcagattagggttcctaaggatcatgtgtgatttggttgtgatatttggtacaattcttcaagtagaacttattctgataagatgcatttcactcatgttatatatttaccatgacctatgtctaaaatgaaaaatgttttcctaacattcaacattcttctttgttgagtaaaagcaaagaggcccaggagttccctggtggtccagtggttaagaatccgcctgccaatgcaggggacgtgggttccatcactggtggggagattccacatgccaggatgcatctaatcccgcacgccgcatctgctggcccgcgctctgcagcccacgctctat

SEQ ID NO: 32181 - DNA, 1282 bp, Bovine  19866881059121
  misc_feature (1)..(1): n is a, c, g, or t
ncttttgcttgcccttttcctagtttaaaaataccattccttcagtgatattgatacggatccagagcaacggatgggaatgaggatctattacatatcctgatgttttgtttgtgtggctttttagaaacatatttcgccatagaaactcaaagccccaaaatgatttcaaaacagcttatcaacaaatttttagtttgctagaattttatcaacaaatttttagtttgttatgcctttttcttcaaatatcacaatggcatgttccctgagtgatcagtgcccgtggttatatgtgctgtgctcggtcattcagttgtgtctgactcttgtgaccccatgggctacagtccaccaagttcctctgtccatgggattctccaggcaagaagacttgtgtgggttgccctgccctcctccaggggaacttcccaacccagagattgaacccaggtctcccgcattgcaggtggattctttaccaggtgagtcaccaggaaagctgtggttataaagacccccgccaaaaaatatgcctgtaagaaatgaattttcaaaagtagacttgaagcaatagcaatactgaacggtactgttgggtttattttacattactagatacttctctttagtttcacttacatcaaatataatacaggaaataatgttggttctaaagggacaagtttctctctcaaggtagattaaaagccttttgcaaacttctctgggcacttttctaaggcagtgaaaagaggcttttaagcatttgctatagattgaatagttttgtaaagtcctgaaatgtaggctgcattttcaggtctctttctcagggggaatggtggaggctttacaatcatgaaaatctggtcaagtaaaactcccttctcagtagtcccagtgttgggcaatacttttgttccatccacgtctttatgcaaagaaactctgtgatgagccttcattttagctcaggatattaggatggatactagtgttcactgtttccctctctcttttgttctgtttatgtcgttcaggcctggccctcatctaatttggaaataacattctgaatgtggtccctggactgtctgggacaacttcccgcctgacatcagaaggatcctgcacagctgggatcctgcactcctctttctcgggtctttgttgagcagctactatttgccaggcattgttcactgatgcagagggtcgagatggctcttgtaccatcttcctgggaggacaggtactgcatcaagcatgtgatgcttga

SEQ ID NO: 32182 - DNA, 1367 bp, Bovine  19866881119956
  misc_feature (1)..(1): n is a, c, g, or t
ntcctctcttactcaataatattttctgagtgtctccacaacccattcttgagaacatactcttaaagttatagcataagacatatttcctctatgtaatttttctgttaacctctgactctctcattgagaattatgtggtagtggatggaacattaaattggcaagcacatacagcatggacccaaataaatcttcatttgagacaaagaagagtccaaaccacaaacgccacgatcaacagaagacaagatgagagaactaatacagagaaattggccagtggaaacatgaggaaaacatttgtattgttctccagggtttggaatgaaccaatttgaaggaatgaggttcttctctcacctcagaggtgaactagaaaatcagagtggtccttcgtccattcctactctttaaggattaatgctactgtccaatacaactagcctcttcattcccaacacttagtatagtaggtactgaataagtattccatcaacaaataagtggtcaaatgaaactgtgatgaaagaaaatgtaatttacttgatcactgaaaatcaaaaataaagtttggagtcatagcaatttggatttcctaattcccaagtattactaatgtcctcattttacaaataaactgagatctagaatgattaggtaattttctcaaaagactaaatttcagaaaagtaatacaaatgacccttaactatatgaagatataaatgtaaattaaactatttttcgcctatcagactcttttggcatggtgtaaaaggcacgttcatgtatcattgctggcagaagtataaggtggaacaaccaccaattttgcattatatataaaaattacatatttatataactctcaacacataaaatctacttttggaaattcatcctacagaaatacctatacctatatgaagtagtatatgaacaaaaatatccattgtggcatagtttgaaacagcaggtggttaaaagaatcccttttatcagtccacaggctaaaacctatatatttttttcttttactgaatgtaaggatatctttataccttaaatttgatgagatttagatctaggtaaaatgaaacaattgtagtaagcacagagatgcatcatttcctttagtattaaaatttcatgaagatgataccttaaagcacaggcaacaactttcctttatcttcatctctgtcttctaacatcacaatgttaagggtttatgagataaactatttttgatgaagacactataaaatttgatgaaaactctgtaaaatactaggcttcccagatagcactggtggtaaagaatccgcctgccaatgcaggagacacaggagactggggttcaa

SEQ ID NO: 32183 - DNA, 1943 bp, Bovine  19866881196536
  misc_feature (1)..(1): n is a, c, g, or t
nttctttggattcattggagagtatataacttcattgctaacactagcaagcgggtactctctctgcccccttctgatgcatatgtcagaagctttctctatctcctttatactttaataaaactttattatgcaaaagctctgagcgatcaagccttgtctctggccctggattgaattcttctccgggggccaagaatcctggtgtcttcgcgtcattcaacaacaacctttcaatatcttggccccaacacttactagcaggtttactcctggcaagttacttaagctttctgggctccactttcccattctgtcaagccctgtcttgaaaaggttatattaagaattatcgatatctgtctttgatttcaaataaaaataaatatagtaagcacttacgaagtcctaaaaaaaaaagaagaaggagttaatatgaataaggtgtgaagatttaatgcagtgatacaaagattttaaaccagtgcctggtatagtaaccctaaaaaaattgtaactcaccactgtccatcaatatttaagataatttgtccttcaaaatagactattattttgagtgatgctaaggaaataatataaaatgatttctctatctttcctacttttgtattatgtgtattatttggctaagtaccctgtaggtatattggagagtgcatttgtataatatttatagcaatattataatatcaatgtaaaaatctattttagtatcaatcagtgtaatacaccacattaacaaattgaaaaataaaaaccatatgattatctcaatagatgcagagaaagcctttgacaaaattcaacatccatttatgataagaactctccagaaagcaggaatagaaggaacatacctcaacataataaaagctatatatgacaaacccacagcaaacattatcctcaatggtgaaaaattgaaagcatttcctctaaagtcaggaacaagacaagggtgcccactttcaccattactattcaacatagttttggaagttttggccacagcaatcagagcagaaaaagaaataaaaggaatccaaattggaaaagaagaagtaaaactctcactatttgcagatgacatgatcctctacatagaaaacagttcccaggaaaataaaattctaaaagtttgtaccttatttatgcttcacgttgatttaaaaaaatattgccactatgtgaaagaatttctggtccaggtatgtttccgtggatgttatgacttttcaaagcttaatctactatttatgttataaaattattaataccttgtatctcagcagaaacagtaatataacataatgagaaaagttgcatctctgatcctgatactcttaataaacacattattaatttttattcaatttaactgcaaatagctatattgaaaacattgccagaggatacatttctattttaaggtgacaggaaaataactcctgaagagtcataagcgagaaacaaaatataatttgtatagtagatagaagaacatgaaagattctgatatctatgaataactgtatttcccagaggagtaaacattaatggctttaattacgttataactgctcacagagcgagctcttgcatgagataaaaatacctgacaatgcattacactgtgctttcctgtcagtaacgtaggatgggttaatgtgcatgccatttaaaggcgggcactccctaaatgtaaactaagcccttaataagtgccaacatgatgaaaagccactcttataattaggtcaaattcgattccatcctgaccattttgcatcacgttgaggtttaagacaggattgtttctacagaagactccagaagttcctctcttaggaatatttcttatttcacaaagggtataaaaataaacaaatgagaatatttttctttttgaaaatttctttcta

SEQ ID NO: 32184 - DNA, 996 bp, Bovine  19866881269068
  misc_feature (1)..(1): n is a, c, g, or t
naattgagatttttccttacttcttaaatgtaccatcaagcaaaattagggttcaaaacatagatacaacaggtatagatacaattaagccagtaattaagttcacacaatcattgcaaataaaaatggtccttactatatataagattttatttcctttatcaaaagaagccttaaaatcatatgaaaatgtgactaaaacatactgtggctgcattttttaaaaagttgacctgaattttatctttgaagggaataacaacttatttcaagtgactcatgacttgactagtgttatcatttatcagttaattttggatgatttctttgatttgtcttttgtcactacaagtttttctgttttaactcacttgggtcaatcccaaaatttaaccaacataataggaagtttaattttatttttgcattcgacagaccttgataatagcaaactaatttctgtagctgcatttgatgaaaatatgctgatgaaactcatatttcacatcattgaccataatgagctattttatcaaactgtccttatgacagcattatagagaaaatgataaatttactaatttattcacttgagattccatttgaaaactttaaaagaaaggaaaagatcaatgaagtcaggtaaattaggctctcaacaaataatatatctgggtctacatgaaacaatagcactaaccacccctgctcttaatgaaatgttaacactaaataaggattaattaattattacttttaacaaaatactacaaaacaaaaaagtagctgtgaaatgccctgttgtgaacacataagcacaatgttactcataatcagtataattactgccatgtttttatacagaattggtggggtttctgtcactttgttgaattttttcaaaatttttactaggcttttaattaataaattatcaataagtagctatatcaactgatgagagttataattattttgtaagacatttcaaaaatt

SEQ ID NO: 32185 - DNA, 2588 bp, Bovine  19866881280575
  misc_feature (1)..(1): n is a, c, g, or t
ntctgactttctgagaatggaatccagaagaagtaagacttggtagaaaaggagaaatcacagcccaccttcccagacccttaaagaagcagtggcatgagctctgggtccccctcagctgcacataccatggctttaagaaaacgagtcaaactcgtgagtggacaggattagcatacgccttctttaattctaggttcccggctggctctcagcctcctgagcaccgttccccatcacagcgctgtctgaaacaccacagaacctgatagcaaacccaaacatctccccgatttgtgacaagactaccaatagtcaaatttctggccagtgacctttggaaaaatttaagagatactagtttataaaaattctccatctccagttaaaaaccgtaacagtgtcctttaacctaattcaatggctcaagaaagtaatagaataacatttcttggctgaatcaatactgcattaaagaaaggtgctatcattgaaagttatgaatacaaaacagctcaatgacatattactgtcattgttggctgtctctttcagtttgcttgcatcactgagtgtgaacagaaagaacccttctcgtgtttgcatttgtcagtggattcttttggattctgccctgtgcaaaggtgtttcccacctttcattcaaagcactgcaggtgcaaaagaagcaacctaaaaattgggattaccactgaagcttatttgatatttgttagtacattcttaaagagttcatgttttaaaaatgatttagtaaattgtttatcaaagaagacaaattattcctgccactctttgctttgtattccaggaaatcaaggtcacttagcacaatatgtacaaagtttataaaaattaatctttttaagagattcatatcactgatagaaaaagaactctaaaaatcagtaaggtagacacaaacacctaactggaaattataacacctggagggacagcaggtttattaaaatagacattctttaatgtcgctgttgagtaattagcaaaattttctgaaaacgtttcaccctatgataaagcaagtttacatccagtttaaaggaggaaaagaggaaaacacttcaggcataagtaaaaatgctgatgggtgatctctgaaagtattaattatatcattagattcctgggaaattagactctgcattagaaaccaacagtaagttatccagaacgggcattagaggtcactatccagcacgatacctggcacacagcaaaagtttaaaaactatttgttgactgagtacagcacgtaaataaatgttattcattttaaaaagggatagttggggagtttgggatcaatatgtacacactgctgtatttaaaatggataaccaacagggaccctctgtacagcacggggagctctgctcagtgtcatgtggcagcctggatgggaggggagtctgggtgggaatcgatccatggttatgtgcggctgagtccctttgtccacctgaaaccatcacaatattgttaatcagctattctccaatacaaaattaaaagtttaaaataaataaaataaaatccagtgttactcaaaacggcatctaccaatgggcaacaccagctctacctgtgagctgacggggaagcatgcctggggccccattcacacctgctcattcgtaacttttgaggaaaccagtttttaataagccctctaggtgagtctgctgtagcaaagattgtgaagcactagaatattatgcagttttcaaagatcaaaatctcttggcttcaatctatttttaacaacctttttctctaccaccagagtaagcaatttgattctcccagagccgaagcctagttcctttctaagcccagattcctctggaaacccaacacagaaagaagctgaaaggtatggaagactttattgaattttccttgccaagttttattaggatcctgccagccaattgtgattgaaaatctccagattctggagacagtcagaactgtgttgaaattctgactggactacttatttaacttgaacaaattatttaacttctctgtgtttcaatttctttagctacagagtagagctaaagacacctaggtgccaacccttgagagtggccatgaaatatcaataatataaagtctataaagctccttgaatagcatatattaaatctctaataaatattaatccctttcccttagatcagtatttgttcccttaagatactgtatctgtacttggtaaacaggaggttatataaacacatatcttaccattttgggtatctgtcgcagtgtttgacacatgtttagttattcataaatattcaatgattggctgattgacaggtgtcaggcaggttcaagaattcagtcctttgaacctcactgcacagtatgaagccacctgagtgaaaagaggcatggttaaacctgtcatcaccaaaagaaccgtgcctgtgggtgcagtgtgctccacaccgctttaccaggcgctgccatcctctgccgtctgtgcttttcttctgaaaacaatcaggtctcttcaaatatctagcaggctgc

SEQ ID NO: 32186 - DNA, 1597 bp, Bovine  19866881335496
  misc_feature (1)..(1): n is a, c, g, or t
ntatgaggctacttactaaaacagcttttgttgagtttgtgtttttataactttttagttgttattattggaggtgagtgagaatattttccttcatttgaccaactcttcaaatcccacaattccacaagaataatggtgtgaactatttattttggagctgagatttatacccaatatgccccaaacttgatagcctgctgagtgctgcagtaagaaagcaccgtgggctatatccaagttcaatggcagagtttctagaatgatcagtaacgtcccccttggaagtggccccagtgctgcacgcttagtccttcacagaaaaccctgttctctccccatttcatgacacttctctgtcaaactttgcttgtgccaagatgtgtctgatgtcacggctgtggacacaaatgcagccttcggaacattctgtaactgtgaaacgcctctagcattaagagagttttttgcccacatggcagattacattcatggccaaattccttcccctcctgtctcctgcttctgccatatgattctgcggctcttcctacaaaaggagtcaaggccatctcctcaccccttgactctgagtctgaccatgtgattcgcttccgatgacaaactaaagcaggcagcatgctatgccagctacaagcttaagctgcaggaaactgcgtttcttcctgctctctggtgcttctgccatcatcataaggccgtattctgccccaaggaaaggaaaagacacccagtggtcctcaaaggagggtgagaattacgcaagcacagcctgtcggagacgagccgtatcagccacctcctaggcagcacacagaatgagtgagctgtgacggtaaaggatcacagtttgagactctgcatttcgagttggtttttacacagcaataacccatgcagctcagagggagttccagccattagatccctgacacgcacagagcgcaggcgacctgaggctccctttggcactcctcagataacggagcttctcaggtgaatcacagccctcgctgatgccctccgagcttacctgggtttgcctcaagcccggacgcgcctcgacaggacggactggcgctccctccgttctgctgttcaagggaagcggagcttgaattgtaggaaactgtcccggccacgggaggtggactgataactgccccaggagaaggaagagaaagcattaaacgcgtctttcttcagtggtaatgaaccaagtgcacgtgagaccacccactgctgcccagcaccccaaaggagtcatctctaagacagaagctacgcggccagtgtgagcttgatgatacagacaagggtagtcacaacccgctggataaaatgaagacatttgagtccaaagtgataaagtaagaaatgaacaaataaataatggggagaaggtaaaactctccttacaggagaatggcaagaaataaggaagcaatgatggaagttggggagagaggggcggttagggaacagccagcacataatgactgattcagggaagaatcgtctgtatacactgaatcttgtactgtaattttataaagatagaatgcctcaaagtatc

SEQ ID NO: 32187 - DNA, 686 bp, Bovine  19866881404259
  misc_feature (1)..(1): n is a, c, g, or t
nttcaaaagcatcaattcttcggtgctcaactttctttatagtccaactctcacatccatacgtgactactggaaaaaccatagccttgactagatggacctttgttggcacagtatgaacactcattgtaagggttcaaatccaagctcacagttttcaggtcagattgtatatacttcctaaacttcctaatctgtacagtggaaactatggtaactatgatattaagggggcctaaaattgagatacctgaattttaaccacagtaaacccaccagctacctcagctgtctcaaacctgccctagaagtttagcctgcaccttgtgtgacaacctacatccctttttatctcaggatatggtttagatatttatgcttaggatatgaatgtggccaggtatttgctttgtaagaccaatgtgattttaacacactttatttcagaagtcctgatgctaaatgttggttgagacattattgctcagtgtattatcacttgaatcatgataacaggagcagcatcttgatccagagaggaattatttaatgtgctgactggcaaatatggtaatatataaaggacataaagataagattctgaatgaaaccccaaatataataacttaattatttatatgtttccctctcttatttatgggttctactgtttgctatgagctatg

SEQ ID NO: 32188 - DNA, 1664 bp, Bovine  19866881429523
  misc_feature (1)..(1): n is a, c, g, or t
naaaaaagactgtcaaaccaaaatatgccccccagtataacttgttttaactatatttactgtgtgcaaaaaaagctaatcttacctattgcccatgaatatttcatttacattcattgatgttttagctgatgtctccataaataataaactgttatcatccgcatagggactgtgcctcctgtttgcgtaacaaaaaatgagataaatgagatacttttacacatactattgctatacctcccttatttttgttatttaaaaaaacagaaaaaaaataaaaataaaaaaataaaacaacaggcttccttagtacaactgtataataagcaattacttatagctgaaacaaaggtgagggtactgcagttataatttccttttcctgccttaacttctcccaccatcccagcctgcttcatctggtctcccatgaaacctgctctcagatgacgagtctgagggaggtggtagtgtcgtcactgagcggcgtttgactctttgccaccccctggactgtagcccgccaggctcctccgtccatgggactttgcaagcaagaacactggagcgggttgccatttccttctctgggagaaaggggaggccattctgttctaaataccgtaaaactctctttgatctctatggcaatttcattttacttatgctcattatatgcaatgaagacaaagggaaacccaatattgaacactgacttccaccgctaaatggtaccctgtatttctttaatcctggatgacttccacaagcactattttgagtgtgtcatgagtcatctttgaaaatcttgttactacttcacagtgccatgctttaccgtttacttgtgttactgtttttgagcctcatagctgttgtgaagaaccatcagtcatctttccaatttgataaaaaaaatacaatgaagctcctttgaaatgctatgtgacagggccacttctgactctaatgtgactgctctgcctgcacctctgtgctgaggaggtgacgatctcagaaagagcagcagatgacaccatacctcacagggttgttacagaattaagggaagccacacgtgcgcacgctcagtcactacctaacggagcaagaaccagtgctctttctcccatgtgaatcactccaacaccaaataagaaaattatcccatcactgatcatatatgcacttagtgaccacacttctctggtagagaagctaaagagcgagaggatgggagattctaaaaacgtctaactagagacagctgctttattttaaatgacttttgcagcaaggaacattcttaattagatatattagaaaacatgcaaactggatttttaaaaaacttttatttttgaagaccctcttaagaacaactacaccggtgcatgtgactatgtgggcatgcattatgtgtgctgatatatatataggtaagttttttaaaagttaggaaggatactgaagtgtatatgagggttggagggattaaggggtaggaggcaatcattttttcctttatatacttccatactgtttgtgaacaaattacttccttttgtaactggttaggtcaacaaaaatctttgaatcagcttatatattacaattaaataaagatattttaaaattcttttattatgagtttctttaca

SEQ ID NO: 32189 - DNA, 1638 bp, Bovine  19866881612414
  misc_feature (1)..(1): n is a, c, g, or t
nggcagctggagcagttaacaggcagaccactccagctcgggccgccatctactctccacattggggtcccagggtggctgggtcgcaagctggcttcacatcacccgagtccctgacttgagtgaattcgtggcttcaggtttgagcacgcctcacttctgccgctggagtgtccctcggccatggacttaggaatttgatcaaatgcacaaaaaaggtcttggctttcacacacttaacatctggcatttttgactaaacaaggaactattctgacaggccgtgacgcaataatctgtgattttgctaacgcatcactttcaacaacgggcacgtggcattgtgggtttagaggcagtcacttgcccagtccctgagcctaagcaacctccagttctctaatcacgatctcaaacacattttgtccgaaaaaatcaaatacagcgatggtataaggaacccacaagcagctcagtgtatactctactgtgaacgacaaggattcgttttattcaaacactgtacaaagagtttcaaaaggtcttcagtctgtcttcaaaaattcattcagtcatagtactacccacttaagggaaaaaaagatgccttataacgaaaacatcttaatttggagaaacatgattaatttcccaatgttggtataagatacatcaattaagtttttggcaatataaaaaaatctaaactacgatagtgcttcagtccaattacttatagctagaagaaaaataaaccaagtgtatcaaaggtttaggaagacacatcacttttgaagtacagttttgaagacatgttcatgatctatagacttgtcaagagaatattctatggcaacagttcaaccattcgagtacttttacagattccctcttggcgccacagaagcgggtgcaggatgaatttcaatagcatctaacacaggcttcattgtacttgcttcacattttttttttagaacagtgtctggaatcttttttctgcttgaaaataggcgaattcaagaaacacaaatccgtgaaagggtcccctctcctcagtttcctgtaagagcagagagaactcttaagcatgaggataagcatcccaatactaacttactcttcagtttaagtttattgtagatcatgccattgttaatattctcacttcagtttttcaccaaaacagtgtatttcaaataaggctcaccctttaatgaagctctgtaaccttactctcccaggggtgtcattaaaagtgaattcccacaagccaaatacttacgaagcgagcgtgggttccttatagttcacgacggcggctgtgcacctacgtttacgtaaagacactggtgggctttctacattcttttttggagaaagagaaagctttctggctttcatcacaggatacaaagggacattagtgatatccttcaggctaaaatgaggcgactggggagcttcaggtagtacacctacaaaaacaagaacaagttttattgagtacgcttccaaaaatcagacaaacacagggactgaagccatgtgattacacaccgtagatgcatccaaaatctgcagaggaaggaaaactcccaaactcattctacaaggccaccctacccgacaccaaaa

SEQ ID NO: 32190 - DNA, 667 bp, Bovine  19866881928767
  misc_feature (1)..(1): n is a, c, g, or t
natggaatgtgttttgcctcaatttgtatctgcctcacatttactctatactaaaatatttatcttgacctgaaatcataggaatccttacctccacatgattatgtgaagtatatcatgccatttactgggtttccaaagctctaggacgtggaagataattggatgctggaaaaagcagtcttagttccaaagtttcccctctaccatacagaaagattggcaatcccagctccatcccccagaggccacactgaatctggaatatcaaatgcagttggaatatctctgtctccagtggttggaaatggtcattgacattcagacggggagtctccttttttagcatttcttttctctagaatttaccttcaatatgactgtcatcgctgaaaggacctaggaaaacaaaaaggatgagaataaagaatgagaatgcaggagcacgaaggagggctgagcaatcagaacatgactttccataatgtctgaaaggttataaggcagctatctttcagaattattttatgtatatacctaattgattgccatgtcattaagtagaagttttgatctatttcattttttctcaagctgctacgtgaaatcatattcatcatgtagctgagagaagctttcatttttcatggatagtacaaggaacaaa

SEQ ID NO: 32191 - DNA, 1517 bp, Bovine  19866882052754
  misc_feature (1)..(1): n is a, c, g, or t
natttgtatgcatattaatgattgagaaagccaattgagtctttttctaaaattcaccctgctgcaaaagcagctgactataacatattcttgtgtttggaattctgattcgttttatggcttaatgtgtattgcctgcacctggtgtgctagatgctgcaaagacatttcagaccacccagccattgttctatacttgtcttactctaaaatcagaagataaaaacaatatactattttttatttgtgcttcaaatgtatgtacacataaaagtatatatacataaaggttgaaagaagagaaaaagtgggtaggggagacaatcagattagaatcccattccaggagatgtggttcattgttaaaataagagcaggtgaagatgttcatatacatacagagaaataaaaggaattccatcaacgtctagatgtctgggaaaaggaaatgtctggatggctgagttttgtgaagacaaggtagcaggattattgcttgtgttttcctctcctcctccagatgttttggtactgtgttgacacagcccaagcctattactctcagacattttatgaattcttagtagagaaagttctgaaagcattgatttcatgtctacattctattcttcatgaaaattacagtcttttaaatgtaatatttagtcaagttctctattcttgtgttaaattaccattttgtatagtgaatgtagaagacattctcagtcactgtcattaagatacggtgacattgaaatcatgcaactcagattgggacttgaacccatgtggctgagactcaaacctggccaaaattcatggttttctaggtaagatcacctgcctggtttcgagacttaatgaagctcaggttcttggtgtatcatcccagaaaataattcagtgagagacaaagtgataggtaagaactggattcattttgagagaaatatacttcacagactgaatatgggccatctcagaaggcgagagcaacctcaaaatgtagtgtagttagctttaagggctgggtaactttacaaactaatgtgtgggaggattattccaactattttagggaaggggcagagatttccaggaactgggctgtcatccacaatttggtcattgataatcagccttgtaactgtcctggtgcctgtgggggtgccacttagcttgctgatgtgttactgtgagtgtttactgaggctccaggtctagtggaagctgacgtgtctgccgtcttggacccatttagttctaatattctgtcctcaagctgtgtcatttttttcaaaggttaaaactgctcccttccttcctgtttcaaaatgaaattaagaattttgaaggggtctagaatctgtctcccaaatgtgccactttggcaaaataactattttgagttgaaggcaactgaactgaaggcagttgagaacagatacaggaagagtttttttaccttcccttaatctgcctaaaacagatgtttccaaccatgttcccaaact

SEQ ID NO: 32192 - DNA, 1981 bp, Bovine  19866880352106
  misc_feature (1)..(1): n is a, c, g, or t
nccatttttggtagcaaaattcccagagctccactccccacatagcacacttacagggatatgtcccaaagacatagcgtgttctgcagtcttttctaggaagtatccttaaaattgggtgaggtcctatttcctgctcctccctcccctgcccagtgccccatacaaatgcttccacagtcttacttctttgtgtttcttccagagctttctgggaccctctgttctccctagtgatatctctggccagcttccccatttatcacttctaaatccttaaaggtcctgaggcagctgatgcccagccagaaacctgatccacataccttccctttccctgaatctctggcagggttctgctgccttcggcactggtgaatgtgagtcaagacctgagctgtcagtttccagaaatcagaggccaagcatttatgtatgcatgtacattgaaggcatggaattgattaatcaataagcactcatgaagccctgaatccctgtggttggctaaggtctagagcctttaagatctgttcaattcagttcagttcagtcactcagtcatgtctgactctttgcgaccccatgaactgcagcacgccaggcctccctgtctagcaccaactcccggagtttactcaaactcaaatccatcgagtcggggttaccatccaaccatctcatcctctgttgtccccttctcctcctgccttcaatctttcccagcatcagggtcttttccaaggagtcagttctttacatcaggtggccaaagtattggagtattaggaggccccaaaagaccttagagaaaatattaacaacaaaataatgacaatctgttctcagagtcatgcttcatccttcccttgaaaggcaggggtgacctctgcagatggggtttcccaggctcacgtgagagatactgattcagccaataggaggcactagagggggactggagggtgggacaaagggaaaagccagggtattcctgctccttcagctgtcttgacatggctgtatctaagctacagctacagttcctgctgtgggtccaggttcggccagactctgggctccagaaacaccaccatttccctctcttccccctgctaaggggtcgaagacttcttgctgcctaatctctaggttgtttcactgcctcctgttggcttctcagcctctccatcacctctgcattaagttccctctgctttaaatatgcacagtggtttgtcttcctgattggatcttgactgacagaatagttaaaacttaccccagtacttacaccgcttggagcacagacactgctccaaatgcatgatgtaaattaacttatttaatttaattgtctgaggcatcattgtattttacagatgagaaaactgaggcagagagagtttgacctaccctagtgagataccaaatctggatgtgttatcaaaaactaattgcccaggaagaggtgggcttccctggtggctccttgccaatgcaggagacacggttcgatccctgatctgggaagatcccacatgccatggaccaactaagcctgtgcaccacaacttctaagcctgtgctctagagcccagagccgcaactactgaagtccgtgctctgcaacaagagaagcctctgcaatgagaggcccacacactccaactagagcagcccccaattactgcaactagagaaaaacctacgtagcaatgaagacatagcacagccaaaaataaataaataaacaaattaaaaaaaaaacaaaaaacagaggaggtgatagatgccattctagccctactcaattggattcatcagcccatgaggcccaggaatctggagacttattaacaagctccctaggagattctgattacactaacccagcacccctccatgaactggtactcaggaaaccctgacctcatttggtgatgaggacacttaagatccagatcagtcgtacagcaag

SEQ ID NO: 32193 - DNA, 1868 bp, Bovine  19866880356189
  misc_feature (1)..(1): n is a, c, g, or t
ncctccccctgggcccacccccacttgaagaaatgagtggtggattggccccaagtaaaagcacagtgtatgtatccaatctgcccttttccctgaccaacaatgacttatatcggatattttccaagtatggcaaagttgtaaaggttactataatgaaagataaagataccagaaggagtaaaggggttgcatttattttatttttggataaagactctgcacaaaactgtacccgggcaataaacaacaaacagttatttggtagagtgataaaagcaagcattgctattgacaatggaagagcagctgagctcatccgaagacgaaactactttgataaatctaagtgttatgaatgtggggaaagtggacacttaagttatgcctgtcctaaaaatatgcttggagaacaagaacctccaaagaagaaagagaaaaagaaaaaaaagaaaattcctgagccagaagaagaaattgaagaagtagaagaaagtgaagatgaagggaaagatcctgctcttgacagcctcagtcaggtcatagctttccagcaagccaaaattgaagaagaacaaaaaaaatggaaacccagttcaggaggtccttcaacatcagatgattcaagacgcccaaggataaagaaaagcacgtacttccgtgatgaggaggaacttagtgattaaaaatatacatatattatgtaaatatcattaaattttttttttaagtcttggagtaccaagttcccttgggactaaaaattacttttagaatttcaacataagaacacttagtaccaaatacttttttactttagatagttgataggaaatggtaattttatagtatcatgtttaccttgcatcaagatttgctaataatcattaatcttgaaaagttcatttgaataaaaaagaaaatgtaatactatcataacaatactatcccaagaagaaagtcaaagtcgctcagtcgtgtctgaccctttgtgaccccatggactatacagtcccatgggattctccaggccagaaattctagagtgggtagcctttcccttctccaggggtcttcccaacccagggatcgaacccaggtctcccgcatcgcaggcatattctttaacagctgagccagaaagctagatagtaaaaagatttgagatgttcattataaaagtttattcatgattgatttatataagagcttttgaaataaatttcatctttaaaacaaaaacttcataaagactgtggaaagtctggagtgatttattgttattcatgttaataaagttttctcaaaagaaatttaaaaaaaaataagggtgtggatcatttctatttttgacttggctattattcgatgatgtattcaccttgtgattacttattagactgtggcaccaatttgtaaacatttttgtgtattaaaaagagaaacataaggggggagtagtggttacaaagggaggtttggattttcacaatgtaaaattattgacttgttaggctttcgatctcttttctgggtttctgtatatccaactttgatctccagaatttttctaatggacggccaccagtggccctagagacttagatgctgttggcagtttaggcccagggaatcacttgctttaaagaaaggctatatttctccaactttccatttccctatccatctgcaaccttgctgaaggagattatttcctgatgtaacacaataaatataccataataaagccttcccccaccacagtgaacttggtattgctagctcatttggtaaaatgaatgcacctcccttgtccccagcctggacagaaataataaataacttgctttcatttcacaaaaggaaag

SEQ ID NO: 32194 - DNA, 1343 bp, Bovine  19866880375460
  misc_feature (1)..(1): n is a, c, g, or t
natgcgaagagttgactcattggaaaagactctgatgctgggagggattgggggcaggaggagaagggggacgacagagggatgagatggctggatggcatcactgactcaatggacgtgagtctgagtgaactccgggagttggtgatggaccgggaggcctggcgtgctgcaattcatggtgtcgcaaagagtcagacacaactgagcaactgaactgaactgattctgttctttactgcatagcacataccgactaacatgctatatatttattttccttataagtatattattttcctctctatatatttatacttattttcctatataggtatataaatatgtatatatatatttacttattttcctcacaatctggaatggaagctccaaggttgcgggtgtgtttgtttcattcagtgttgtatctccagtgcttggcacacagcaggccgtcagcaagtatctcttaattgaatgaacgaacggacggctaggggagctacagggaagccagcagtgtggtccatggtgcaggcagaagagctgactctcagcttctccgctccccacctctcccccgcccggaatgctgagtgctctggaaggagacggaaatgagcgcgctcaacagccctccagtcgggtgtttacttaattagggcctgtatcccgacgctcgttggtgtttaactgtccgcctaatggcttcatctggttccgggcgggcgcggggatacctgcgaggcgagggtaggcggggccccccgggtacagtctagggccggcgccgcctggaaaagcctctgctcgggtatctaacctcccctcgggcacggaaagcgacccctacgggagagagaggcgcgaggcaacgggggctggtgctcagcagatggatttgggttttaaccgcgcgtggccctccccagccaccagctgccgggaccacaggcccgataaccgagcgctcccctgataccagatgcaattgctcgctttaccagcagtcgtgaacttgaaggattacagcgtttcttattctcttagtttggggaacctgagggtactacagagagaaacggctcgtgaggcaaaggaaggggaccagtgagctggatcctaaagctataatatcaggcaacgtttgggcacttgctctatgccaagtgctgagtttagcattttaaacgtgttaattaacttaatcctcttctatttgcattaattcattcaatcctaggattttagagaccagttagcacaatagccccactagaggcatgcaaaactgaggctcaaaggtgttatttgactagcctgaggccaccacgctaata

SEQ ID NO: 32195 - DNA, 1784 bp, Bovine  19866880465826
  misc_feature (1)..(1): n is a, c, g, or t
ncatctggaactttctgaataagttacatataaacttaccagaagactaggtaagcccactcctaggtatttacataagaaataaaaacatattgacacaaagacttatatgtgaatgttcacagaagctttattcataacagctccaaactggaaaaacacccatgtatccatgagctgaaagaataacaaactgtagtatatgcacacaaaagaattctactcaggctaaaaagaataaactggtgatacacacacaggagtctcaaaagcatcatgctaaatgtggaagtcagacaaaagatactatatataaattcatttatataagattcaaaacaaggaaaaagtattgaaatagaaaatagatcagtgattggctggcatctgcgaagaggtatgagaggaagggactcactgcaaaggggtacaaggaattttggggggatgatgaacatattccaaaccatgactctgatgatggtaagctactgcataactttttaaacttattgatttgtataatgaagtgctgaattttatttttcatttaatattcttcaataaaagtgattaatatttaaaaaaagaaaaaactgaatctgcattcttgaggaagttgcatggtaaggtctgctcacccactgagacgaggtggctgtagttctccagcattacatctctgtacaaggtcctctgagcagagtccatctgatgccactcttcctgggtgaattccacagtcacatccttgaatgacactgatgcctgtaacaatatatttctactcaatctgagggttcagaatcaggacatagaaaatatttttgaaaactaactcttactatattttctgtttatgttttaatgattattttatattggtctataggtgttttacaatattctgtaagtttcaagtgtacagcaaagagatttatatatacatatatattctttttcaaattcctttctcatttaggttatgacaatactgagcagagttccctgtgctatacagtagcacaacatagcagtgtgtatatgtcaattccaaactcccaatttatccctctctccccacctttccatccatgatgctgcaaatggcattatttcattttttaatggctgagtaacattccattgtatatatgcaccgtatctatatagagtctttgatgaacacttaggctgctttcaggctgtggctactgtaaacagcactgcaatgaacactggggtgagtgtatactttcaaaccatggttttctcctaacatatgtttaactgtttagagtttaaaacaaaatgctataaaagatgagcaactccgcctttacactagaacagggtttcttcaatttggcactactgacactctagaccagataaagttatttctgtggaagactgtcctgtgtatttcaggatggttaccagcatccctacttctactaatcagatatcaatagcatcaatcaaaaatatcttcaaatacttgcaaatgtctcctaggaagaaaaatctctcctcattagaactatcactctatatgaatagtggataatatcttcagcaacaaaacaaactacccaattttagggatgatctatcctaaggcaaagcaacagagataaagaaagggaattaattcttagaggaaaaaaatctggtcactattttttttttatagctatacaaagaaatgctccacaaccaagatagatgctgatgccatacacagagactggaaaaataaataagaatcacaagttgggtca

SEQ ID NO: 32196 - DNA, 1608 bp, Bovine  19866880492874
  misc_feature (1)..(1): n is a, c, g, or t
nctgttcttagagtggacagtcccaacaatcaaggagacgtcaatagtcatgttctccaggtgtacgtgcctcccactcagactgcacatttcagcggcaccagcaggcctggtcccatcagctctcacccacgttcagcaggatgcagaatacaatcaaggggcaggagtcaggcaggcaggaacaagtttcaaagacccactccgcccgagacacccagctaagtgttttcctatccaagtcctcaaaaaataacccgcaaggtggctgttaccatcctattcggacaactcaggaaacgagagactgccctggggttgaaatgtctcaggaaacagtttcagagaggagagcgaagtagatgaagccccgcaaccaggaagcggcaggaccagatttcaaatctgagaggcagaggcagatgagtaacaaagaatataggatttggggacttccccggtggcccagtggttaagaatccgcctgccaatgcagggtacacaggttcaatccctggtccagggaagatcccacatgcctcaggccaactaggcccatgtgccacaactactgaagcccacgcccacacacctagaggctatgctccacagcaagagaagccaccgcaatgagaagcctgcgcaccgcaaccagagaaagtcagtgcagcactgaagacccagtgcagccaattaataaataaataatatggggtttagaggccaaaagacgtggttcacatccaatattatgtgaacacacagaagctgttttctcatctggaaaatgggaataatacctagctcataagattattgggagaaataagtggcataatgttcacacagcaatgagcaatatgtctggaccagagtcagccctcaataaaagggacctttaggtcgctcacaactaaccagggtttctgactccacgtctaggcctctctctgcaccatagagaaaccatctctcaaagcaggcatggggttagctacagccatgtagctttacccgaaggcggaaacatcgagaggagaaaggaacacacaggaccaaagagcgtcacagggtggtggctcagtccgcacttggagaggactgttctgtagggggtactccagggtttactgggagaggtggaagatggcactctcacagtcaagctgacccgcccagggaaacttgctgaggcacctgtagaaacatgagcagttttctccacaagccgtgagtcacacagaggctggtaaacgataagccccggggcagatcattacaacttcctcccagatgcttcctggcactgctggcttgtatcactggtttcaaaatgaaattgatctgaaaccaggtctcatcattactcatcccccttctccccttccttctaacagctagtgaagtaagctgattcccgttcctgattgaagtctatctccacaagccacgaatcttggcctagtcatggaggcgtgaatgggcttgtggcaaactgtttctggggcaagttggtgagcactgatgagcacatggggcaacagtttagattgtaaggccgaaaacaagagatctaaacatagctcttacttccacacccacatagga

SEQ ID NO: 32197 - DNA, 1809 bp, Bovine  19866880559961
  misc_feature (1)..(1): n is a, c, g, or t
nttgtcgtattctggttagaattctaacatactggatttgaggtgaagacacaaacatttagtctatagcacttggagtgctgctgctatatctgagtattgtaagaaaagaaaaagtattacacggtttccgtaggatactggagttgtgagagtgaggaaagaaggaaggaggaagatgaaatgacttggctctattgctgaaagctgtgctagtttatcatccacgaagacgtctttcagagctcaataatcttgacctttattgaaacttggggctgcatgctctttagcacatatgctaaagatatttgatcaatggtcaaatttgaaatagatttttagaaccaaatggagagggcagtttgggctacaagagtgtatcacaccatgctttttagtaagaccattgattggtctacttgaccagagtgtactatacaagggaagttcttagaagagtcaggctgttgaagattctcaggcttaattctgcaaaataattcatttctgatgttgcttgaaataccaaatttggggacctccctggcagtcctgaggttgactccatgttcccactgcaggggacacagtttcaatctttgatcggggaactaagatccagtatgccccacggtgcagccaaaaaaggaaacaccaaatttgcaaatgatctgctttttgtaaaatataaattgaaagagattcaaagttattctcatgtcactcttacttgcattccaagcgtgctttctagagaaaaagaaaagcagtagaattgcaggtacctggaaaaattacttgtgactttggttatccccacaggaatgtggatctttatcctgtgtgtgtgtcttggtaaaaaaaaaagttcagaaccattgactcattagactgaagttagggtgatggactttgacacttcagccaagctatttgttttccataagccacggtttcctcctgtagaaaatgaaagcttgtgtgaagattaaataagagaatgattataaaattggcataaaatgctctcagtatattattattatacctgctgctggtgtccttgtaaccttaaataagtcccttcatttctctgtcctcctatttttttccttccataaaatgaacataataatacatgttcaactctgttttttagaactacttcaagaataaataagatagtatctataaaatcgcttctagctcattcatccttaaatttatctcagctctgtcaaagggaatgtcatgacaggtaacacaactgcaatgtttaaagccatggagagaaacagttcatttaggaacaataaaaataaattttatcaggatatctgtcaccaagatatttatcacattgtagccctaattttttccctaatgttttattgtgaaaatcttcaaacttaggcgaagtcgaaataattttacagtcaacactcatttttccaccacctagattctaccattaacattttactatgtttgctttatcacaaaataggcccatttagccatccatcagtccatcttatatttttgatttgtttcaaagtaaattgcatacattactatgcttccctctactcaaacatgcatatagagttcagtgtttttgttgtaacttttttcttttgagataatatctacatacaataaaatatacaaaccataagttttgacagatgcattcaattgtgtgacccaagcttgtcaagatacagaacattactcttaccctgggaagttttcttttgccctccacagtcaattctctctcccaccgtccaaggctactcctgt

SEQ ID NO: 32198 - DNA, 4581 bp, Bovine  19866880672074
  misc_feature (1)..(1): n is a, c, g, or t
natttacacaggtgaagtgactcgcccaaggtcacagagccagcagacaggcagagctggaaactgaactcgggccgcttaccctgaagctgtcatctccacctcgccctactcctctgatgtgttctgtcgctatgtctcctccctggttgtctctgccttttctctccatgcacaaagccaccgaaaggcagtgtcgtgttccagatgggagcactttgttcctgagacagccattgggcatctcattaaacctgcagtgcaggtggaaggctaaagtgctgacaggcaggcagtgtgcagacatctgaaaagacctttttagacgaggtctttggggagtttccatggcacaggaactggctctgagagctgcaaataaagctggctcaacaccctggctggtaatggggctcgctggccccagcaaaagctgagcatccactggccatccccgaaggccttaacttgcttaaacgagagcatcacctttgggtgttaattcccagagaacttcctgctttctaacataaaggagttagagctagcatgccaggactggggggaaaagccctccctcagtcagtcaagcccacgagaggactgggcattaactaaaccccatacgacagggccaaggcatatcactcatgccagctttcatacttcccctctcattcttaatgcgccatttctgctgactgggcaggaggttggagaacccgtcgggctacagctttctcttctaaacacccttttaagccattagcttaggctcatctgggaaagtctgcctgcctgcctgccttttgattacacaatatctcaaacttatctgagtatccattttcctgggcagataggtggctatggcttcctggaatcccttctgtttatgtgaagcctgtgaaccaaggttcttcagagagcagggtggtgcagacccacccagcagctcaaggttggtgactaacagctcatagcagcaactctcctcccgccaagagctttctgtttcaccaatgatcttattttctcccccttggcattttattttcaaactgagatattaattcacatagtttcaccaactcaaagtatacaatttcagtggttcttagttattccctatgttgtacaaccagcaccactgtttaatttccggaacatttccatcatcccaaaaggaagccatgtacccatcagcagttagccccaattcctctctttccctggcccctggtaaccacttgtctgttttctgtccctatggatttgcctcttctggacatttcatctgaatggaatcatataatatatggccttttgtatccagcttctttcacttgttttttaaattcattcatgtcacagtgtgtattaatatttcattccttttttgtggctgaatagtatcctattgtatggatataccatgttttgtttacccacttactggcagatgaacatttcggttgtcttcactttttggctactccgaataatgcaatgaacagttttgtgtagacatacatttttaaggctcttgagtatatacctaggagtggagttgctggattatatggtaactatgttcaactttttgaggaaacgtcagacgggttttccacagcagctgcacaattttacattcccaccagcagtgtatgaaggtcctaattcctccatatcctccaaaacacctgtcattttcagtttgcttttaggggtgttatctcactgtgactttgctaatgaccttttttaaaaatttattttttattgaagtatagttgaataaaatgacttctttttttttgaccagggatcgaacacaaaccctcatcagtaaaagcatagagtcctaaccacttgaccaccagggaattcccactaatgaccttttaacggaacatcttacttcctaacaaatatttctttgagtattatcacctaacaaatactattttgaaggcaatcatggctaaagcctttggtggtcgtcatagtagtcgtaagaatactaacagttactactactgccatgaacaccactgacactttccgtagcacatactgtgtggccaggctcattatactagacattgtatcctcacaataactggatgaactaagtggtattgttttctccatttcacagatggaaaaactgagggcagaggggttgagcagtttgctcagggtcacatagcttacaagtcacttgtatgaacctggaatctgagcataagcagtctggcccagagctctggagcactgctttcatgtatgactttctggcacaaagtctgttgggaaagcctggaggtagcacaggaagcacactatcaacatatctgagcaccacccaaaataagcccaggatgattcttcagcccaaggtacaaagcctgtacacaccaagattccatccgtgacgggcaggactatcagcacaggatgtgggaccgaatggtggtaacgtgtgacagctcagatggcagacacacctgggctgaggtgtcagctcgaccactcagacctccaggctaaagtgaagccatctgccctcccccagttcctcatccataagaggggtctaatggggacctcagaggactgtagcaagacatactgacagaacacatcagagaaagtacaagaaagagaccaataggcttgctgacattcaagcctggcagactcagattctacccacatgttgttttgcaaaaaaccatgcatcactcaaaaagcactaagttttcccttaaaaatagatgtgaaggattcccattctttaaaagttgcacataaaatgacactttaccatgaggggaactccctggcagtccagtggttaggactcggatcttccactttcaggggcctgagtttgatccctggttggagaaatgggatcccagttttttgatggtacagccaaaaaaataaaatgagactttcctatgcaaaaccttagagtgcagtttcaagtctgactgattcaaattcacagaatgtgagtgccgtgtttcaagggttaacatccaactctgtgtgcatcagacatcacataagcactgagtcatttaggtttaggaaatggagatcgcaattatgcaaaatagcagaattatatgaactgcgcttgctacctgtcattgtattaaaagaatgtaataagatagctctattgggggacttttttactttcactgctaaataacccccctttgtgatctgtggaagacataggaagagaggaaaggggagtgtttagctaaaaagaaaggccaagtatcagaagtgagacctctggaagagcctcacatctgagcttatacggtcttgcccttgaggtctaattccagggtctattaaatcataaccctttgttccttttgaaagaaacatgctgacaccgtcaactcggttcacccttagaagcctcagatctggaaatgccagctaagctatactacaggggagggaaatatagtaggtcttttaaaattacaaattacaagtttgtaaaattaaaattacaaacttgaattccttatatggctgtgtgtacatgggtagagcttacatgaaactcgtgtgcttataaacacaaaacagaaaccttcccaacccacccctcctagcgtccaacagatgcttcaagttctgcccaaaagtgatggaatcaaaggaggctagaaggctctgatcggaaggcaagaagccatctttcttctctcactgcctgctgtgtacacagtgggggctatgatcactgaagccagtgctttaaatggctagagtgtaagagtctataataaataagagacattcttgagattcttggggatatttgaatctggggcatctggggcagatggttagatgatattgtaaattttctttgctgtgataatggttcaaaatgagagcacccttactcttggacattgcagcctgaagtatttagtagtgaaatgtctgtaatatactttcaagtggctcacaaagcaaccattcgcacagatagtgccaacaagatagtattggttataaaatgagggtattcgggtgttcgcggtactttctctcaacttttatgtatttttaatgtttttaataattaaaagttctgggggtgggaattaaccaaattaactgaaaatgtattcaggactgaccgatattcagctagttttcactgacacagatggtccaaatattgaaagagccccctttcagttggtgaagagcctctgccatgagcatcatgggggttgcccccaaccccaggtagtgggctgcccctatcctccagctgatgctcaggaccctagcacctgcttgactaccaaactgcaggcgttccctttgatcaaagggtccatgctgcatgggtcatcattaaacatttcaaaacgtgagttctgcaccatctcaactaccggccattcaccatggaccatgctctccttggggttccagaatctctcctcctggccaaccctgtccacacgacttgcttactcgggaatgcgaatgggagagccctgtcgcacagagcttaaaggg

SEQ ID NO: 32199 - DNA, 1245 bp, Bovine  19866880712924
  misc_feature (1)..(1): n is a, c, g, or t
ntttgagtgctgactcatttgtactggtggctgatggatttatagaaacagtgttttatgactttccactatctcaaaagccatactaaaagttgaggacatattcaggaaaagatgacatgggtttttagccgtggctttgccacagactgcagcttggatgaagttttctaaatttctttgagcctcctttttcttagagtttcagtttagcatccttaaaaatgaacagtttgtacaaatgatcactgaggtctcctctagctctgcagttttataaattatttagattagtatttgtccacaggacactctggacggctgtgtgtgtgtgtgtaaggagtcaaaacataatgcatgtgaaattgatagctatttcattcacctctaaatatgatcatttatttaggctatattgactgtagctctataattcaagggtacatactacactctacacttgtggatctttctcctttcctagaataatctctgggagagaggtggatttagaatgcatgaagataaacataatctcaagataagcactcttactgattataggaagctaatattaacacaaattgactgtcagttgcaagggcaaactctcacatatccaaagatgcactatagtattacttagtattatttgacatgaacgcttggcatgaaattttggaattacatgtagatgcctttaaaatgaaaagggcttccctggtggctcagctggtaaagaatctgcctacagtgcgggagacccgggttcgatccctggagaagggaatggcctctagaatgacactgttctttggttttgtcatgattctgacctctcaaatttactctgacttgttaagaataagtaaaactaaaagtgagtggagggaaatgaaaagtggtattttcataatcggaagggtacaaacttccgattataagatgaataagttctggggatctgatgttcaatctgatgactatagttaacaaaactgtcttatatacttggaagttgcaaagagaatagatctgaatgttctcaccacacttaaaaattgtaattatgtgaagtaatagatgtgttaactaaccttattgtgggaatctattttgaaccatttgaatcattttgtaaaatatctatcaattttggatttgtgtcacattttatcatgaacaaatggaccttggtgtattttttgagcaagaatactacagaagtgatatatccttctcagt

SEQ ID NO: 32200 - DNA, 2340 bp, Bovine  19866880910808
  misc_feature (1)..(1): n is a, c, g, or t
ncacattcttcctgagatgaacagtcacaatgttacacacaaatggaagtcagaagttgcattggatcctgcaatacattaaactcaatactcacacctactgtgagagaatcatcgctcacaatggttcacttgcctggtatgtttcagatcatatttaagacaaaggcaaatatagaaagtctgctgttcttcagaggagagaaaaaaatcatctttttaatttcactctcatgagatttccctttcagttatgaaagaatttaagtgtctggagatctaagttctatcttctttagccagaagggtcacccagaaattaggaaaattaatggctatatccatagacatgatgtatgactatgtgaaatcttttgaaatccttggaagtactggtgaaggaagaactcagtgagatttcgtgataccagaggcaaaaaagctagttagttttccaaaattttcccctagtgagtgaagagtaaaatttaacccttacaataggcatatgaggttaagtgttattaatatcttcttattatatatgaggacactgacacatcaggaggtcaagaaacattcctatgatcaaaagccactagcaagcagcttgggatctgatcccaggcagcgcgactctggagcccacagtcttaatactcccagctcatggctgtggttttgagcaacttcctttgagttggcaggttcacttcttcttttttttaattatttatttggctgtgccgggtctttgttgtgtcatgcaggatctttagttgcggcatgtgaactcttaattggggcatggaggatctagttccctgactaggaatggaacccaggccctctgcattgggagcatggagtcttagccattggagcaccagagaagggccagcagattcaattcttagcactactatttaccagctgaatgagtcttgaacaaattgctgaagttctttgtgccacagtttcctcacctatgaaatggacctaacaatagtctctttatagaatgtcttgggaaaattagatgagatcataaatgtagatgcctaaggacacaagagccatttaaccagagttagcacccctccttctgacattccccttcttttcttgctcactgctgcttagcaagtgggaagcctctcatcccagctctgaggaaaatcatgccctgacatagctcaagggaggagactaagccattgcaagagcatgggcactactgggccagtctcttggtgtgcactgaacatttgctaaatccttgaacataaaatagttcatcccagctcccaaactgtcctccccttgctagcataacaagcctccaaggtgcaccgacttcggttccacagccacaccactccctgaacccatttcagaggctggaacaagaaaactcacctaatgccctgacgattcgcatcaggatttcccccactttcattctggtctccggtgtgtgcctgtctttactgctgtcatactgagccagcaggccaggcaagattttctcagggtacacgtctgagaggagggcaacccctagggttaaaaatagaaagaaaggattcattactgtttagcgctgaaaagaaaataagcccagacagcttgtggtgggatgaacacagaggcatttaaatccacctctgtaattccaccagcaagagctgcccttcatttggaatgacaacattggtagtggaaagaacatgggtcttagagttcacactcctggattcttctggtctcagccctatatgatctctaagatcacattcagcactgacattctatgacctatggattctagactctagaagctgaggctagatgattacataacatagcagggatccacacagccatggggacagactcgatcaaatgccctggagggagtctttccagtctgagtcagtaaggttcaaagtctagtatcgctcctgccaatccatcagcctggagcacagtagtgcttcctatctgcgctgcagttctttaccctagaatgagtttcctctgtaaaactgtcaatgatgagagcaattcccataaggaaataaggaatgcaaattctgggcatgatgaggaatagagacctatgcttccagctgagtttcctgatcagaaggagagaagatcctgctcctgattcctccttcatagtacgtgccgacaccctctctcttcatacagcacccctagaggtggaatctgcagtagtggtaacattatctgagcccagatccatagcaagcaaacttcacagaagttgagagaagaagggagataagactaagacaggaccagaaataaaaa

SEQ ID NO: 32201 - DNA, 1421 bp, Bovine  19866880926199
  misc_feature (1)..(1): n is a, c, g, or t
nattagtattcctcgacttagtaattctgaaaactgaatcactttgcaacctaaatatagaaaagttattattatggtctggttcctaagcaaccatttcattaagaaaagctccacttgggaaaaacatctgtttgtcagtaaggtttctgctgttatcatataatttcagtgaaaaagccatggtcaccccgtgccttagtaatccctagttgtgaaaaggtcaacagagggtactataacagagagccatctgtttcaatctgggatagtccttgaaacttgttaccagctttcctaaaccaccacataatttaaaggccattatcttctggttataaaagcaataaatgttcatgctagagaacatgaaacctgtaagaaaaaaggcacaaagaaaataaaagtcatttgagtttttgatgccttcatattagatctcactggaaaaatgtattctgctgctataaaaaaaaattgaaaaccactgacctaaaataactccgtatgttttgcctttgtcatctgcaataagagtattttttgtaaggtttaggggctgtgtgttggacaactgaactgagagatttctacagtcaaacattcagtgacaatctgacggggcgagaaggtgatgaaaggtatgtgtcatatgacatatcacatgtgacacggattataaaacttccttgtcaggtcatgtagatggcccaggacagtgattttttgaatcttttgttgttattttgaaagcagcagaatcttgttttcccatattttttagaggaggctcaatgaaagagagaaaaagaaaagagcctacccagcccaccccttcttcactgatctttggggtcatcgggtctgcaggctcctcccctggtacagcactgctacttcactgtgccctgggtctggatcactggtccctcccttcttcactaggcaccagatctcagctaaagggtcacttcctcctacccctttctgtcaggtaaaatgtccccaacacaggctctcgtatcactgtgtacctttcttcccagcatctgtcaaagccacatttcacatttgtgtgacttttttttaacttttaaagactcttttttccctttgatgtgaaccatttttaaagtctttattgaatctgttacaatactgcttctgttttatgttttggttttttggccctgcggcatgtgggatcttagctccccaaccaaggatcaaactcacaccccctgcactgaaaggtgaagtctcaaccactggactgtttgaggaagtcccatgtgtgtggttttttgattagcatttgtcccctgcatctcctccctgcctcagactatatattccatggaggcagggcacgactgtttttcctcagcagtatactgagcacagcacccttacacagaata

SEQ ID NO: 32202 - DNA, 1157 bp, Bovine  19866880952142
  misc_feature (1)..(1): n is a, c, g, or t
ngacagatggtaagaagaacccccttaagggtggtaggtagagtatcaataatcccaggcatgctgcagcaatggaattgactgttgctgttgtttggtccctaagtcatgtctgactcttttgtgatccatggactgtagccctcccagctccttctgtctatgggatttcccagtcaagaatactggagagagttgccatatcccctaggggatcttctgcacccagagatcaaacctgtgtttcctgcattggcaggtgggttatttacccctgagccaccagggaagcccatttataaacaaccaagttctctagattatttaccttatgtgagacacactctggtagaacagtaaagacaaaagagcactcacagagcagaagcagggaatccaccacaactgttgacgtttcattctcgacccctccgcacacctttacatacaccctcagtacatctactaagttcttctgtcaccaaaatggtccctggcaccatgccactctctggcatctctgctgtatttaaacatcggtgaagagaagctaacactgcctgaagtactttcctgccagttatggccattccctccacatggttataaagctagtggtggccactctctgaaattgccgtgctgtcaagctgtctggaacatgaaatctgccccatatctggaggaagatatctctatagtaatcctctgctgaacgagactgctggggaccagaggctagaatctctgcagtcagggcacatgccttccattcggcagctatgccctcagcatcgctctcaccaggctcccccacacctgctccttccaaaatgccccagactactgctgaaacaacactgggccttcttaacttttcagacaggagccacccacatagatgtggaagccaacctggggcctggtacctcatgtgagtcttcccatcagtgcaggtggataagtcattcctggatggctagtggttgatacacttgatccaagatgtctctcagggccttccttgatagtgctctttcctcctcaatggacacctcttcctcaggattctaccgtgtcttcctgggaacgtgtcctccgcagaatcccagctgatacaaacctacagtgatagcccccaaaatacgtgtgcttag

SEQ ID NO: 32203 - DNA, 1978 bp, Bovine  19866881067612
  misc_feature (1)..(1): n is a, c, g, or t
naccatgacgatgtggccctggagggtgtgggtcacttttttcatgaattggccaaggagaagcgcaagggcacggagcgtctcttcaaactgcaaaaccagcgtggcggccgtaccctcttcctgaacgtgcagaagccatctcaagatgagtggggtaaaacccagggatgctgtggaagccgcccttctcatagagaagaacctgaatcaagccctgttggatctgcatggcctgtcttctgcctgtggagacccccacatctgtgacttcctggagaaccacttcctagatgaggaagtgaaactcatcaagaagatgggtgaccacctgaccaacctccgcaggctggtcggtccccagcctggctggtccccaggctgggttgggcgagtatctcttcgaaaggctcaccctcaagcacaactaggagcttctggagagcagcggcctttgaagaacccacctaacatcagggctgcctgaagctcctctctgcagccactaggcagctttttaacaccctggagccctctctcaagccttggaccaaatggaaacaaagctttttgcagcattaaaaaaaaaaaaaagaaaatcagagataccaagggaacatttcatgcaaagatgggcacaataaaggagagaaatataatggatctaatggaagcagatgatattaagaacaggtggcaagaatatctagaagtactatggaaaaaagatcttaatgacccagataaccatgatggtgtgatcactcaactagagccaaacatcctggagtgtgaggtcaggtgggccttaggaagcatcactatgaacaaagctagtggaagtgatggaattccagttgagctatttcaaatcctaaaagatgatgctgtgaaagtgctgcactcaatatgccaaccaatttggaaaactcagcagtggccaggactgcaaaaagtcagttttcattccagtcccaaagaaaggcgatgccaaagaatgttcaaactaccacacagttgcactcatctcacatgctagcaaagtaatcctaattctccatgctgtcttcaacagtgcgtgaatagtgaacttccagatgttcaggctggatttagaaaaggcagaggaaccagagatcaaatggccagcatccgttggatcatcgaaagagcaagagaattccagaaaaatatatacttttgcttcattgactacattaaagcctttgactgtgtggatcacaacaaattgtggaaaattcttgaaagagatgggaataacagaccaccttacctgcctcctgagaaagctgtatgaaggtaagaagcaacagttagaactggatatgaaacaacagactggtttcaatctgggaaaggagtacctcaaggctgtatattgtcaccttgcttatttaacttatgtacagagtacatcacatgaaatgctgggctggatgaagcacaaggtggaatcaagattgccaggagaaataccaataacctcagatattgagatgacaccacctttatggcagaaagtgaagaggaactgcagagccttgatgaaggtgaaagaggagtgtgaaaaagttggctgaaacttcaacatttaaaaaactaagttcatggcatctgattttatcatttaatggcaaatagatggggaaacaatggaaacactgacaaacttttattttcttggcctccaaaatccctgcagatggtggctacagccatgaaattaaaagatgcttgctccttggaagacaagttggcagttctagacagcatattaaaaagcagagacatcactttgccaacaaaggtccatatagtcagagctagggtctgtctagtcaaggctgtggttttccagtggtcatgtatggatgtgagagttggactataaagaaagctgagcacagaagaattgatgcttttgaactgtggtgttggagaagactttgagagagcc

SEQ ID NO: 32204 - DNA, 1468 bp, Bovine  19866881080302
  misc_feature (1)..(1): n is a, c, g, or t
ntcctccttctcttctcctgcctgaggctactctgaacctcactgccccacctccatcctcttgctgacctcacttcattctttaatccttctctttcctgtatcctcaactattcatatacaggcttttccctacgaatatttttaaaggtcctaatctctcccaatttaaaactgtctcccaacgctatttcctttctggttttctctctcctccccttcaaaactgctaacaagagttatctacatctacctcccacacactcagacttccaccctgctgctccattgaacctgctctctctaggattgccagtgacctctttgttgctaaatttggtgttcatttgttcagactttggcttactagactgttctacagcatgtcaactcaaatcctccatgtggcttctgtgcacactattctttggttttcctcctatttatctgttctaacctttccttctgggcccttcttcctctacttgtcccttaaatgttggcatatctcaagagatttttgttttctctttcaccctctctacagaagagttcggagaaggcaatggcaacccactccagtactcttgcctggcaaatcccatggacggatgagcctggtaggctgcagtcaatgaggtcactaggagtcggacaggactaagcgacttcactttcacttttcacttttatgtattggagaaggaaagggcaacccactccaatgtttttgcctggaaaatcccagggatggtggagcctggtgggctgccatctatggggtcgcacagagtcggacatgactgaagtgacttagcagcagcagcagcagcaacagaagagttacattcatttccatagcttcagttatgatgtatatgttaagagcctgataacttacggtactttctccagatcacatctctcaaggatgacaggctctcaggctctgtctttttggtttgaattaggttcagagtaatagtatccatgatcacttcttctttggcctgaattcattactcccatatattaaggcattctcccaagataagctccaaatcacccaatggacatctcacctgatgtcccacgcacctcagacttatctcctcctcttcctgcctaagcctgctcttttactattccatacctcacaggaaagcaccaccatccattcacctagttatccaacacagatacctgaacatcatccttgactcaccactctcctcctcaccctcagcttatcacacacaaagtcctcttaatatttctttctttttttttttggccatgttatgcaacttgtggaatcttaggtccccgagcaggggatcaaacccaggtcccttggcagtgaaagcagtgagtcctaaccactggacatccagggaattccttgaatatttacttccttaatacagctcagatacaccctttttcttcttcatggactctgtgcttg

SEQ ID NO: 32205 - DNA, 890 bp, Bovine  19866881094312
  misc_feature (1)..(1): n is a, c, g, or t
nggacgatggacagcttggccaggatgatggctccccagatggcagtgggtacttctttagaacactcgttacccagattgacatgtccgttgtaatccccgatggcaataaatgccttgaacctggtccacaggccagcactgggctgcttttgcatgggcaaaatcttcaaaaccttatccttgaaggatgctcccaagaaaaagtcaatgatctcagactccttgataggcagagagaaaaggtagatctcctccagggacttgatcttcatgtccttgaccaggcggcccagcttggtaacggggagccactccttgtcctcagcctcgcctccgctagcttcgtggctgcgatcccggccctggacgccactattgacgcctccacggaagccactgcggcctcccattccagggcccctggggcctcctggccctcctgtagcaccagggtcatcccatttggtgttttcactaagacgaaggcaccaataatccctaagttccctcctagcttatggattccattttctaatttttgccataatcctagaaagagtaaaaccacgttcggctgatgactacttgatcttaggctttctcagccatatctgaaaagccatttccttggataggtaggttagaaaggaaaatacaaagggagtttatgctcctatccataccttggaataataacaatggttaatcttcatttgtgggcttcccttatagctcagttggtaaagactctgcttgcaatgcaggagacccaggtttgattcctgggttggaaagatcccctggagaaggaaatggcaactcactccagtattcttgccttcagaatcccatggacagaggaaccttggaagtttacggtccatggg

SEQ ID NO: 32206 - DNA, 1323 bp, Bovine  19866881101093
  misc_feature (1)..(1): n is a, c, g, or t
ncatcctctgtccctggggaacttagcaccagagtgtggatggggctgttgtcttggacagacagctggtgaggctcagaaggttagaaccagcaggagccagatagagctctagtcgtggggccagggaggggttgaggggacatgctggccaagctcagtttatcttacctgctccttcagcctggccccccaccatctgttctcacccagaaatcaaagtgatctttctgcatgcaaacctgagcaccttccaagcttaacacactttcattgcccccagaataaaatccctgccctgagcccaccatcctctcccaaattctctgctagtctcctcctctgcttgtggaggaggactttcctctgtggtccctcagagcaggcctttcctcgttctgtcccctcgtgctgaagtccccccgccttgtttggttgatagctcctcagctgaaaagtgtcctcctcagggaagccctcctaatttcccccagcgttcagtattagggcctcctgtggaagctcccagccctgcctcccaggtgagctcggaaggggctgggacctagccacctgcatactgacaagggcaaggggactgacacatgtgggcagcaacgaaccccaagtgtgaccctccagagggagatgccaaatatggttgcaggatgttggggtcttatggtcggagggggattgtccaagaggcaggcagtgcctggaacatgcagggctgtggccacgtggaccccaagctgaagccacagctggacaccattctcgaggaaggcagggggaggaaagaaagaggtcaaggacagacttggagacttatcccatttttggcttggtgaggaaagaggagccaaaaagagcacttgggaaaaggcggaagaatgcagaaggaaaaaaaaaaaaaggaagctaagatatagcactgtttttatttagttctcagatagtcttaattttttttgtttcccttagaatagctgaaacaggagggccctacgtggcagtccctgggatgagaaaaccgtgtgtcaaagctgctgccgagtccctctctatttttaccttcctcacactacctctttgagcctggaggaggcatcctggcctgaggtggcccgagctggcgtctctgaggcagattcagccagccctcagctcgttctccagaaaccaccaccaaaaagccaggtattcacttttcttgaccagaaataaacgtgttagacaaatgtccacaggcagtcttgagggatgtgaacacggaatcaccccataaatttactttttgttttctttccttggttcaaa

SEQ ID NO: 32207 - DNA, 2064 bp, Bovine  19866881101716
  misc_feature (1)..(1): n is a, c, g, or t
ntcccagggaggtctttccaactgagcaaggttaggaaacggctgcctgggcttccccactggctgaagcagggttatctcctgaagagggaaagacaccttcagcgggctcatgaagacagactgaaatccagagtgttcactgacaggcaggcccagggctgccccaggtgagcccatgtgctgacccaccagaacacactggaaaggaagaggtgtgggagggcagggttgaggggatcctgtgcttcgagggaatagacagcagtcactacggcttgagcctgtgccagggctccagggctttttctaagtcgtctgagtccactggcaagtctcaaaggcccctgaccctagacggactgcagaattaagacctgtctcacagccctccctctctggcgctgaggaggcccttgggcctaggaaggcaggaagaggtaggtgtaccaactcttatgcgagggtacaacttggccaaacagccaagacaaaaaaatctgcagcaagctaattttaggtgggtaccgtatagaaaatttaaatattggagtacgcaacatgctgtcagcaagactgtgctggtacgtaggtgggcgaccacagcagctgctattcattcaagcaatgggcatatgtgcagaagggcaggaacagagaagggggaacagatgctggaccacaaatctgggtcctgggtgtcagtttctactcggtactgagatgcataatctttgatcagttttctctaggttttgttatatgaaaactggagccgtgttaccttgtcaacataataaaattttcaaggaggtgtcaatgcccgcttcagctggaagcgaggcagggtctgttggggtcctggccctgccaagatggctgcagcactgagctgggggctaattcgcacgtgtgtccctccacctcacagacaagaacctgacaccagaaagagtgagacttttcatcaacccataactaaaactatctgagtgctttggagcatgattcttttttgctcttccccacactttatgaagaggctcatccccgtgctgtcaatggtgaggcagtattgcacaaggacaaacggcctgggcccaactcctggctctgctcattactgctgtgcgacatgaggcaagttaggcattaggcagctgcactgcaggctcagtttctgtaagtaaaaataagcacggtacccatcccctaggaatattgtgaggattaaaagaactaaaacacatgaaatacttataacagtgtctggtataaagtaaatgctatacacttgtttgccactctggggataccaatccacagacctgcccagagtccagagacctgcccagattcactcagctaaagcaccagcagatccaagattcccgcctaggtcttcttgaccccaggacagctgtttaaaattactgtgtttactgccttctgaagtgtaggggaggaaaatacaagacacagggcacccagactggacctaaacttccccaggagagtatgcctggctggctgaacacatccacacatccacacacacctagggaagcaccctcacctggatgtagtccaccgaatcaccaagggccttgaaggccgtgtacatgacctctcgcttgcctccccacttctgcatgatgcacgagaaggtgctggcccgcaccacgtcccgaacgcggtccatgccctcctgcaggctggcctccgtctcaccctcacccgcctcatggaagttgctgcgccacacgaagaagccggcttgctcggtgccaccgagcacctcgtggaagatgtccaacatgtaggcatcctcctggcgattgccatccaccaccaggaccactttgaggtcggggaaggcgatgcgctgggctgagcgcaggcacttgcgcaggtagtcggggtcctcctggtacgcagcgatgcagagcgccaccgagcgccgcaatggggagggcagcttcagtgtccggcctgcccgtcgcatgcgccggtgctccaggaaggcaaacaggctctggatgagcaggtgcaggcccaggatgg

SEQ ID NO: 32208 - DNA, 1739 bp, Bovine  19866881109947
  misc_feature (1)..(1): n is a, c, g, or t
nggggatgccttgtcccctgtgccctggacaccagcctcctcaccctcagtaagctgacaacccaccctcacctctctctttcaccctctcatcgggctgacctgcccctagaccacaggctggcacgcatctggaagtggacataaaagaggcattcctctccagagccatcccaacctgtgcggcaatcccaacctgtgccttctccacgagcagtgaagagctcccacctcatctctcaatgagaaatttgttaaggagggtctttgtccttagatgttccccatactatcccccataggctgtatagcatctctcccctaccagattcttctgaaaaatcccctgtgtgtttgtttttcaaaataaaattaatcgacaggaactatttagggagggtttcctgaggggaagtggaaggaatctctgcaaccttgagattacagaaccttttcttttctcaaaagaaaaacatgtcagagcactggtattctgagccagaccttgttttgaaatatgctcccctctgtcctttaacaaacaacagcctttctccctctttgaaaataagatcacatcaagtcagggattagaaatgggaaaaattcaatcagaacctccctctgccagttatacatctcagtacactcctaggcgagcagaatcagctcccactacaacccagctcagcatcatcattcagaacgcaccggtaggaagtggtgaaacagaagggcctttcatcctgagtgagcgaggcctgcagcactgctcttctagctccggaagctggcggtgtctggggccagtggagtcagggcctgttgcttaaataggcagtgggagggtctggggggggggcgggcatggaaagtgggccatttacccagcacagccaggcagtgtctgccgagccagcagtggtcctaagcacgcgcctgcctgcttgtccaccgtgaacctcaagcccacaggtccctagaccacagaccagcacctgggatgacccctgatggacgtgctgctccaagtgagaccacgtgcccagacacacggagcttggtccgggttcctggatacctcttcctgtcctgagacacagcctgtctgggcagcagaaccaactgtggagttggatggacctgctcccaagaccagtaagtagtgggcatcaagcagggtatctcaccaagtctcggtttctactttcttaaaatgaggataacactgacttcataggttcagaaataatgtttgcaaaggttctagcacctaagaggctgatttatttatccacatgatgatgctggagtcaggttactgtcaacaaggttcaagtctagagaggtttggtaacttacacaaagtcacacagccctttagctgagtgtcagagtcagacttcgtgcagacctgaaactaagttgggctggcagaaaccccttgaggtgaaggtagggagcaactgctggccttggggaaatgtcttgactgaactctggtgaaggagttacccctagaaacccaatacagagataagggaagaggcatggctggacaggcaagctgagatggccagtctgtgcatttggttgggaccttagtggggatgcagaagtatcctagaggaactactaggtgtggctagtgagaggagtttgtttcttctttccacttgtacagagcaaatcttgtttcagagcataactaatacatgggtagaattgcacattttccc

SEQ ID NO: 32209 - DNA, 803 bp, Bovine  19866881112496
  misc_feature (1)..(1): n is a, c, g, or t
ngtggtcattgtgctcaacatggaacctgaagcagttaacttcagtataacccataggggcttccaaaattgtgactctcacttgccctctgccccacgccccgtcttctaagcctcgaaccctactcaccctgcaaagcgagcaagcaggtagaaatcccccgactgctgcacgcgaaggagctgtgctttgtgtagaacacaaaaagctaaacctaaagctataacagcagaaccttcctgctgggggtaaaaaaggctcagaagacaatactcgttaaattaaaaaaaaaaatggtcaaaggttttaacaattttgacaagctctgaattccgcagtggggcgctgatgacttcaaggctttcaagagctacaacggttttgcaagaaccttgaaagttccctgtgtcctagagccaaaaccaattcctcctccccttttttacacctttacttccgacacccacgacttcctaaattcccaactgaccttatcaccagaggtttctaagttccctaaagctgacgctagacctgggtgaggtgaggtggggtggggtaaaagttgggcagagatgagttcttagcattcaaggaaggaagtttacaatcagctgaacacaatggtttctaaatctcggaaaatcttggatgtattataattgaagactagtaaaaaatgaatttacatatcctggatacccctgggacaactgctatgaaaatttataggaatgtgagttgcagtctgcaagttgctcctctcagaagtactgaggggctcaccatgactcacactggg

SEQ ID NO: 32210 - DNA, 1311 bp, Bovine  19866881132419
  misc_feature (1)..(1): n is a, c, g, or t
nctgaccttaagggacttgagcatctgtggactttggtgtctgtgggaggtcctggaaccaatcccctgtggatactgagggaagactgtaatattttattactgtggtggtggtggtctcagtcatgtctgactctttgcaaccccatggactgtagcccgccaggctcctctgtccatgggatttcccaggcaagaatactggagcgggttaccatttccttctccagggaatcttcctgacccagggatcaaacctgagtctcctgcattgcaggcagattctttaccgactgagccaccagggaagcccattttattactactattactgttaatttccttgttgccatggccctgaagatacagctggaaccttcaaagtttcctccttgtgtggttggctgcttgacagaaaatatgccctgcttgctctcccacgtgaggggcagggatggtgcaggggcctccatctccgcgcaggactgtctgttgtgggctgctcgtgcaagcccaagtcacaggcctctgcagaagccagatgtaggtagaggggtgataaaattttcaaaaagaaactttccaggggagctattaatgcgtcatgtggtttctgagaataggaacaggctgcaagcagctctgtggcactccttcaatcagtcagcctcggcatttccatgtcagagctcagaaagcccagataaagccaatttttgcatgactggaaagcaaatcttaagcaggttggaggtagatgcaccagggcgccccataccacctagtgtttaaaattgttgtacatctgggttcaggactttgtgctgcaaggtcataggtcagttgcccttggggtgtgggctccatcgtgggagggggctgagtttgaagatctggccacccagccctctatggcctgccattccagaatcatctattggtaactgaaaagggggccattaaggagaaggctggatgatggctgatatctaaatccacatctgagccatcctgagtggcatcttctcttcttcccatttacccttatcttaggctcaagcatctgtctgcagccagatctgtctgcctagagtctgctgagggctggagttcatatgtgcccaccagtcctgtgccctcatggtggctgagcctggggtaggggtgttcttgggtgatgagggcttcctgcacgatgaatatcaggtctgagattgccccattcacagggtctgctccacttggctttgactggacaggactggagcaggcagttggactacggagagaccacatagaacagccgagcat

SEQ ID NO: 32211 - DNA, 915 bp, Bovine  19866881139054
  misc_feature (1)..(1): n is a, c, g, or t
ncaagcagaggctgggcagcaacaaaaaattagtgatcagcttggtgggaagtgaatgtcccatttaaaggggatgtccctttgagagagatggcccagcatggccaggtgctctatcgttaggagaagccagaaattcagattcttatgtgaagtcttctcctactgaagtgttagctactaattcaaacgttaaaaaacactccacaggtcaggccaaatgtgtctgagtcagatccggccaactggctgcttgcaagtgacctgtttagacaattaaggaacagagcagccggtttggaaagatcccttctgccctcagcaacacagcagcatgacttctccgggtgcaagtttcctggggctgctccgggatcatctcatgcctagttaatttccaagactccaaatttgtcccacaggcttagtgcctaactcactcagctggttccagggacgtttataggtggtgagctgatatagcaccacctcactagtcaattaaaacctctgaaataaacagcaggcccagggcaccattatgagaacagtaaacactctgcccatatccactggcttgaccccctaaatggcttcccctggtgagcaaattctctttttctggtcttcagggccaggcaacctagtgtgatcgggcagctaggagagctttacccttgtggccaggcagaatttgcctgtaattaacatccactttgctgggccctatttgcattagtctcttcagggggaggtgggttggggaatctttaaggggctgataaaacaaagctcacatttatctctgcttaccactggggatttagaaataggaataattccatatacaattacttaaaaacgtatttcagagggtgctaactagctgctacccagattccagagggtaagcct

SEQ ID NO: 32212 - DNA, 1633 bp, Bovine  19866881318999
  misc_feature (1)..(1): n is a, c, g, or t
natgagttagtatttgtgaagtgcttagagtagaacctgacacacaatgttcttaaatgtttagatattaagaaaatagtgaataaaaggtagttgaagctgttgaatctagtttttgatggtgatgatgatgttattgtggtgaaaagatcttcccatttagagatggccagtgggttcttggctcttgtcatcaggatctagttttgaaatcaagtgaccaaatgactggtttaggaaaggacaacatgctgatttaacacttagttctttgctgtcttttttatttaactttttattttagaaatgttcaaataggacttccctggcagtccagtggctgaaacgcttccactgtaaggagcaagagttcagtccttggtcagggaactaagacgtgttgtgcagtgcagacagaaaaaaataacactttttttttttaaaagaaatgttcaaatatacccatcttcatatactgatctggtttctacagtttgccagtcttgtttcccctacatgctggcgttagtgtgccctgtggctctgaggcactgtccagcccttgccagggttgaagccagcttcccagagccttctcagaactggagatcccctcagtcatttctgtaatttctggctaatcggcccagaggctcaggttgcacagaaagataatgggccttaatgagcacctggaaattcaggttgggcctgcctgtggcgcgttcattacttatgtcacttctcacagggcagggcttagccaccattaagccaagatgccccacagcaggttaagagccttgcattaagttatttgcaaaaccattttcattttttcaggctgccactcttggcaagtccaatcatgctcgtcccagctctcactgcccaggtctgggccagctggggaacagaattcagtgtggaaaatgagggcagctcttgttccctgattatatggccagccccccaaacacagcccagtggccccattgtttctgctggggtgtgggtgggagaacgttgtgagcacattcactgtcttgtttaatctcacaaaaccctgaagaggtgggctcagtcagtggtatccttcaggtgccagtagaaaaaactgaagcccagagaggttatgcattttgtgtaaggtcactctgcaagaacgtgaaaaaatctgggtttatataatcattccagtcacagactctgaggctgttcttgtcaacctcttcctgtcattttaaaaaatccttgccatgctcacccctccccaaccccttcaaacttgggaaatcagttgtagaaccagactaaaaggtgagggtaggcatgtgacatggttttaattttttttttttttaaacaaactggcaaaggagggttcaggagtgattgagactaggttactcatattaagggccatcccaactctgctgttcactagttatagggatcaaacaaatgtcttaacctctgtgagcctcagtttcttcatctacaaaatgggaataatccgtggtgcttatcctctgccccctgctgctgctaagtcgcttcagtcgtgtctgactctgtgcgaccccatagacagcagcccattaggctcctctgtcccttgggattctccagg

SEQ ID NO: 32213 - DNA, 1393 bp, Bovine  19866881332087
  misc_feature (1)..(1): n is a, c, g, or t
ntggtatctctttatggaggttttagaatatttttgtggtgcctaccaggagctgggtgggagcaggatagctggtacaaggtatagaaaattttcgttttatgacgtataattattaccatatatcttgcaccatgttttgcaaagaattcccaagtcttttctgttatagaactgtcttttaaagtaaatgaacactaaaagacccattccacaagtgaagatgcccaggcagggagtctcagaaactgatccctggtgattcccttgggccatacactggacttgtaggatggggtatctggatgcactagaatatcagtttgaatatttatgtatttctctatccctggactgaaaatttcatcagttggcacattgatcctcttgccaggccttgaactcgaaagcctgcttggctcaatcttaaggggcctcaagtccctatacaccaccgtgtttcagaccagtttttctttctttgacttgatgtccccaaagtggggtaggtaacagttcattcccactttggaggagatatttacctctgaccatgcctttattatatgcacgtatatttccttcccactccctaatctccctcctgaattccaaaccagattttgcccctttccagaaaagccagactaaatcaaggtctccaccaccagatctctccctcttcatggagaatgaggaagcagtccatccctggctaagccagattgtttgcaatgaatgtgtagaaagtggaacacagttgaaaggctttaggtaattgtgcaactctgatttttattgacttcgtcttctctcaccctcctaggtaacagcttgtctgattgctgtggtgaaaacagaccatgaagttcaagtgcggagagctgccatccacgtgattgtgctgctgcttcggggactcagccagaaggccactgaggtaagtcagtctcttaccatttgcaaatcccctccctctttgttttttatctgttcatcagtcttcctttcaccaggacaggcctggaacttttttcctgggtgaattcatacagatgaatcagtcatcagggatttttatagcaggaaaattctgttgtttgcatcttcagtaagagtctctattttctctgtgtcacattgggcaaactgcacactaacctccagaaaaaccaggacacaagtttataggttgaggtcctgggcctcagcattcccttcagagggacaggttccagggtgagctatggaccgcaccaagcctggtttttatagcgtgaacttgagtgatttgtcttcctgactcatttcattgttcatatggaatcactaaagggcttcatttcaaatgtctcctttctagctgtgagtgcaatccatagatttagtcatt

SEQ ID NO: 32214 - DNA, 864 bp, Bovine  19866881397270
  misc_feature (1)..(1): n is a, c, g, or t
nttaacagtgtggtctgcacctggcatctaacattaccttcctttacgctcccaaagtgaaatctggtcactttccccttaatgtggatgttccacatccctgacttatatccagaattcagtgaaccacaaagggacacggaaggctgggctgattcagccaatgctgcaaagcgatctcttggtgccagcactgacaaggaccaaatgcactagggggaaaaaaccctcgcaatgaaatcacaccacagatggaaaaaactgttggggccggttttcctcctaatcgcgtgcacactaggctggtgacaataccaactgaagaagcaacaaaaacacaataggtaagttgttcctgcccaaccaaggggaggatctgactgccctacctctgtgctctaatacccaaatgttgtggaatttccttggactatgcttatatgcagtctgtttctagtgcacagtcttccctgctcactaggaggcaaagtgggatggggattcaagttctgaaacacaatctaatacttgttatcttatttcttcctgtgataaagatgttccacatcatttggaagtttcctttttttagcagtaaaactatcaggtgtgttacacataggattgcttgtaaatacttccactgacctgttgagagatttaacatgaatcaattgacttctctgaatcttagtttccttatctgaaaaataaagtagtagtagtagtaatgttagtcactcagtcatgcccgactctttgcgattccacagactgtaacctgtcaggctcctctgtccatgggattctctaggcaagaatactggagggactcccattcccttctccagaggatcttccgac

SEQ ID NO: 32215 - DNA, 848 bp, Bovine  19866881406535
  misc_feature (1)..(1): n is a, c, g, or t
nacatgtgtatacctgtgtatacctataacgtatggcactgagaaagcgtctcttccacttaattttttttaaggctctcagaaagtactggttggttcttgttatgagtctaatccaaccatcactgttgtctaactcactagaccagcttctgtatcttgataaatgttgatagagtcactccattgaattagcagctgattatatctgatttaccctataacagggttaggtccatttcctggcatgtagcagaaaggcctgatggtcaccaagctgatcacgattgcttcttaaattgcagtccagatgggtcatgctaacaggtcccccaactaagaaggacatccaaggagacctgcgcaagacttgataagaagcaccatggcttccagtacctccatagagcccttgaccctcacccaggaccacatcacccatgatgctgacatctgagggtgcccccttccagagaccacttgccaaaggcaggaggtgagaccaggatgctctgtgacaggatagattgagaagctctctggtttcagaatcagatggacctgggttcaaatcccaactcctcccttgcgatctcaggcagcgtgctttacctctctgggcctcagtttcctcatctgtgaaatggttaacgatagcagttgacctgctacgatgtcagatgggggaggtgtggcgatgtcaggaactcagcctcagacccacaaagccgatggctttacagtatcacaggcctcaccgacctgctgcgtttgtaacaaggtgctcctctctggacgtggtcatttcagaagcgatgacgatacctggctgctggtcaagtcctctg

SEQ ID NO: 32216 - DNA, 1595 bp, Bovine  19866881699134
  misc_feature (1)..(1): n is a, c, g, or t
ngggtgtgatggggagagtgggagggaagtccggagggagggcatatatgtatgcatacggctgatttacttcactgtacaggagaaaacgaaaacaacacggtaaagcaattgtattccaatttttaaaaagaagacaataaacaaagtaagatgagcttttctttgttaaaaaggagagttgtaaggcattctggtcgctagggtgctttttctttcctggtgtgggtaggaattttttcttggcactgctgtgtccttaaaacaacaataatgcttgtgcaaacaccacttcatacttgaggggtgctgagtcctttgttatcagttaccggatctccttttttaggtaactgagtgttaggaaaaaggctccttcttaattaatgggtctgtctcagcaacccgccctgagacttctccccaatccctatagcgctgaggatcccacacatcacaggacttcctccggactccccaaggatcaaagctttccgccagccagggattgtcaccaaatcccgtggatcaggggctgaatacaaggagagttcaaaggtaaagttactcacaggagcctctgtggtgggcaggatataggcaatcccacagaggaaacctctcattaagagttcaacacacctgctctcatcgccccacgcagcaaggccccaggactctagggagaggtggtggagggtgtgagtagggtgggtcagggatggcttcaagaagtacccggattcctagtctaaaagctctttggaaagggatggggttcaggtggtttttagaaaagaatgtagagtgtgggtgcaacacacacaattcctctcccccctcccccctcgcccttgcaggggccagttccctggagcgcacaaagctgatgcttcagggacacaggcagtcttcagggttagacatggcttagaaaagccagatgaggcacgaccctctgaaaagggactgtgtgagcaaaagactgccttgggcgcacaggtgccttttcaatggaaaaccaggaaaactgtttgactctttcaatgagcttgaccccaaacacgcccagagtggtggttatgtctctgtgttaagatcaaaagaagaaatacatggcgaattgctttcttcactttaatttctaagcttatttatatatttgattataaagacaatataaccacaacccagaatatctgggaaacaggaaggaaaaaagtctctagtcaaattacctaacacaaactccatgagtaaatacatttagcaattagtattcatttacatttaaaaattattttaaaagtcacacttccaggtgattttacaaatgaaactaaagtaagtgaaattactattcttttgtattattatgtgagatcagtaagacatacaaatggccacagatgagacatttacagaaataagaattccagaaagcgtaatctagaggaggactttccatctatatttttgtaatatttaaggaaaaaatggattactaaatatgaaaggattaaaaacttaaatgctagcacacactaactgtatttagaaattcagtcttctatagagctagaagaattgtgatt

SEQ ID NO: 32217 - DNA, 3098 bp, Bovine  19866880361388
  misc_feature (1)..(1): n is a, c, g, or t
ncaaataatagaattctcagattcttcagagttccacaccagaacttgaaggcatgagcagagcaaacccccctggtgtgcagtcagtcccctcttttaaacccactcttgattctaaacagcaccacagaggggcctcatgcatgtatgtgtagacatttggtatgcacatccaaattcttttcatgccccacctgactcacagcccataaagagtagtgtactgagcattcttcaggccttagagtgtacctaccagcaacaaagttggtactcagggaatgaacactgtgaagaggactctgcaactctcagtgcaagttctgggccatttggacaaagaattctggcatgctgggcacccagagtgtagtctagggtgtaagctccagattggcacattcccttggccctgctgctgttgctgctaagtcactcccttggccctacacattccttagtccttcataaggagtgagacccagggctctctaagcatgggactctcatctcacttgccctagtctatgggcaggtgtaaaaatcttgatgttcttccaggttccatttttgaccttctctttttcacattttacctatgcctttgtgatatcatctatttctatggtttcagaagctaatttctattaaccgatgattcttatatctgtatctcaagcccaaatctctctcctgattttgagactgtatctcagtacttattagacatgactattactcatagtcttccccaatctgaattcaccatcttttctatcccattgccatccactaagtttcccaggccagaaacctgggcttaatacttaacctctttctttttctcattctgtgtctagataatcaacaagttctagcaacattttctaaaattttctccattccatctagttttctccatttccactgctactctcctagttgaagccacccatgatctctacatccctgtagcaacaacttcctaaatcatcttgctaaataattatctagttagtcactttcccgtttaactctttcagttcttacctctctcaggataggtttcaaattccttagctcttgaataagccctatattatcagataacaactttctcatctgtttccattctcagccgtatgcaaagtgttagtaatccctaggatgagtcatgccctcctgcctctgagccttcctaccagtttctccaacccttacccttcctttactttgctaatatctgtcattacattcattctgtggtgtcactttcttcaggaagctttcttttattaatactgtgagttttgtattccttagttaaccccataccacatatcacactgtattataaataatctctaaattgttgtcacaccctctaaacagtgcttccctggtggctcagtcggtaaagaatcttcctgcgttgtgggagacctgggtttgatccctgagctgggaagattcccttgagaagggaaaggcaacccactccagtattcttgcctagagaatccccatggacagaggagactggtgggctacagtccatggggtcacacagagttggacactactgagtagtgactaagcacagcacagcttaacttttaaactcttgacactgtaatatcttaattgtatgctatgaaataattactcatattttttttcaattttcattactctgatcattaccttcctctcatctgggagaccttccttcaaacctgaaataatactagccacataaaagtatttttccagaatacaattctatggatcagtgtacatgttagtcaaagtaagcattagtaggagaacacactgatttaatggcagaatttttaaaagataaaatactgtgtccaaagctggcaatatttgaaggagaaaaacctaaactattattttatgcaccaaccctttaattggttaagcttagatattatgttgatatacaatattgaagtaaaattaaattagttgaagtaaatgttaaaaagtaaaactacaaatctctctcagtcaagaaaatatatagagaaactaacagtgggtgttcatatagtaataacgtatgtgtttaaataagaaaggggtgatgcaaaaatgaatgattatccatttcaagaagcaaaacaatgaaacaaccattttcaagtttataataagtaagtgctttgggaaataccctatttttatatagccctaaatttcattcagtttatcaattaaaccgttaaaagtattttaattgtggcatttaaaatttttccagaatgacatatatttggtctataatctttctctaacatagcagctaaatcaaccaaattaaccatacatgatagtgagataacacaggtgttataaccgtatcactctcgtttttatgatctttgaggcttggtcactgatgtttaaaatatgcaaaaacaaggaaatctctgactatttttacctggtatttcttctttcttctacagtttctgagctctagacaagtggaaactttgatagagaatgaaaataagataacacacactcaatcatacctttcaggcgagatgaattttcatgatggcattagaacaagtgcaaatgacttgtgacatttttattactaatcctctctgtaggttaagagtatttgtgagtctcagcagaattaaagagcctaaatacttgatctaaagaatgatacaccatattatggaaaatgaaagtgattagttaattttgtacgtatatatccttagtcaagctattcattgtgttgtattctttttttccccccctttttccttttctccccctcttccattcaggagaaaagatcatgcgattcagctacccagacattcactttgatatgaacttaacatatgagaaggaggctgagctgatgcagtctcatatgatggaccaagccatcaacaatgcaatcacctaccttggagctgaggcccttcacccactgatgcagcacccgccaagcacaatcgctgaggtggccccggttataagctcagcttattctcaggtctatcatccaaataggatagaaagacccatagcagggaaacctc

SEQ ID NO: 32218 - DNA, 1690 bp, Bovine  19866880410203
  misc_feature (1)..(1): n is a, c, g, or t
nagaaagatggtaacaataaccctttgtacgagacagcaaaagagacactgatgtatagaacagtcttatggactctatgggagagggagagggtgggaagatttgggagaatggcattgaaacatgtaaaatatcatgtatgaaacgagatgccagtacaggttcgatgcaccgatacttggatgcatggggcctagagcacctgggacgacccagagggatggtatggggagggaggagggaggagggttcaggatggggaacacatgtatacctgtggtggattcattttgatatttggcaaaactaatacaattatgtaaagtttaaaaataaaaaaaatttaaaaaaaagaacctaatactgggaaagactgagggcaggatgagaaaggggcaacagaggataagatgattggatggcatcatcgactcaatggacatgagtttgagaaaactctgggagatagtaaaggacagggaagcctggagtgctgaagtccatggggtctaaaagagctggacatgaccgatggactgagcaacattaaagacttataaagtgccaaacttctgcgtgtatataaggactgaagggagtgtggtaactggttttaaaattaagaacagagaatattaaattatctgagcaacactataaatttacagttgagttttttattatggccggttaaggactggtggtatacaataagaatacagagaaagcagtagaagaaaacaaggtaggagagggaaaaacaaacctggaacccaaaagaaatggctgtatcaggaagcagaaagtgaaacaaattgaaaagaaacagtcagagagaaaaaaaaaaaagggaggggggttcccagggaaatgagttgtcccaaagtcacagcttaattttcctttgaggtatgttactctggaagattagtgattatcattttctactcacaattgatctgttttttcttactgtctaactcataatgctagaatattttctcctaatgggctaactagtgaagattatgacagagaaattgttccctgggttgcagtagtagttatcagggcagctgtctttccaaaggctgcaaataaattcagctgaaatctagattttgtctttgactaagagtcaaatgtttcccatgttttcttttccttgttttcatttagcgaaagcttctctcttaaccttcacatagtcattggtcactgtaggctgcgcttacagtacctagactgttcagagatcccagattgtgcaccagcagactagcacaggctgttcctaccagctgaggtccaggatcacaaagcatcaaaggagtttgttattcgcccttcaaaagcctgttgtgtttgctactgtgaaataattaaaaattaatcaaggtgatgaaatatgagtgtgataagcagaactgctatcaatgaaaattaaattaatgctgcagaaaagtgaggagatcatctgagtgtctcaagctcttgttttagattacagaaattacaaaattgaacttgttggtgatgcattattggaaagaaatatgatgtagaattccaatcaacagtcacttaatcaaagaaaaagtcatgaccttacatcaaaagactgggatgtgagtgcagatgaactgttttaagttgaaatagactatttaaggaatgaatgtatcatta

SEQ ID NO: 32219 - DNA, 830 bp, Bovine  19866880463255
  misc_feature (1)..(1): n is a, c, g, or t
nggaagtatggagagtaaaaattaaagaaattcagtgaacaggttggtagacagtttgcagggcattatatttttatgtcctcttttccacagctaatgactttcatcttactgtgacttcatctattcacctttgctgccaaagacaaacttttcgaagtggaaaagagtagagagagcataaaagtttctaaattcctaagtgacataggagaggtaaatattctttaattatcttccaattttgcttccattggaatatatctgaaaacaaagaagtttctaaaacttaatgtgagccactagtgttcatctctgcttacgtatgcaaattctcatacaatttttaaaataaaaatgtcacaattccagaagttaaataccttatcattgatgctgatgtagtaagtaatcatataaaatacttgcttcacagaatcttcatgtgtaactaaatttcaaatactttctttcatgttttgccactctaattttttttcttcgttagcctcaaagtgtagaagcagtttccaatatcttacaaatgcatttccttccaatccaaaatgaactttaataatgttagcattagaaactagttccatagcaagtgttacaggagcttttacatggacacacttttctagagaaattatgtgtataactcacaatactataaacaaacttacacagaattttcttttgtgcctggtaggagaaataggagcacttcaaatatcctgaggatgtttcttaacagctctcccttggtcaattaagttgtattattttgctaccaagttcaaaccactttaaagcaagattcagag

SEQ ID NO: 32220 - DNA, 1021 bp, Bovine  19866880464970
  misc_feature (1)..(1): n is a, c, g, or t
ntgctgggagggattgggggcaggaggggaaggggacgacagaggatgagatgactggatggcatcactgacttgatggacgtgagtctcagtgaactccgggaattggtgatggacagggaggcctggcgtgctgcgattcatggggtcgcaaagagtcggacacgactgagcgactgatctgatctgatctgataggtaccacaataataatgaatgttattctaagtatttagccctttgcttgtaatactaatccagtagatggttttccatacgaaaggattacattttataagatcgcaagctttcagaattcaagaaagaaatgcaagtataatctgaagaaatttttttcaaaactgcgattcttaactcatgtattacacggaggttatggtgctttcatatttcattaaaatgtttaaaaaagtttatatgatgtagaccaattctgcaagactatagaaatgaatatgaatggttaatcatgaatttaaaaatcatttagtgtctatatatcatcccattttttttgccattaaaatattccctgtttctcatcaggagaaagtggatcctaaagaatgtagagattcagataagttgttttttattaatacaacctagattttatttatataaatatttcttacaatatacaaagccctaaaacagtaaagtacagaatttattaggggtttgaaggtctaataatgcatgtataatttgatgcaatgaacacagctataattatggtctacaggaaaaggattttctgtacttaaaaaataagtcctcaattatcacaaaggctacattatctttcattaacttaacaatataactccactttaaccatgaaaagtaatgaaaccttaaaaacacatcaataattgagtcaaaattgcaagcatgagaagagtaatgttaaggccaggcaaattatgggttcagttaagtgactttcaaattttaactttttccactagagtgattatttcactctttttattaggga

SEQ ID NO: 32221 - DNA, 1480 bp, Bovine  19866880522400
  misc_feature (1)..(1): n is a, c, g, or t
nacccctcacaaacagaataggtttatttgtgatttgcattaattaggtaatttcagtttcatttctttagtaactgatttgaatacaacagaattaataactgcctcatatctgcacacacatttattttcaaacaaggacgacctaacagcactcagacagatgaagagcaaaaatattcagtggtgcaggtatatcttgggttttatcggcaatagctttggactacttttttaaaaaatggttgttgattaaagacagctgaaaagcacagcctttggagaaaactattgatacaaatgtatgtgggatctttttcttggttatttgattcaagctttttctcatactctttttatctaacaatcaaataatagccacaattctagttagcttaccacatgccagtcatcattctggagactttatgtatatcatttctaatgctcgccacttctctgacaaggcagattattaatatccctagtttacaaactgagacactaagagatgaaatatctgtctagaggttacacatttgatatatatcaaggctcactttttttatactacataggaaggggaagaagaaaattcatacagatctgtatttttaaaactatatgttcattattttttagtaacaaataaaatgcttaagtaatgccaggaagaagagattcctctgagactgcttaaataaatattaagatcaagttttaatgagcatattttatgttagatgtgaaagcattctgaatagtctaaaatattttactgaatagtttaaatatattttatttaaatatattacttttaatagacttaaatctaatttattcttaaggcagttaaacatataccctgatcttgtttgcattatttatggacttagcaaaccctccccttcaacaataatacatgtgtaaacttcattctcacatctgataatttttatcacaaggttaattttagaagagtattccagtgggtaacagttaatctgggaattctaaatctctgacagggtatgatctcaagaaagtcttttgaaacagtgcttgtgtcttagatacttcaggaggaaaatggaaaaatgagagatcagagaacaaaaactggatgcaaaacccatcttatctgctcaatatcaagttccttcttcactgtcacctcccatgacagtaaaaaggaagaaagcagaaaaacttcttaatgtttctggcaggtttatcgtcaccctaactccctaatgccctttcccactgaagggaagttaaaaggcaactggggtacaaaaccaaaatttactgcatccatgataatttaggaacaaaagatacctctcagacacagcatttatttcagtcacttttgtaaaagataaaaacaatagatgattagtccgagatggccctcagtaacacccctggtttacaacagaaaacaatctattctaggtactaccaactgctacta

SEQ ID NO: 32222 - DNA, 1714 bp, Bovine  19866880547335
  misc_feature (1)..(1): n is a, c, g, or t
ncttcatgaagaggctcgttagttcctctttgctttctgccattaagagtggtgtcatctacagatcttgattccagtttataattcatccagcccagcattttacatgatgtactctggatatgggttaaataaacagggtgacaatagacagctttgacagtatgtaaccagcttttattctgaggtaaccagaattttccttgaagacttttaattgtatgtgtcctgattttgtaaatgcatatgcttgattttttatagtgaattgtaggattttttatagtgaattggatgtggaagtgggctgtgttgcaggcttttcttaatttaaaatagcttatagaaattttcctgaacatttgaaaatgaataaccataccatagtattgaggaaaggaaatgacagtattccatttcccctcatttatgtgttaaatatttaattcctgaactgtcataataactgtagttaatacatttgtctttagagctgaaaagtatttcacatacattatctcatttgatttaattaaaagactagtgtacaaatactgaatagatagatccatagatgctatgtcagtgaaactaaattacaagctgtcatttaattttcagattagcattatatgctcaatacacattatttcctaatagttctgtctcatttatgtcttatgtatatcttatatttaggaattctattattattttagtaatggcattatgtcattggaatcctttcatgtttctgtatattggaacaaatggaacatcttatctacaagtgggtttctctgtgtaaatgaaaaactgtgagataattcctatgacacgttcattcctgaaaagaatcttgggttttatgaggcttaattcattttttctccctgtttgcaaaaatctagttttagcttaaatgttctcatgtgtagaaaaggtttggaaaacacctatattgatttttacaaatagcaatttaaaaaatagtttttgtgtgtctgtgttctttaccatgtatatgtgaattgctgtaatgccacaactcctctgcattttgctgtgtgccattaacctaaatttggtaaagtctagtgcctagatggtggcatatttttagtctttgcttttaattactttatgcccatgaggttgaggttgtgttgtgcttagttgtgtctgaatctttgcaatcccatggactgtagctcgcaggactcctctgtccatggaattttctaggcaagaatactggagtgagtcgtcatttcctactccaggggatctttccagcctagggactgaactcgtatccctggcatctcctgccttggcaggcagattctttaccactgtgccacctgggaagccgttcatcccaggtgaggaaagatcataaattttctttccatattcttcagattgtatgtcagtgcttgaattatacccagatagaagtcacatgaagacattttatgtgtatttttcacccctaaggagtattaaaataagtttagtgtttttagtatacattacctaatggttattttgttaatatttctcaattaaggaaaattaatcagctatttcctttgaggacactagttttatttttaaagaaggtttttatactgcctcagaaaagcaatatttgtactagaattgtcaaatgacagtcaatagataatatattttaaagatatccagagca

SEQ ID NO: 32223 - DNA, 869 bp, Bovine  19866880556686
  misc_feature (1)..(1): n is a, c, g, or t
nacctcataatatctttgaaaaatgatgcttgaaaatgttaaatgatctgactatagttaaacagttagttccctaaattgatttttccaaagcaatgatttcagcatgtgatcaatagttaaaatgatatttagccttaagtttatattaataacatgtcttagttaatcatttctttcaatttaatagttagtaaatttaaaatatacccttttaccattttgtatgttgaatttctacaggtatcgctttagttataataatagtggtagattcagaatgaataaaagactagatattgtgacataaaaacttctactttaggcaatgaatattctagaaaatacatgtgaaaacagtgtacacaaattctatagtttctgaggaaaaaaattttctaaaaatgtcaaatatagacaaaaagagaataataaaaatagaacactagttctaaaagcaatctcaccaacaggaaaataactattcagtagaaaaacctataaacagctttttctgtattagtttttctttccctgccttggaaatacaacaattttattctctaattctaataacactgtatttgataagattatacaccagttacctatggttgttcaattcattattttgccataagtgtaatttattggcacacttttaaaaaaatattctagttttaaacgtaagcgtcagctttaaaaaagaacagagcattatgaaaaaaatgttatcaaaatctacaatttgatgttaaaagtctgcgtgagaaagaaagtcaacctgggtctccaggaagtctgagaaaattaaaaattgaggaaaagctctcaagtttcaaataggataagtcttaaatacaaacaaa

SEQ ID NO: 32224 - DNA, 766 bp, Bovine  19866880592782
  misc_feature (1)..(1): n is a, c, g, or t
nctggaatgggggtggagcggggaggaaaagggggcacccttccatccctgtcagtcaactattattaactattatgctgatggaatggaatctaaccttatactggccatgcctggccctcttccaggttcaacgggatgggcaaaggagagactgtggttttattaagtgatcaggcttttgcttcttcaagatagctctgttcatgtaatagaaagagtcttaacataatattctctaggatacatttactctgttccaaaaatagttccataataactggtacacttgaagtaatcttgggtttaaaacaaaatttagaagatgtcaaaggaatggaaaacctgagcaaatcaaaggtcttgatatgtaacatatggtaagatttaaccctagtacagcagcccaaaaaaaaaagtgatctaaatgctgtctgcttctgtatttgactcattatttctgtgggaattttgatctgcataaaggtaagccagatcttatgagacaacaaataccaactcgtatcatgaccatatttccaattcagaaaaccccctcaagggcttataaaatgtagaattctgattttaacactttgcagttctttggaggtacaaaaatgctaactaattttaataagaaaagatctcttttatctatatatgtgtaataaacatcaattattattttgtcattcataccttgtatcattgctaaatatttcaaatcagcttaaaaattaatattctgtttgtcaaaaataat

SEQ ID NO: 32225 - DNA, 1372 bp, Bovine  19866880637676
  misc_feature (1)..(1): n is a, c, g, or t
nacacacacacacacacacacacacacacacttgcagacccagagcagaacttagaagcctgatatttttaaatgtgattttataggcaaaaagcagagaatgaatcagccacatccttcaaaccaccattctacagaagaaagggaaaaaggttcaagtttattccatctcaggatgttctctgagtcaaagaacaagcccaggtccttggtgacctctagcctactctttaacaggttgccatcaatctaggtattgggacagactgggagctacaaaatgacaacacatttggatatataattgctcatataaaacacagatgtcatgaaatgaacttttctctgctttcaagcatgtttcaggttctcgcatgagagcaacctattgtttcctgaaaaagcgtaccagaaagcaaacaaacaaaaagagtcctggacttcagccttcttcagggtaggcctagcctgtgagttttttctagacaaatctacttgcttatgagctgaccgactcagagatctccgccagtcttgaaataaagaaggagaattcaggtcccatgtaggcagttccttagctcattgctaagtcgcttcagtcgtgtccgactctgtgtgaccccatagatggcagcccaccaggctccgccgttccctggggttctccaagcaagaatactggagtgggttgccatttctttctccaatgcatgaaagtgaaaagtgaaaatgaagtcactcagtcgtgtccgactcttagcgaccccatggactgcagcccaccaggttcctcggtccatgggattttccaggcaagagtactggagtggggtgccattgccttctccggtatgataatgctaataaatactaaatgacctttcaggcattccatagggtggaattatttaaacctctattccactcttctagcttaactctgtcactcaaattacttgctttgtccttgcctaaataattttctctgtgtttgttagggcaagtattttttattttgtttgggtgtcctaatccaaacccaagtcatgatacatgcttttaagaagaattgatgctttcgaactgtggtgctggagaagactcttgagagtcccttggacagcaaggagatcaaaccagtgaatcctgaaggaaatcaaccctgaatattcattggaaggactgatgttgaagctgcaactccaatactttggccatctgatgcgaagagccaagtcaatgggaaagatcctgatgctgggaaagattgaaggcaggaggagaaggggatgagagaggacgagatggttggatggcatcattgactcaaaggacatgagtttgagcagactctacgagataatgaaga

SEQ ID NO: 32226 - DNA, 796 bp, Bovine  19866880672091
  misc_feature (1)..(1): n is a, c, g, or t
nattttaaaaactacaaggttaaaggatgaatgttttaagtagacatggcattaaatgaacactgctgtaaaacaaattttaatgtgatatttttctctccctctcctaaactcctatgttgagaggaatttaccagaaaaagggaaattttgttcaggcttctgtgtcctcattatttcattcatcactgaagtagtccattgcctgctgacaaacttcacacatcactacctgggaatgattgacagctgacattatctgcaagacttgattgagctaattgacattcacagtctgagcataaaaatgagagtgagggaaagtcttcctctttacttatgtgttcttgcttgaccttcatctgtgtttgcattgtgtggctttagattgtagagattatacttgcaaaatgttttcacaagtatttaggcatttttaggaatactcctaaaatgaataattctttaaagtttattctgtatatgactatatcaagcaaataattcttctgtatttaaaagctatgcctgagtcattctttactttgacccacatcaaattaggctaaagtaaaaagactaacaaaaataaaacatacaaccactaaattatcacttgagaacccctctaggttgccacattcttcaagtatatttctagattaacctacttatttgtgccaaatcctcacaatagctctgcatgttgggtatcgtctctctttgacagatggacaaaaatagagctcaagtaggagctggtcagtggagtattcagctaattgctcagtgatag

SEQ ID NO: 32227 - DNA, 1635 bp, Bovine  19866880680520
  misc_feature (1)..(1): n is a, c, g, or t
nttcctcttactttctgccttagagtggtatcctgtgcatatctgaggttgtggtatttctcccggcaatcttgattccagcttgtaattcatccagtatggcatttcacattaatgtactctgtactctgcatataaattggagaaggcaatggcaacccactccagtactcttgcctggaaaatgccgtggacagaggtgcctggtaggctgcagtccatggggtcgctaagagtcggacacgactgagtgacttcactttcacttatatatgtatatataaattgctgttggagttcttggcagattgcattaacatgtagtgcatagcactgaatagaataaaactagaaaaattaatttctatttggcatattactaaaaatcctggatttttcatatactggataacttgtagtcaacttcacttataacttgattctgtgttccactacttctttggatgcttttattaggtctgtggtttagtttagttctagtttagttctcattaaagtatatttagtaatctgtcttactttatagcctgacctctgactttaacggctgaatatccttaacagactgagattctggaccctaaccagagaggacattaggagctgtgtggtggagaattacatttgttagtcctgctctgaccttggtacctcagttccttagggcccgagtgtgtggtttgctttcagggttttgagtttcttgcccttgccccataactagcttcagagcagcaattgtttatactctattatttcatactcatactacattcatacatgttgttccctgttcctggatgtcttcccacacagtttggcaaacctcatgtttcaagatgaagttttgtcatattctttgggaaaccttctttggtcttccctccctttatacttcctcccatatctaagtccgcttatctatttgcacgcatcccacggtattctcactatttattgactttctgtctctaccagactttgagctcattgtagttcagtatatatttaaaagaatgaatgacttctgctacttcattttgaatcattgcccatcacctgtcttgcatctgctttgagagtattatggatactggagtggaattgaacctaataatgatatactcatatacttttttttttcccttctattctggctaatatcttgatttcagtgtacctttggttcatgtcccagtttgagtctttggaaaacactggccagctctgtgtgttgtaagtcttcctaaactatttcttacactcttcccaggcctgatatgtctgctcttgagttttatgggcagtggttctgcctcattcatctttctagcctctgagtttatgaatttgcctaggttaataaatgttgggaaatgaagaagaattctaattactttttatcaattttaataaatttatattttaaaaaatccagccttccgcttagaaaatactctttatgaaaggaatttttaatgatcaggaatgacttaagaatacatcaagactataccaagcatttcatcttcaactaaatttaggattatggagagaacttagtaaagatcttatttttcctccatgtgtgttgcagttattaatgtgatcaaa

SEQ ID NO: 32228 - DNA, 2779 bp, Bovine  19866880682889
  misc_feature (1)..(1): n is a, c, g, or t
ntcttattgagtgaaattcaagtgacagaaaaccaattctctaataaatacctaaggagagataaacaggtatgttgatggccatatttatgagtttaattacagaaggtgctgatgggagattttgtcagacagaatatagactgaagtgaagcatttggagagtgtaagagatagaacactctattaggccggctgaatgatataacaagttctaatgtaaaaatcataagaataaggaagactacttgaatttacaggcagaaaaagtagtacggaactgaattaagctattcaaagttttaaacaacttgagaaattcctgctaggtactgttaagtttccttttcaaaggtgtatatgtgtgtggtcagttgtgtccaactctttgtgaccccatgactgtagcccactaggttcccctgcctatgggatttcccaggcaagaatactggagtgggttgccatttcctactctacgggaccatccagacccagggataaaacctgagtctcctgcattggcaggcagattctttaccactgtgccacctgggaagccctttttgctttaaaagttgaccttcatgtgatctgcatgatctgtaggtagcttggaaccagaaggaaataattgatcaggtgtgaatttcaggtgcctctcatgattcccttagtgagtagagaaacagaggtggtcatagtaagtcatataccatatcaatcaagacagagtaggcaaaagaccagggaaaaatggacaagcaagcagtcaagaagcacttagtgaaattcattcaaacaccgtacagggcctaattcttatttttaataacagttattattaagaaataaatatatattgaagaagacttagaaaacatgtaaagatgtatcaaagaaaataaaagtcatccttaattacatagctcagaaaaaaattttctaacattttggcatacttaagaaaattaattctctctctcctactctctcagataatatgcttacattgatattatctcaaaaggattatattgtatataatataaagtttcacttctgcttttatagctaaaataacgttggggcatttttcttgttataaaaattattgatgctttgtacttatttaatttattaacatttattgcttacacagtaaaatgataatttaaattttttcccattccctaattttctaaactcctacttcaattacaacattttcagatacatttttgtatgcatagcacatcatatatttgatatataacaaaccaatttcttctttattattttctgttatgaaatcatttgtgtcatttttcttatgtcttacactgcctacaaaactttaaaataaattttgctatatcaaattataaaaaagagttcatggtgttaaaactttaggaatgaatgatggtagatagtattatatctgattttatgggatatacatttaaaatttcagctttaaggaagatgttgcctgtatgtttgaaaaagataattctcttttcattaagttatattttttctattgctttttagtaaagagttttatctcacatgctagtaaggtaatgctcaaaattctccaagccaggattcaacagtacatgaactgtgaacttccgatgttcaagctggatttagaaaaggcagagaaaccagagatgaaattgccaacatctgctggatcgtcgaaaaagcaagagagtttcagaaaaaatatttatttctgctttattgactatgccaaagcctttgactgtgtggatcacaataaactgtagaaaattcttcaagagatgggaataccagaacacctgacctccttcttgagaaatttgtatgcaggtcatgaagcaacagttagaactggacatggaacaacagacttattccaaattgggaaaggagtacgtcaaggctgtatattgtcaccctgcttatttaacttatatacagaatacctcatgagacacgttgggctggatgaagcacaagctggaatcaagattgctgggagaaatatcaataaactcagatatgcagatgacaccacatttatggtagaaagagaagaagagctaaagagcctcttgatgaaagtgaaagaggagagtgaaaaagttggcttaaagctcaacattcagaaaactaagatcatggcatccggtcccatcacttcatgacaaattgatgaggacataatggaaacagtaagagactttattcttggggctccaaaatcactgctgatggtgactgcagccatgaaattaaaagacgcttactccttgggagaaaagttataaccaaccaaggcagcatattaaaaagcagagacattactttaccaacaaaggtccatctagtcaaagctatggtttttccattagtcatgtacggatgagagagttggactataaagaaagccaagcccttaagaattgatgcttttgaactatggtgttggagaatacttgagagtcccttggatggcaaggagatccaaccagtctatcctaagggaaatcaatcctgaatattcattggaagaactgatgctgaagctgaaactccaatactttggccacctgatgctaagaactgatggccacctgatgctaagaactgactcatttgaaaagaccctgatgctggcaaagattgaagctggaggagaaggggacaacagaggatgagatggttggatggcatcaccaactcaatgggcatgagtttgagtaaactctgggagttggtg

SEQ ID NO: 32229 - DNA, 1104 bp, Bovine  19866880862904
  misc_feature (1)..(1): n is a, c, g, or t
ntggggtcgcagaatcggacacaactgagcgactaacacatacacccagattcctttatgggcttccctggtggctcagatggtaaagagcccacctgcaatatgagagacctgggttcaatccctgggtcaggaagatcccctggagaagggataggctacccactcctgtattctggcttggagaattctatgaacagagtagcctggtgggctacagtccatggggttacaaagagtcagacaggactgagacactaacccacagaagattccttttggcctttagttttcttcaatatatccaaatcctaaggtaaatctttcctttacttaagatcagacgacattagctaaataaaatgtcaagatacttggcttttggctagaattacattaacagaactgagaacactgataatttcttgctaatctttagaactttagatgaactgtcctaacatcttaggaatttttgtggtttgaggggaaaagtgaaaacagaaattcctgtcacagcctttcctataacaaggaagagatacaagcaaacaagcaaaatacgaaacaataaaacaatgatgttttcatattcagtttatttaacagttttaagaatcattaatatatgttaactaccagtatgatgctaatgagatcaaaatgcacattttcatgtttgatttattaattttacaaatatttattaaggacttctaatatgcaaagaaatattttgaaagctaggagcaacatggaaatatataaattgtagtctttgccctcaaggagctcaaaaactatgcagaaagataagaaatagagctaaataaattcagtgcaagacagcacatgttgagattcagataaatggcaaaaataaaacattttagtagatgagtataaatataattcagaaagggtgccagttatgatacttaactagccgtgacaataaaggcaatttattgactctcagactcagaatatcacttgtagcagaagttgcaagcaaggcttgatccggcagctctgtggtattcaccaaggagcagtatgtttctctctccagtttactttctagagggcaaatgtattccaagg

SEQ ID NO: 32230 - DNA, 1672 bp, Bovine  19866880864229
  misc_feature (1)..(1): n is a, c, g, or t
natgttgacatacctttttttttatttttaaatattgttactgtcgttaattcttattttgtggacgcagtgtcatttgctctgcctgattacaataaggaagaaacggaagagagaagagacaggggacattgttccttaacagcttgacttgtttattgtgtgggaatttaagagcagttcatttctgccatgcatagatataaggtatatcatgctttgagaaaaaaaaaatcacttgattcataaagattcatctaaggattctaatttgccactgatgttcaggattgtgcaaaggcaggaaagattagcattttctgggttggactttcacagttttaaataggataagtaattttattggtcaaagaagaatttgtttcaaaatgtaaattgttttccttttcctctagagatcatggaacacacacacgttattttccatgataactccttggatgagtagttgttgtgggttctatgtttacttcccctgtggaatttataatacggtatgttgtaccctgtaccatatagaaaaacttataaactacaggtagttaaggacagctacaatacatctgaggtcctatgatcttatttttctaaacttaagcactgtttttccatagttttgatgacttgcattttatagacacccggcagccttactttgaacacctttaacaaatagtgtttttatctagttttcagaataacatatggtctaagagtggctaagaggcattcagtagttttcagaagggacctctgcttttcttaaatttgtttgggaagttttcttttacagctgtaatgtgatggcagcatagtatacgtattcctttctaaaaagtatgcttacgattgtcactttatcagcatttaatcagtgttaaccagtcagcagaaaaatatcaatataattaggctaacagtaggggggaaaaacccactcagaaatcccttttctggtatttctcttttcactagttttatttttcaagctttgaccccccagtgttttgtccatagtctgttcatcttttattcttctggtggaaagtcttaaaaatcttgctgtaggctatttctttcaaaatctcctcagagcagttgctaatttgacccaagtatggtaacttgaaccacataaggttatgaaactagggctatttattctagtatttcttcaataataatatttacaacttttggtacaaggaaaaagcaacttctttgtaaccggtgcattatagataaaacagaagcttatttttaccattcttggagtctagaatgcaaccgaacctccaagctaaagtgttcaggtccacacttttctgtctcgaaaacatgaaactattaatatatataagctcttatgaatctcagtcccttactaaagaatttttcttcttttaattcatgtatacgttggcatatttcatggacagattttaatttcatttatatggggtgttctgttttttctttgcagtttaacagcattagaggggaggaactgagtgaaattgattaaattcatgtgtggggggcccacttggagggagaattcgctgcttgtgtttagagaggacaggcctgaccacgactggattgtctgataaccatttctgcatgttaaaattacattaagcagtaagtg

SEQ ID NO: 32231 - DNA, 1901 bp, Bovine  19866880866911
  misc_feature (1)..(1): n is a, c, g, or t
ncacagtgtattggctaatggaaatggacccataatgttgatttgaatttctgagcaactcattcactgaccaatcgaatgaataaaaatataatatggaattattggaaattagcagttagaaactcgcatggcaattcatagaccaataatatgtcaatgttttattaaatagcctgggcttacagtgaaaattactggtaatatatatatatatatatatatatatatacatgtataagacaaaaaatttataaacaaatttattttgaagctgtactggatcatatctgatatgacttaagaaaatgtaataatcaattgaggataagatagtaatcctccaatagatacagaaagaataataaaaatacaaaataatatatacccattgtttataaaaatactagactattattttaatgcttttaaagttacattcaatgtatcaatacaattatgtctcccacaaaatcctgtaaaataggatgtaagtatccctataggctatttgagagaataaaatttccaaggtagtgtcttttgtatctaaactaattcattcattctggcctaagggaattactgtccagtctcttctcctcactaattacaaacaagcagttataactcaagggttttacagactaatgcagcattatgttgatggatgatggttcatggggttatgcttatcagagaagcagaaaaaggattccactgattagatcctttttccatggaaagggcttccctggtggcttagacggtaaagcatctgcccgcaaggcaggagacctgggtttaatcccagggttggaaagatcccctggagaaggagatggcaacccacgccagtactcttgccaggaaaatcccatggatggatgagcctggtaggctacagtccatggggtcgcagagagtcggacacgactgaccgacttcacttcacttcacttcacttccatggaaaaggatctcaggactagtaaaaaggagaagaaaaagggaaaataaagaaaatggcaaaaaacccgcccatatgtgttatataggtgtgtgcatgcatgaatagatattgattagatgctgacctgttctgaacttcataatttgttctctggttcacaacagaccaagagggcataaagctgacttgataaagcttaaaaatttttgatacatatgtgtatgtataatatatacatatataatgagcacatgggtggttctcataagtaagatgaggtattaactcaactagtgcagttaacactatcttgcagcctaggaacttactcacgtgtcactgaaggggcttggttcaagacgttcattttggcacatgagattttctctcttactgttctcagcttcttcagtaccaatatctctagcacccttgtcacaattattctgatatagaatgttccttgcttccttgaaagcttggatttgcccttacccattaatttgctataagcaatgagcataaataaccttggtttagagatgagtgggttgatacagaacattaaaagaacagtcatggaaactaatgtgggcataaatttgactgtaagtggtcccaccagggttgatgaaaaactgaataaacaagattagacagcttttttctgaacagttttatagtgaaaggatagagagtagtatatcatctacaactacagacaataccttcagtaaactccaaagttttatttgataaaaaaaaatattcaaacatactaaaatgtatagttatttatatcttaattttcaaattatggtctgaggaccagcagcataggtatcaccagagactttatggacttccctggtggctcagatgttaaacaatccacctgcaatctgagagagctgggttcgatccttgg

SEQ ID NO: 32232 - DNA, 2811 bp, Bovine  19866880996640
  misc_feature (1)..(1): n is a, c, g, or t
nttattcagctgtttctctcatgtggtcagtatggactcttgttcttgtggccataggattaggcaactaaccaaaactggatcacctaggatatccaattctgttcagaacagcatctggcctaagctaagcacatctgagtacctacctgagatctttcaaatttgagttgaggggatgggatatagtgccctttttattgcggtttgtgtgtttatgagcttggaagccctttgaccaaatatcctatggctgagacaatgaagaaatgaagagagtagagatgagacaactaacatggaagcctctgcgtgtgtgtgtgcctgttacataccaaagctgaagtgtgaaaattttccccttttcattatgttgctttaatctagacattacaatgagtttttatgtaagagttagtgaattcattacatcgctgaagctgcaggaggtctatagttcagtcaaggtgttaattggctggcactaagtgtggtttgaggttggtgtggcagatggaacccaatgaatatagagctttgttatacaaactatagatgtacttaagctttctacatctgtgctgaactttttttcaaatagacataggtgataaaacacctgctacctaattaacaccctttgtagtcactcacaacgttattctcaaacctgctctgccagctgtaaatgttaaaacttcacttgctattcctggatatttttcttccctttattttataaagtctaaattgaaaaatattcaagtctatcaaatgaaaaagaataaaaatggttaatgaatgagtgaatggacagataggtaaagtagaaaagttctgaaattttgagctgataattcaatgaaaacagtagcaagttaaaggaattttttcagagattagacatttctgagaaaatagcaatgtttaaatctcttggctcctttatactctcaaatccagcatgttctacctcctatgagccaagaaactgtgattacaggaaggaagggattatttaggggaggcaacttagctgtcaggtctcctttggtcctgatgaagatcactgggacatgacttgtacctgtccaggcagatagagtctagggcctgggatgagccatctagactgatggttagattaggctgagaggggtcctaagagttctgtcaacagagctcctcagagttgggtgaagttgctatgcatttcattggtatctctagtccagccggcctttagagctttgagaagagctaaaagtttctctacacaactaagagcaggagtctataaggagatgagtgagcagagatgttttccttctgggacctcaataggaactctaaatctgcctgttgttaatcaaagacccacaggagcagagtaaatgcaccattcaccactctacggatcacctccatatatgctatgccagcagctagacctaagtcctaaacaaatggagaaaggtattagcatattcctaaggagggctcaaaacagagaagaaagaactgatacctagaaaaataacaatctagaataaacaaatagcactttctgtcacatgctatggtatacagaatgtgatcatccataggccttggcatgtaacacttccatcattgattcatacatggccctctgtatttattaattcaaccctttttagtagtataataagcaactaagagtccaccagacgcaatgtgaaaggtaggattcaccaaacatttacatctgtttatgggtctttctcattctgttccctctctcccctccctcaagctccttctgaagcttgtttttcatttctttgttttcatcttaattactaaaacctcttttctttttttaagcttatcttcatgttaattgtttatgtataaattgctcaggtttatatggtttatattgttaaaattcattcctaccattgtatgacatttgtattaggtcagggttctccaaaggatagttcaaataaaatagagagatatacttaagagaagatttattacagcagttgacttgtgattggttcgtgaggtcccaggatctctaatccacaagctgagaaccaggaaagccagtggtgaaattcagtctaagaagggaaacctgagacccagaggcatcaatggtgtaagtccatgtccagttctggaggcccaagaaccggaaacacagatgtctgaaggcgaaagaagactgatgtccctgtcaagcagagatatcaaattcatccttcttccaacatttctgttctattcaggccctcactggattgaatgatgcccacccacatgggtaaaggcaatctcctttccttagtttaccaattcaaataataatctcttccagaaacccctcagaaaattcagaaataatgttttaccagctatctgggcatcctttagcccagacaaattgacacaaaaattaatcatcaagccacttctgtagtttatttattgtattgctttttaacagtctattccactatattcagtcacacttctgctacagaagcatacaatttgccaatctatggaagcacatcagttcagttcactggctcagtcatgtccgactctttgtgaccccatgaactgcagcaagccaggcctccctgtccatcaccaactcccggagttcactcagactcacgtccatcaagtcggtgatgccctccagccatctcatcctctgtcatccccttctcctcctgccccaaatcccagcatatgagtcttttccactgagtcaactcttcaaggaggcaataaataaagaaaatctca

SEQ ID NO: 32233 - DNA, 973 bp, Bovine  19866881122137
  misc_feature (1)..(1): n is a, c, g, or t
ntgctggatctctgaaatctttaattaaatataggtggattatatttgaccaacaaaaaaaacagattttgcagtttccttgatacctttaagaataaaacagattacccatctctctcttatctgccagaagaaatagttatctttctcacgaaccctccccctctctcgaaccattaatttagagaaggggagctcaaaagttttacccaataaatagtgagcctacacatccacatgtggctattcaatttttctagttatttccattgataactgctcatctctgtcttatctgatttcttcatagcatagctgagacttgtcagctcaccaggataccattcagttgctaaaaggggtaaaaagttatcatcattaagtagcccacaatgaaactatccagtgggtcgctgctaccaaaacaaatcacagaagcactggacaactgggccatctacaggatctgaatggatatcctgatgttaaatcctaaagggagcggtttttttcttaacctccggatgttcccctatggaatttattttcacggcattctgtgcttaagaaaaccactgagtgaaaggagggttggattaatttgtggggctactttaaacaaaattgcaaagtttactgagtggtgactacgaactttttccaacaggaacacatcagcctacaactacaacaaggcgaaaaattacagtgggcaggtttccggggtcgcgttgtcggaaagatcaccgtgagatccaacaggcgcctctaccagctggcggaccccaggcttcaaagggcgccctcgctcccaacacccgttaccgcggccagagtctgggtgccccgcctacacgcgaaggatacgctccaggtagtaggcaccctcagcagccaccgcctccgcggtgtccccggcagccgacaagcccatgcccaacgcttcttccaggacccgcagagcggaggaggg

SEQ ID NO: 32234 - DNA, 577 bp, Bovine  19866881326282
  misc_feature (1)..(1): n is a, c, g, or t
ntaaagtaaacagtctctctactactccctgagactctaggtttccaaaggggtacacacccaatctctctatacatataacatgtttgtatactgtgaaactagttcacaaaagcattatctacaatcccacaggtcatgataaaagtagtaatgacagttaacactttaaaaacttattggagagagaaatctaggaaaatagtgtagtaagaatcatcaagaatctgttttcccacctagaaaacaattgtactggcagaatctgtctgatataaccattttagatctctggcatctactgaagctttgcaacttccaggggatggcttggacagtaaattgtgatcaatttcagtcaatttgggggcttccttggtggttcagatggtaaagagtcggcctaaaatgcaggagatctgagtttgatccataggttgggaaaatctccttgagaagagaatggtaacccactcctgtattcttacctggagaatttcatggacagaggagcctggtgggctacagtccatggagtcatatagagttggatatgactgaatgactatcatacata

SEQ ID NO: 32235 - DNA, 671 bp, Bovine  19866881439803
  misc_feature (1)..(1): n is a, c, g, or t
ntcttccccttactatactagatgctcagtgaatgttcttgaactcttgttgcagctgatttacctatcatatttcttttttttttaagttacagagactgcacataaataattataatagagctaggtattaaacacaaatcagcaacataacattaattaaagggccactgcataaaagaaaagactttaagtgcattatatacatcactgatataatcataacagctgctctgtgaagcatacaatactaccttcatgttacagatgagaaaactaaagctcaaaatgggtgaagtaacttgtccaggtcacacatctattcagagccagatctgaaactagaactgagaactaaagaccaaattctttctatttcccctgtgtcatcaaaagcaaaatcagttaccagttaacagtaaaggaaaacagggatgccagtatgttaaggaagagtaactctggatcggtgtgtgccatctgccattttctctactgaatgtagaacacaggtgtagtagtttgccagctttgagtaaagagaaatttgtctgagagactgttctggaagaagaccagcttccattgccagattttctgagcatggattttatttcatataagagcaatctactttgaactggtgtttggcaaccatctgcttaacataa

SEQ ID NO: 32236 - DNA, 1164 bp, Bovine  19866881457485
  misc_feature (1)..(1): n is a, c, g, or t
natttttaaaaattatagatgtaattaagatgaaggtgactaggattcttataaagaggggaaatatgaacacatgtgcactataagagaatgccatgtgaacatgaaggcaaaaatcaggaccatgtagctacaagctaaggaaagacaaagatttccagcaaaccaccagcagctaggagagaggcatggaacagattctgtctcacagccctgagaaagaatcagccccacgaatacagtattttgatctcagactttgagccttcagactctaaaacaatcaatttcccttgtttaagtctcccagtttgtattactctgttccagcaccttagaaaattaaaacaagctcagataaggtcaaggagatgcagaagtgatcaagaaactactcactactgtaagaaccttttgaaagactatagagaagaggaaaggggccacagcaccactggtggggtaattttaaaacttttaaagtcaagggacgtgaattctgcaaatgagataagtaagcttatgatgaacctattaaaattagtaagcaaattagctgtctgtgcaacaacgtttttaaaagttctaatatgggttcactaaggatagcacttttattattgattcaattaggctggtagattaaaatacatggactttgttcactctgaacttacaaatctgaagaaacctttccgaatattcttaaggtccaaatggagaaatatgcaggaaataacatgagagttagatacctacataacaggttaaacaaccacacccaaaaagtgttgattaatgaaaagatgttaacttgaagaaaagtctcaagttgtatgccatggggttacattaaccagattgaaaagaaatatgtacagcatgtttgtcaaacctgtggatgatacgcagctgacaaggatacctgatcctctgaatggctgagtctggattccataaatcatcccactgaggaaccactgaaggaactagagatgtttaatgaggagataaggagcaatgtaagggtaggtaccaaagttcaaggctggaaatatgaagacgtataggagcaataaagttcttgcagcaagaatttgacatcttagtgaaagaaagaatatttctctctactacgatcactctagctctaattactctatg

SEQ ID NO: 32237 - DNA, 1019 bp, Bovine  19866881756245
  misc_feature (1)..(1): n is a, c, g, or t
ncttgtaccccccccccaatatcaggggttttgtagaggcccatttattcacaatacataaatcagcttatatggatagaagttacatttaacaggatgctgtctgttctatttctgcttcaggcagtgaaatcaggaaaaaaaaaatgcaacactatgaatttgttaaatcactaatcccaatcactttcattttatagaggtatctgggaagatacatgctgcttcacataataagctgtggtcaaagaaaagaaaatgcaacctcaagcttccagagaactgaacattgtatttacactcaaaatcatgttactgtcatggagcagttacctggtataggttaagacaaaatatgttttattaaggtagttttatcaatcttttactattaatcaggaagttgatacacaactcttttagttgctcagagctaaatggaccaataataatacatgtctgtgaatagagcaggtcaaatattacacattttacattcttcagaaacaacagaaatattttatttttaaatactttaaattcaaatatgttcaatgaataaaagataataatgggtaacatttcttgagcatatatgttccagggaacagaactagtgtttttcatatgccttaataattaacctacaaagtaggtatcattattatacccattttgcagatgagaatactgacacgactagcaaatgtgaagctaagattctcactttagcagtttagagcatgtctaccttgccacaggactatgcttaaggtttctgctttttggcattatacatttcactctttcaacagtgcaaaggcagtggcaatgcacactctctacattattccaccccctcatcattttcagcaactcatgaatccctttcatcagtctacccagtaaacggaaagggtgctttaccttaccaatgtatgatcgccatctagtggtaaaaacttaatcatgattatttatccatgtcattcctattaacagtgtctttttttttaatt

SEQ ID NO: 32238 - DNA, 1077 bp, Bovine  19866881890568
  misc_feature (1)..(1): n is a, c, g, or t
nagtaagtatcttttaatttccatggctgcagtcaccatctgcagtgattttggagcccagaaaaataaagtctgacactgtttccactgtttccccatctatttcccaaaaacataatttgatataaaaggacaaattataattgtataaggaaagcagcacactatgacagtatccaaaagtaggaattagtgattaattttgtagaagttattaggttgtttatttaaatatatatttgctgtcaagctagttgaataatatacctggagagctactgaacttggacttatgccatcattttccagcctgttagaaaatattttataattgtagagaattaaaaaataaataaattgcccaaaccatcgttaattggaataaacaagccaagaaataaatcagcattatgccagaagtatatccacattttagggggttaatataaccatcattattgtaccaagaaatttccatttgtaaattcaaaaatataacttcttttctttctcactcatcttatctatcatctatcatctgagagttcagttttttctttaccaatcctttcatccatttttatattaattgtcacagtgctgttaggcataaaaagttggagtgctcactatttaaaagtttctgataagttgtataaacacctaaattattccacatatgaaaaataccacagttcagctgccacgattattaacaaaggccatctgactttaaagttcctttctgctgtaacctccctccagagactagattattttctactaagcctatggaatcattacaacagaagcacaaactgtaatcaatctatatcttatttatgagaaatgaaagtttttgactttagaagaaaaaaaaatctctctcacaattgaatttacttccacaccaaaaaaagattaaatcaaaagtataacagtttcctctttagagttgatctttgctcaatgaatcacatttaaaatcctcctgatatgttcgaaataatgagtttgaaaggaaaagaataagaagaaataaaaccagtggtagaactataagtaaaaaacaaaagt

SEQ ID NO: 32239 - DNA, 1267 bp, Bovine  19866881943618
  misc_feature (1)..(1): n is a, c, g, or t
ncacaaatgtgaactttataaaaggcttttccagccagattcatcagctccattttagaaaatgctgtagaatgagggacgttgtcttgttcatctaacaggtgatgcctactgacgagaattgaatgttccttcctgcccacctgcactgcttccttcttaattgaaaaattcattgagcaatatagcccccagaccggatgagagaaacagaatgatttacataaagaaaacagttaaatttaagaaaaaggaaatgtgaaatactaagattctcatatgataagttatcttcttttaatagcatgtactattaattttttggtcaaataatgtgccgatgtgaatttatttctttaaaaattaataatgatgagatggcaccaaataagttacaaaatggagtttagtgtttgtattttattaataatatgcatcctgttctttatgatacatatgctaagttgactctattagagatgaagggcatattgtacaacattaatggttttaaagcataataatgtaaggaggatattgagattcaagggcatgtattgttggtacattaatacctgtcttgcattataaaacctcccagctttctgccttatacttgtaaaggaacccaaggtatatgttaatagattgctaaagcagtacttgaaacataattaggttacattaaaggaaatggtgacattataaaattgacctcttgtgatcaatttatcctgttccacagataataaatcaattactacatcttgggttttcatttatattcaaatgaatgattccctctagaaatacatattttgagtgatagctaagtattattgaatataaatacataaataagtccataaataagaaaaagaaaatagcatattatttgcactgtcatgctccctctaaaccagtgcataattaataagcactatcaaagaaatatctactgatgaagaaaagtatattaaggcttaagttccaggtttcattagcaagttaaacattgattgacttatcaagaagctgtctcgcaaccagtgttggctttttgtgtatgcgtgaagaatgcttcaagcatcagtgtctactgcaataagcttgatgtgagcattcttttacctcagtatataaagacttgactaataaaagagataacattaagaatttaacatttagctctttgcatttataaaacaaactatttcatgtaaagagttatataatctgtatctattttcactaaataaggcatctt

SEQ ID NO: 32240 - DNA, 3188 bp, Bovine  19866880285395
  misc_feature (1)..(1): n is a, c, g, or t
natatattcaagaagtatttgaaataagaaaaatttattcttgcaacagaaacttttccttgtcaattgcttttatccctgttgagaaaatgaaaatatagaaaagtggtttctagatagttgtgcctttgtttgagaggacattttgacacaatgtatataatattcttcagtttttcatcataatttgaatacctgaatagtttatagcttatacctcatagcttaaatgattcagaaaaatttgtagtgcacaaatacagacagcaatattttagtactgaaaaataccacagtttagtagattttagggaaaaaaggattaaaattatgaaaaataagaaatttattttgtcccccatttctttatgacaacaggacatgaaagatgaccttgatcactacactaatacttaccatgtctactctgaagatcttaagaattgtcaggaattccttgacttaccagaagtcatcaattggaaacagcatctgcagatccaaagtaagtaacaggaatggactcacctctccatcctagcaatttcttcttgtcgtctacgtcctttctccaagctccagaccctccacctgctgtcaacagttttgttgttgttgttcaactacaactgtacatgtaaaggggaagaaacaccctccaagcttgtatgggtttctatagaggactgtacatagtccccggatagccaagatttgtgccacactttgcagacataagcaggatatcttaggatggttgggtatcagagcagagctttccccagagaattctgttcttagatcacctctcaggtcacagagaacagctgtcatggttatgagcaacccctccagagtcagaccacctagaatggcatttgcctgtggctttgctatgtgatcctagccagagacattatctgagatcatgatttaggtatatagaattgagaataatcagttcagttcagttcagttgctcagttgtgtccaactgtttgtgaccccatagactgcagcatgctaggcctccctgtccatcaccaactcctggagctttctcagactcatgtccattgagccaatgatgccatccaactatcatcctctgccatccccttctcctcctgccttcaatctttcccagcatcagggtcttttcaaacaagtcagttcttctcatcaggtggccaaagtattggagtttcagcttcagcatcagtccttccaatgaaggacccaaaacgcagcagtgttgaaaagattcaatgaaatcttgaccaggaattgctgagtacaatgcctggatgtttcagttcatttcactgcataggaaagctcataaatctgtgaactgacaggtgggctgggcttggcaaggcagttgttctgttggtctcctctgggttttcatatgcaactgcagtcagctgatgggtgggccatgggctagtttctctagcatggcctagcgtatgtctgaatgatggtctgactgtcagggctggctacttgtggtcatacaataggcgcacacctcctcagcaagctagcctaggcctattcacgcggtgttgatctcaaggaaacagaaatgcaaagacatggtgagccataacgtgctagcatttttaagcccctccctgcatcaatatactctttcccaatcggtgaaatccagtcatatggccaaggtcagatgcagtgcaggagggggactattccagggaatggatacaaggacatgtgggcaaactgaggaccatccctgcaatcatctctgcaatcatctaccatactggaaacacagtaagttctccatagatggtggcaactctaatgatgatagctcaccttctttggtcatcagaaccacacggttatgtagcccaggaaacttaggtctaggtatgaccatgactgaatgaattcctagacatgttttcaattttgtaaaacaaggaaaactgtacagatcttgactacataaccccagtcatacagcagcaccaccaacgtgtgagtggctcagacctgtccaactctctgtgaccctatggactgtagattttcaggctcctctgtcagtggaattctctaggcaagaatactgaagtgggttgccattcctttctccaggggatcttcccaactctggatcgaatccgggtctctggcattgcaggtggattctttactggctgagccaccagggaagcagccccaagtctatccccaaagttctctgtctataaatcctcagatactcctactccactggagagcttttccttagaatggacttaaatcatggcatgtctccttataatcccatctaggtacacagtccagcctgaatgaagtaatacaaaatcttgcagccacgaaatccttcaaagtcaagcgatcaaaaaacattctctacatggcatctgagacaataaaggaactgactccgtccctgctggatgtaaagaacttaccagttagcgatggcaaaccaaaggccatgtgagtttgataaaagctactctgcaccacttacacctctcatacgcaagtagcctccagccttgtctgcctgcttttaccctggctccccacaatccatcttcttcaaggcagccagaataagctttttgaaaaaatgtaattcaagccgtgtttctccctgcttaaaataggccaccaggccctctcctctggagcatgtcaggcctgcgctgccctctctgacctgtcttgcccttctagctcactcagtccagcagcagcagcctctttctcgtcctccatcctcacaagctcagccacagtccaggactctgtgtgccctctctcctcaccgcctctctctctctcaggacaatagaggtggggacagatgcaaacctctaaactcacagactgtgcttttctcttggaacacccacagcgacccagagatgtttaagctctcatctgcagatcctagccacgcggctgtggtgaacagattctggcttttcggcggcaacgagaggagcctgaggttcatcgagcgctgtatccggagcttccccaacttctgcctgctggggcccgaggggacccctgtgtcttggtccctgatggaccagacgggagagatgcggatggcaggcaccctgcctgagtaccgggcccaggggctcgtcacccacgccatc

SEQ ID NO: 32241 - DNA, 908 bp, Bovine  19866880449715
  misc_feature (1)..(1): n is a, c, g, or t
nagacttaagagacgcaggtttgatttctggatcgggaagaacccctggaggagggcatggtaatccactccagtattcttgcctggagaatcccatggacagggtggcctggtgggccatagggtcacagagagttggacacgaccgaggagatttaacacgcatgcacatgtgggatcttcccagaccagggattgaaccgtcttgcatttcaaggcggaggcttaaccactggactaccagggaagccccatcatttagttttagaattcaagggaagtgcgacctccaacctcaggcagctgtcaactagcaattttactgcttgtaggaaaccatgaacttagtctgtgattcaaaaaacactcaacagaagtagctcagcacaggcaaaggacgcttaaacgttcccacccaaagaaacggtccacctcaattacgtagaagtgtgagttaaccagcagtttatttcaacgttaatctggtggtgttttagaacttcatacagatgatggtgtaatcagctgcccagttggccagtgacagaggcaaagctatgtatctattaaatatcacttagtttttctatgtctggattaaaaagaaggctatattccccagtctccattacagttatgttgaagtcatgtgattgggtttcaggtgaatggcatgtgggttgaagtgctatgatccaacctcaggccaggtaatttaaagcactctatacaacttaaaaaaaaatttttatttgaagtctagttgatggacatatagttgatttacaatactgtattaatttccggtccacagtaaagtgattctgttatatatacactttcctgccggggtccagccccggctgatccagggtattcgaagcggggacggtgtcggcgacctattt

SEQ ID NO: 32242 - DNA, 2004 bp, Bovine  19866880456396
  misc_feature (1)..(1): n is a, c, g, or t
natatgcatatgatgccactcttatggccaaaagcaaagaactaaagagcctcttgatgaaagtgaaagcggagagtgaaaaaagttggcttaaaactcaacattcagaaaacgaagatcatggcatctggtcccatcacttcatgacaaatagatggagaagcaatggaaatagtcacagactttattttttggggctccaaaatcactgtagatggtgactgcagccatgaaattaaaagatgcttgctccttggaagaaaagctatgaccagcctaggcagcatattcaaaagcagagacattactttgccaacaaaggtccgtctagtcaaggctatggtttctccagtggtcatgtgtggatgtgagagttgtactataaagaaagctgagtgatgaagaattgatgcttttgagctgtggtgttggagaagactcttgagagtcccttggactgcaaggagatccaaccaatccatcctaaaggaaatcagtcctgaatattcattggaaggactgatgctgaagctgaaactccagtactttggccacctgatgcaaagaactgactcattggaaaagaccctgatgctgggaaagattgaaggcaggaggagaaggggatgacaggatgagatggttggatggcatcaccaagtcaatggacatgagtttgagtaagctccgggagttggtgatggacggggagaccttgtgtgctgaaatccgtggggtcacaaagagttggacacgactgagcaaatgaactggactgagcaaatgaactggactgagctatactgacagtggtgtcaaggcgtgcccgagtcattcaggtgacggaatgtgcatgagtcattttccatgcatcaataattcatccattttgcttcccttgttctgaaggtgaaacatcatttcaaaatgcccttcatggagaacagcactgaggtgaatgagttcagactcttgggactgacggatgccccagagttgcaagtccccctgtttataatattcacgttcatatatctcatcactctcactggaaatcttgggatgatcacgttgatcctgctggactctcgtctccacacccccatgtattttctcctcagcaacctctctctggtggattgtgtttactcctcagctgtgactcccaaggtgatggctgggcttctcactggagataaggtcatctcctacggggggtgtgttgctcagatgttcttctttgtggcctttgccagtgtagactgtctgctcctggctgtcatggcctatgaccggcatgctgccgtgtgtaagcctctacattacgccagcactgtgaccccctgtgtgtgcgctcagacggtcacggcctgctacgtctggggctttgctgagtctgccatccacactggattcactttctgcctctccttctgtcattccaatgtggtccatcacttcttctgtgatattcctccaatcctggctctttcctgctctgatatctatgtaaatgagatggttctctttattctagcagctttcaatgtcttttttgccctgatggtaattgtgagctcctatctgtttatattctttgccatcctgagaatgcgctcagcagagggacggaagaaagccttttccacctgttcttctcacctcactgctgtcaccatcttctatggaactgtgatcttcatgtacttacaaccaagttctaatcattctatggacaccgaccagatggcatctgtgttctatacaataatcgtacccatgttgaaccctctcgtctatagtctaaggaataaagaggttagtaatgctttcaggagagccattgagaagatgaagcttctgttcagtacacagatttaattaaagagattatacaatatgtattgctaatccattatctattattttgtgataaactcccaagccccttagggctaaagtagtagttaaaggaaagtgttcattgttcagacgtgtccaact

SEQ ID NO: 32243 - DNA, 1927 bp, Bovine  19866880493041
  misc_feature (1)..(1): n is a, c, g, or t
nactaatacagagaagaatgtctgcttgaggggaaaaactgcaataaaatgcaagtgttggggtggggcagggctgcctgtgtccaaggcccaggtgaaaagggcagaagatatgggataaacagccaaggatgctcctttagagggttgggagcagccagtgactaaaagactggtggggtgtgtgtgtgtgcatgcgtgccaagtcgcttcagtggtgtccgactctctgcagaaggtccaaaatggaatctccaccctttctctcattcctgctgaaccgtaaagccctcaggtgggtcccaggaaattctctaaatacatacagtgagcagaacgggaagaactagaaaacgtgttcaagaggggccgtgggacccccagtcctagggagggaggtggctctcctttgctttagcccattcatccctctgagccagtgggtgctcagatacctggaagtgggttaccagctacattcgccagaaaggggtaggggatgagagtccacttcctttctaagaggagtggaccctaagaaggggcctccgttagccaggcagaggaatggatgggaggatgagagagaggccggagactttgagagactagattgttttgcttaagaacatggagaaaagagatgaaagaaatgtgaaaccttcccccttggagagaaaacatacatgactaatagggatttttattgggttctgtcatagatcaaaactgcctccccaggattcacagggcttttcagtctccccaagacactttcagtagaattgacactattcatccatcctgtcacgttggatttgctttcagggaaatgataacaaagttcccgcaccaaggcgggtgttgggtcaagaacagaggccgctcacggtgcccagaatagtcacaagaatggcctattgtgttctacggccctggagcccttatctcctcccagacagaacgcagaaaaatgtgcgaccttgagagacagagacgggttctctctcccaggtgaaaccaagaatccttgtactgttttagaaacaaattcactcccagctggcaggcagacaccaaaggacagttctttcaaaggtaaattaatcctttgcacaaacaaccaaacttgaatacccagactagtgtggacccacatacccgctcaaaatctctcccccgcttggtacaatacgccccattctctcactggaacaatctgtttatctgaaaccacccgcgtctctgatcccagaactctgtatcttccattaaccatttcaggagagcttctttcccagacaagatgtgcgtcacctaattaagttcccctggtgcctcagacagtaaagaccctgcctgcgatgcaggaggcctgggctccaccgctgggtagtgaagatattccctggagaagggaatgactactcactccagtcttcttgcctggagaattccatggacagaggagcctggagggctgcagtccctggagtctcaaacggttggaccggactgagcaacaagcatacacagcaataaaaacaggaaaaaggaaatttttaccatttacaattacgttcaagacttaaaatatctagaaataaacctagcccaaaacaaacgtgtacgacccccaacagaaaactacaaaatatgatttagacaattaaagaaaacctaaataagttgatggatacgtgacactcatgttcaatatattcagtattggaaggatgttagttttccccagattgacctattgagtcaatataattccaatccaaatccagcaaaattttctggaaagagacaagctcagtttaaattttatatagatttcattaaaaatgaagagcatctgttctttaaaaaacatcaagaaagtgaaaacaccaggaggcctaaattgacctttctccaagaa

SEQ ID NO: 32244 - DNA, 1825 bp, Bovine  19866880516644
  misc_feature (1)..(1): n is a, c, g, or t
nactgtctatttcgtcaggagagaaagcaagtgagagggagcataaccgctacattctcttgtccttggtggcacaacggctcccacatgcggggaccccactttgtcgagagatggtcctcaggtcatgcacggacctcaccgtccaccgagaaagctcctgcagcaccttcaggccccacagcttcttctcaaagagaccagcgtccccagggaggaggggcggcccgccggcctccctggggggcaccctgtgctccagcagcaccatcaactcctccagctggtacgtgaaggccgccacctggaggaggacagcgtgtatcgcctggtggaagtcttcttcggccggggtgaagtgtgcccgctggtcttccaacagccgggccaacatcccgtggaaggcgcggtaggcctggaggttctcttggagccgctccgcctcagtcagctcgctccacctgctggagctggccgtcggcacgccttccagagtgtccaggttcatgttcccgttcagaccctgatgcttcatctggccaaggatacagagaaacgtcacccctcctgcactcactccaccgttctcacgtcacctctaagtcccacacgcacgctactcacgtccctggtcaagggtccagattgtaaagaaaatagtctacaagaggaattcttcctttgggatccgtgactggcatcccagaatttatacacaccgcttggatacctgttcacttttcttgggggaatcgtagcttttgctaggtgctaaaggctgaaagccactgtctggtctagaatagcttttcctccccactcgacactccctgctggcacctagaatattaccatcatactggagtttaagtattttaaatatacctaaagacactggccatacctaagcagctctaaaatacagccttgaaagaattgttctaacagctctctccactgcccactctcactggtgaggagagtcatttattagagaagtcaatagctatatatatatttaatctgtattttaaagtctgatttctgaatgttggggctttaggaagagaaacccactctccgagaacttaaattcagagctctccacaggagtctgcagttcccacggcaggccctaggtgaagactgacgggaatcttcctctacagaaaatgtacctaaccccatggtcagcgccttaagaactggacaccctccccagttccccagggtttcttccaggagactttttttttaataggtgacctttctatttagacacacaaacacttctgattgtatagggccctaatactgtaataggaaaagctggttggtttatactgctcttcccccagctctatgcacctccctcagccttatgtttacatagttaaaaagtcagaacaacatatacatgaagaacccacacttgggagggctcacggttcatctactctggaagaattcagacaggtattcaaattaggaacagcctccaagacatacagacaaacctacctagaaccccacgtatacttccttatttaaagagcatgtttcctaaatagcatatagaaagaaacgtcttaaaggacttctctccagggaaagggccgtgtcaaacgacaggtgcccagtgtttacaacaactgcttggttagggcttctgtaatggataacggggcggaaatacgatgcagggcggggtcagaagagaaagaagtgaaaacagccaacagcaaagttggcaacttacgtaagagtccaccagagcagtcaggtctgaacggatcttccgtgctagccagatggagcggctaca

SEQ ID NO: 32245 - DNA, 1775 bp, Bovine  19866880584352
  misc_feature (1)..(1): n is a, c, g, or t
naaactcacgtccattgagtctgtgatgccatccaaccaccttcatcctctgtcatccacttctcctccctccttcaatctttcccagcatcagggtctttccaaatgaccttcttcacaccaggttgtcaaagtattgtgtgatataagactgataataatctctttctgcacctcagtttgttcatttgcacaagtgggaaattgacaatgtaatgtgcatggctctttcagcttcaacagcatgtaactgttagataattcatttgctaagttttttattccaccctatgctttatttttccccccactttttttgactgttttgagtctttgttgctgctcatgggctttctatagttgtggtgggtggggtactttctagtggtggcacattggcttttcattgccgtgatttctcttgttgtggagtttgcgctctagagtgtgtgggtttcaacagttgtggtgcatgggcttggttgctccacagcatgtgggactctcctggatgaggaatccaacccatgccccctccatcagcaggcagcttcttaaccactagaccaccagggaagaccaaaactatgctttagatcagagaatcaagaagaataatttattgccatcataaaatgataaaataacagggtgtttatacaattccagggcaaactctttgctgtttaccagatgctctttgctttttcattactacagagaatttagaaaattcccatggagaatggcacagaggtgacggacttcatcctggtgggtctaaccaatgctccagaacttcagatccccctctttattgtgttcaccctcatttacctcatcagtgttttgggaaacctggggatgatcacactgatcctgttggactcctgtctccacaccccaatgtactttttcatcattaatctgtctttggtggactttggctactcctcagctgtcacaccgaaagtgatggctgggtttcttagagcagacaaggtcatctcatacaatgcctgtgctactcagatattctttttcgcagcctttgccagtgtggaaaatttcctcttagctgcaatggcctatgatcgccacgctgcagtgtgtgaacccctacattacaccatcaccatgaagaagagtgtgtgtgcccatctggccataggctcctacgtctgtggattcgtgaatgcctccatccacgttgggggcacgttcagcctttctctgtgtgagtccaagctggtccatcactttttctgtgatattccagctgtcatggctctctcttgctctgataaacatgttagagaggtggttctcattttaatttcaggctttaatgtcttttttgctcttctggtaatatttatttcctaccttctcatatttatcactgtcttgaagatgcactcagctaagggataccaaaaagctttgtccacctgcgctagtcacctctcagccgtcagcatcttctatgggacaatcatcttcatgtacttgcaacccagctccaatcactccatggacacagacaaagtagcctctgtgttctatgctatggtcatccccatgctgaaccctatagtctacagcctgaggaacaaagaggtgaaaagtgcattcaagaaggtttgggggaaggcaaaattctctctaggattttaatgctgcatgatgtacaataatctagttttgttcctcttaagtctttccattcacatttttagacttgaagtacatttaatgctaaagttatattctta

SEQ ID NO: 32246 - DNA, 1867 bp, Bovine  19866880645973
  misc_feature (1)..(1): n is a, c, g, or t
ngagtgggattgatggatctatggtagatcctgtcactggatctcagtcctaaatttgtggtaatttgttacaacaataataggaaactaatacagcatagatctaaaatcttattgaaaatatgaagttatgctatacaactcgacttaaccaagtttctgtgataaaaagctagttagaaaaccaaactttcactgatggccacataattgaattcagtgtagtacctcaaagcacttttaagggtacccaagaccaaaagtaatgatgctgaagcattttgaaagatcctttgggaaactttgtaggaagaagagaagaacaccagagaagagacttccaaggaggcattttattttcaaattagaagcatgaaaaagcaaaattcttccctgaaagaagtcttcttcaaagaagaaaatgggatatgttagcactaatgattgacactgggtaatttcagctctgagacattttttaccgtaaaggaaaagcatgacagcaaggagctaagcttctaatgttttgtaatatacaagagaaagaagacaaaactattatagcagtgtggcctgagcagcgcctgagccccagataagcggatgggctttgttgctcgtagactaccacattcgtttgcactgacgttttttttttcccctgataagaaacacttgaaatggacaatggtaccatcaacaatatttctttggggtgcatttccactgatgccagccacaaagaacatttttgaacccaaaactgagcaatatctgttgagttttttctttatcttttgccacatggatataaaacggtatttttttttttttttttgaaaaaaaaaaaaaatgctatactgtggcaacccatttgccgcatgtggccttggcctcggtatttggggaaagtgtaacccattcttatctcacaggactgttctgtcagaaaccaagagatggatttcccttctgaactcagaacaccaaatccttcaaaattctggagacagcattcaacatatttcaagctcttctcgttttttcccaactcccagtgctcattcacaagtcttgcatgcaagacattcaagaagatgttctgaaaggtttctttcctgtgaagaaaagaatgtaaatgtattcagccaacatttagaaagcaccaggatggcagaaaatatgacacctccctttccttaaggatccacaacccagaggaagaaatagatgtacactccacacacacacacacacacaactatttacatgcctgcttcaaaatgtttccaaataattgaaagtgagaaaaatcctcggtcgtttatgatacatttaatagcagagagttggctagatatagtatagcatatctcaaaaagtccaaccaaacatcccatcaaaggagaataacagtgtatgttcctaaaagagcaaggactataagcggtgcaaccttccatggggctgaattttctttaaagtttcttgtatgaaaactgtggcattgagaggtacaagctacgatgtataaaagggataggctacaaggatatacagtgcaaggaaacatatttattatgttgagaagacttttaaatgaaatatagcctaaaaaatattgagcctctatactgtacacctgaaactaatataatgtaaatcaactaaacttccatttaaaaattgagatgtcaaattatacttcacaaaatatctaaatacacaagataatgtttcttccaacagatagttcaacaaaatgtacatctcagggagatgagagccatgttgatcttatggcttcatgtgtcccgaaacccatcaccacataccactagagaagtacaaaaatgcagtttcagga

SEQ ID NO: 32247 - DNA, 2168 bp, Bovine  19866880674189
  misc_feature (1)..(1): n is a, c, g, or t
ntacttttcttcccctacgcacgtgtgtctacaggccacaggtgccctcctgtccacgggcttgcttcttttcctgctttgcctgtgtgctctagcacatgccgtaggtaaattgcatgttgaacatgttaatgtccttaacaagctttttgacaagcagaaccacaatattttatgcttctctttggccaccctcatttagttgttagatttctgaacacgtttccttattctagacaatatactttagaaaaaaataagggtgttattcagcacttaatttctgcatgtgactcagtgaatgggaaaaatgtgagcagagtaaaactggatcattatgtattctaaaatgttaaaatgacaatcttagagacaatcttgccttctcaatcatcttcttgaaagcactcttaacctccttgttcctcagactatagaccaaagggttcagcatggggatgatcacggtatagaacacagacgcaattttgtcagtgtccatggaatgcctggagctgggctgtaagtacatcgtgataaccgtactatagaagatggagactgctgtgaggtgggaggcacaggtggataaagccttctggtatcctgcagaggagtgcatcttcagaatggtaataaatatgaatatgtatgatattaagataaccaggagagcaaagaagatgttgaaactggctacataaacaagaaccatctcaccaacataacgtatctgagcaagagagaaccatgactgctggaacatcacagaaaaagtggtggatcaccttgggcccacagaaagagagactgaaggtgattccaacatggatggaggcattcaggaagccacagacacaggggcctgtggacagaccagcacacatgcttgtcgtcatagttgcggtgtaacggaggggcgtgcacactgctgcatagcggtcataggccattgctgccaagaggaaattttccgtagtggcaaaggctgcaaagaagaacatctgagcagcacacacattataggagatgaccccgcggcctttcaggaatccagccaggactgtgggaatgacagctgtggagtaaccaaagtccaccagagacaggttactgaggaaaaagtacatgggcgtgtggagatgcgagtccaggagcaccagcaggatgatgcccacgtttccaaccacattgaccaagtaaatgagaatgaatattataaagaggggaacttgcagatttttggtgctggttagtcctaggagaatgaactgtgtcacttcggtcgtgttctccatccgggttacttaagaatcagatgtctagagcaaagagaaacaaaggaacagagtgtcaaatttagctaagattgcagtaacagcaaaactgaaatgtttatatctcatgaacattttttcgttacagaaatgatacatgcttcaagagtctccacatctaaagcatggacttatgagtgaaacttagtgtattattcatctagaattccaaactattgaatgaggatcgtaatgaatcatctctccagtttttaattctttcagatatgtcaacacgatcattttggagttaatacctctgacagttcagcttttcctcgcctattaaattcacacacttctctgctctttatatgccaaggcccttgtagacacaagacgatgagtaatttgtatttccacaaatactcactggcaagtcaaattctgttctcagataaagcgtttctcaagtttgatgtgtctttaccaaatttaaattaaactcaatttagctctgtttaaattatgtattgtcttcattggtccaaactcagtgttagaggctgcacagagaagtaactgagacttagatgcatagtgtatgtagtggggtaactggaggagtggggcgtgtacagccagcagacgcagttctcaaaggaagacacggcattaggtggagagtttggactctgagaagagcccaagttaacagcctgagtctttggtcaccaactgacattcctgaacgagttgttctccaactgaaaaattaagatagtaaggagacctaactcaaggtgttattgagaattaagttagataatacatgaaaaacaatgagcaaaaagctgaagcacagtctgaagaagatactattactactaa

SEQ ID NO: 32248 - DNA, 894 bp, Bovine  19866880847163
  misc_feature (1)..(1): n is a, c, g, or t
ntgtttcacagagaccgttgtatcatgcacacacacacagacacacccccccaaacatttaattgttgatgcttcgctcatgtgtgagctcctgggggatgggctaccccgtgcttcagacttcaccctgtttccctgctatggacggatgtccctgaaggctgctacaatgatcctccccaaggccagtgttggacacgcatttgtctggtttgattttctttttcttttgcactcaagttgccttgaatcttggagtctgagctaatttgctccctctctgtatccacagtataaattattttcacaagtgcttgccttggtatccgctacagcaaatcttttctgagcacctttaatctatttattcattcactccacagtgactcaactctatgtcttaggcagaaagctatgaacagcacagataaatcccagctctcgtagaaggtacttatacattccagagggcctaggagctgttttgtcttcctgcagcttctttgggtttacaaaacctgtgcatctatgttaatagctttttatttgttgtgtacagggtgaggtttactggaaggaaggaaaactttatttcattggtgataatcatctttttctgtttttaatcctttctcctgttggctggagagttgtttcctggtcccttttgtttctctcttcctgttgatcctctaaagacgtctataccccctggatcctctggccccttcgagtgcatgcgtgcaccaggtgtatcctagcagactcaagcaatgtagacagcgtgatccgtgccctacccggagcaccaattccatcctccctacagcctgaggatccataaggttgggtatcacaggaaaagacttttctaaaatagttaacttcaaatct

SEQ ID NO: 32249 - DNA, 781 bp, Bovine  19866880861326
  misc_feature (1)..(1): n is a, c, g, or t
ntgggactgcttgcccgtcgtcccaagggcagttgactccggggcaccaccaggaaggagccccttccagtggcttgttctacaagggagtccacggaaatgtctgcacctctctcacacaacaacaacaaagcctatccagtaaattagtctctagcactcgggacacaggcaaagcattttgtgaatgataccactatgtaaatgtgattggtgtttgttacgtcaggagatgaaggatgacctggattattataccaacacttaccacatcttcaccaaagctcctgacaagttagaggaagtcctagcgtgcccgcaggtcatcaactgggaacaagccttccagattcaaggtgaccggtctaaattaaagccaaagatgtcccgtttaatttacagtagatatgaaagggggggaggaatgatgcttgcttttctcctctctacaggatgtcaagagagcttgggcgaggcaatacaaaaagttgcagcttcaaaatcagtgcaggtggattatctgagaaccgtgctctttgtgtttgaaaaaccaacacttgaggcatcgagtggtgacaagatggatttgatgaagttattaaaaattcctaaagtgcttgaagataaaaggtgagatttttaccttttgcttctgaaatttctgataggctagttcagttgccctatgggccagacttgtaaatgtaggatctgagactaaattataatggtggttcagagctacacaggtaagaaagggaaccgtattaggtaatgtttg

SEQ ID NO: 32250 - DNA, 1203 bp, Bovine  19866880889924
  misc_feature (1)..(1): n is a, c, g, or t
nttccctcttggctctagaatgctgggggcctgaactggaccgtccagtaagtgtttggaagattcttctatgagaaatagagccaaagaagaaagtcctaaagataaagacatggagaggctcccccaagaagtgacctactcagaccaccgtaggggaaagctcctaagtcacactcacctgcccagaactcctgcttgatcctaaagtggctcagatggtaaagaacctgccttgaatgcgggagacccgggttcagtcccttggtcgggaagatcccctggaaaaaggagtggctacccactccagtatgcttgcctggagaatccgatggacagaggagcctggcgggctacagtccatagggttgctaagggttgggcatgactgagcgacgaacactttatactttgtcccgaggagatgatctaagattactagacagttgagggaagcctctagtgtggaacacagacagcacaatgaacagaagaaagcaacttggagggaatggagactatatagggggaggaggaagcagagaaccaaaaattgtaaagtcagtgttgttagagaaaaagagattgtgtttatgtaacagaatgttaaaaattcagaattttttttaaaaggacaattagaaattaaaaacatgatggcagaaatgaaaaaactctgtgaaagtgctggaagccgaagttaacgaagttgcctagaaatcagaacaaaagcatggagcatagaggggaaaataagagagaaaagataaaacatttaacgtatgaataatgttagctctagagggagagaacgaaggaaatggatgggggaaaaggaataaaataattctggaaaacttcccaggttaaagtacacgaatgtggatgctaaaagagctcaccaaatgccgagtagaatgggtcataatacagccaaccaaggcacatccttgtgagatttcaaaacctagggaaacagagacgatcctaatgtgtttcagagaaaaacacacacacattcaaaggaccatgaatgataaggtctttagtgtctcaagaagaacgtagataagaatggagtgatatctcataaatgttaaaggaaagaatctagaattctatatccagtcaacttatcaatagagtgtggattcttagaaaccccccaaagaaagaaactccaaatatcacaaagtatacgtt

SEQ ID NO: 32251 - DNA, 1236 bp, Bovine  19866881057744
  misc_feature (1)..(1): n is a, c, g, or t
ntgtcaagtgttcagggcagtttggggaaattgagcaatttagacttaagtatttactaggctgagaaaaacttaattaacagatatatttattcaagatggctcatcttagtcaggacataatattttctacatctcagttcacgaacttacaaaatttaaaagttggaaaatggtccatgaagacccctcagcttcaacagtgtgaaactctacagatactttgtggcttaaattttgtttagtctgtacttcagatgtggagaagttcaaattatcccattaacgaaatatttgtatatgtgtatatatgcacatatgcacaatgctgaattaatttcactttcaatctcccatttgtttatcactgtgctcctttctttttctttgccataggacctcctgtgattcaaaaactgcatccatgaggaataatacaggagtgcctgaattcatcctgctgggactcaccagtgcccccggactgcaggtccccctctttataatattcctgctcatttatcttgtcaatgtggttgggactgatcctgctgattctcttggagtctcgtctccacattcccatgtacttttcccctacaaatctgtctctggtggacttttgctactccacagctgtcactcccaaggtgatggctgggctccttgtaggagaccaggtcatctcctacaatgtatgcactgctcagaggttcttttttgcagcatttgccactgtggaaagttacctgttggcctcaatggcctatgactgctacgcagcagtgtgcaaccccctatgttataacaccaccatgacagcaagtgtgtgtacttgtatggctatgggtccctacttctgtggtttcctgaatgcctccgtccacaggggagacattttccggctctacttctgtagggccaatgtgctccaccactttttctgcaatattccagcagtcatggctctctcttgctctgataaacatatcagtgagctgattctccacgtggtggcaagtttcggtattgagtttgccctcctggttatcttgatttcctatttgttcatatttaccaccatcttgaagatgcactcggctgagggatatcagaaggctttatccacctgcgtgtctcacctcaccacagtctccatcttctatgggacaggcatctttatgtactctcagcccagctccagtcatcccatggacacagacaaaattgcatctg

SEQ ID NO: 32252 - DNA, 1846 bp, Bovine  19866881132573
  misc_feature (1)..(1): n is a, c, g, or t
ncgttggagaagggataggctacccactccgtattcttgggcttccctggtggctcagatggtaaagaatcctctgcagtgtgggcaaccggggtttgatccctgggttgggacaatcccctggagaagggaaaggctacccactcccgtattctggcctggaaaattccagggactgtatagtccatggggtcacaaagagtcagactacgactgagcaactttcacttttacttaaaagtgaatagctagaaaagtccaatttgttcctgttttacaggaagtcacactttttgtctaaggtcccacagggcaatggcatctgactcaagactgtcctgcctgtatcttccttgcgctgccttgggacaattgggggatggcagtgctgggcacccgtagacccttttaacccccgagtctcagccaatgctgcccaggctggtaagaaaacatcctcacagttttccttgctttcctcctgctggcatctgagccccactggcaggtgctcagctaccactccaccgaagcaggtctatctttgctcggctccactgctatcaaatgtaagagctgccacccagcatggtaaatacccagcttcttttgaatttatgacatgaggtgcttgttcctaagtcacaagtccagaaagtgggaaagcagcctgaggacttgtccttgtcacaggaagatacactcagagctgggggagagctttactgcttactctgagaacagtcttctccctagcaaatcgtccctcccaaattatcttatgataaaccggtgacacttctggatcaaagaaatgcacacataagcacacaaagagatgggagggaaccccatgggggtagacggggcactaggctttgcattcacaccaactcaaaaacgcagaccttgagccagcccctgaactcattccactgagtgaacaccctattttgtgccagaaaatgtgctgggcatctttcatcagtggctagaacctgaacagctttgtatcgcttttcatcgtggagcagacaagggaagcagactcggaggagaaaaccttaccagtgggagcacccaactgatgaaatgacagagtctgggctctgactcagatctcgggaaggtgaggctggtatccattcctcagggaagggagtcttgcacctcccacacaaggtagggtgaataaacctctgctcccaacacatcattgccaacaggtgtaactggtagggacatcactgggtcaggtgattccttatgccctccccaagagccttcttaggaccaaaagtcctaggagagacaaaaaccaagaagaccccgaaaggcagctgcagcgccgagcgagagctgggtgggcccacggccgggatcagcaccatcgaggcggtgaagcaggaggtccaggttccacagcagcaggctggtgattcaggccagagtgctgagcacctccagaggtgcacgagagaggcaggcccagggcaggggggtctgagttggctttcttgagcctaggatccagctggttgaagaggagctggactgagctcaagagcgcctggcccctgccctgcaagagctggaggaagctgagagagctgtggaggagatcgagagaggtatgaaggtatgaaaaccgagccttagaagatgaagaaagaactggaattccgggaaatccaactcaaagatgctaagcacactgcagaagaggcagacatgaagtaggaagaggtggctcataagcttgggatgcaaagaactgactccttggaaaagaccgtgatgctgggagagattgaaggcgggaggagaaggggacgacagaggatga

SEQ ID NO: 32253 - DNA, 1075 bp, Bovine  19866881216116
  misc_feature (1)..(1): n is a, c, g, or t
ncagcacatgccaacacagcgctctacaacctgtgtgcgggaccagggcatctcggctgtgaggcaatggaggaactgggtgagtgaggagcttcttggaggagcaactcgaagggattgaagactcggctgccatttccatgtgtggtggggtgtacttctagccagatggaggatagtgttggaagattttcttttcactgctttcctgacctcagaccaaccaagagtgaagcatgaggaactatgttattttggggaactatgggtttgctgtttttagaggcacaataggcaaagaatttggtactaaccacagagtcaactctgcacaaatattttcgaactgaattgtgcttgaaatcgtgattttgttaggagcattttagctccttggggggctgcgaggagatcatagcggggctacagagtcggtaagttcagaaatgtgatttggggggggggagaaatagggggcactgggtaaagggtgtcacaaggagaataaacggactagaagtgtgagaatgagggatccgcaaagggtggagaaaggccagagtttttcatctgttccatcgttgagcattaaatcaagaagacacagcactgttactccaccgccttcattgctaagctttttactgagagcagctctgaaggaacagatgaccacggcctgcaaatacaatacctccttccacgccaaagcaactgaaaccagcactgaaaccgtgggccgcattgctcagagagacccctgatttcagaccttgggcgtgccgtcaggcttgtcattctcgggactcatgccatatcctttgccaatttttgttgccatcatgcttacaaacactgagtcactaaactttacccagtgtccaagctgtataattccatggtgtcttgggtggtagtatgtcaaaagtgcaaatgacagcaacaaaaaaaatcttgcatattgtcttttttttaaaaatgtgttttgagagctagaggagtagaggaaagaagaaaggcaaattacagaagggaagagatgttaatgaaaaggaaaagggtatttaatattaaa

SEQ ID NO: 32254 - DNA, 766 bp, Bovine  19866881297207
  misc_feature (1)..(1): n is a, c, g, or t
nagaggtttgattgcacagaaaccattataaatcagtcacttgcagactcatatcaaaacctggtcagtgcgtggcaagtggcaattaagctgcatccagtggcaggctttgtagtggcaagtgagttgatgtacttcagttgtacgggcatctggtataggggcacaggtgtcagaacctgacacttattttggtccgtgcaagttccacccattattttacttacctcttctatctgtgcctctgtcccgcaccatgcacttgtctcagtcacagtactggtaagcccacaggttaaccctagacaaaatgagtaagaaataaatgtcaccgggagcttctttgcaaagggggtaagacccagtgagacagcagaagactccccaagactgccaacaaaatgaaacctgcattgaaaagaaaatactgactcctgcttaaactgtggcttcactgcaacagatgattcacattcttctccatgccagttttgcatattatgtggcaaccagcaatgagaccttcaaattgcttcaccacttggagaccaagcaccctgcattaaaagacaagcctttagagtttttaaaaagaaaaaaaccatgaagaacagagcagttattgaaaaccactacttcatcaaatatgtatgcactgagagcattgttcttaatggctaacctcattgctaatgctaaaaagccctttcctactggtgaagaagttgatcctgtctgcttcttagaatttgtcgtgaacttttag

SEQ ID NO: 32255 - DNA, 875 bp, Bovine  19866881327523
  misc_feature (1)..(1): n is a, c, g, or t
nttatgtgtcattcaactaaaaaaggaaatatttttaacctttcctcccattgagatatcttttatgctctgagatagaatagctctgaatgtgggtttgtgggtttctttatttggtttttttggtttgttttggaaggtcacagtgaacaactacttggtttgtcaaaaataaattttaagagagtcttgatcttcatactaggattgggactctggcccaatcctttgtgaccctgagcttcctgtttctggctggctattgtgtcactgatgagtccaagcacagaatgaggaagcatcgctccccatgtgggtacttgcttggaaacttatagaaaaagacaaatgctgtgaatctttcataatatttttcttcgattagatttttttcctccaaaaggaacatttttattttctgcagcccatatcaagaaagctagctgtacccacttcagaaacaagttattgccatattgccaacttggagtatcctctttattgttttatttttttaaagtgagtatacaatttatttaacattcagacgtcattaagacgtgcaatatggcagttttactaagggtttaactctacctgggatgattgcttgctagggcttagcaacagggtctagttcacacttagtgctgattaaatattttactgaatgattataataccaagcaagatgtattcaaaggctttcataaaaaatcaattttaaaggccttcctattcaggctaatgacaaacacaatacggcagacatgtcagttcaacataattgactgatattatatatcacttatatcttttagtccatcagtatattagaaatatacaggacatctaataaaaccatttctacagag

SEQ ID NO: 32256 - DNA, 1292 bp, Bovine  19866881507844
  misc_feature (1)..(1): n is a, c, g, or t
ntatctttaggtattgaaaatgggacttgtatttgtgtggtttttctatatcaatatgtataaataggtttataactagagataattagactataagctgtatacacgtgagaaatagaagagagacactgaagagggctctggcaatcagcacagaacccgctcctcttgctcctgaatctcctccggctcctctcactcatggctgttgcctggttgtctctctaggcttacgtgtcttgcatgatgttcctgctgcaaggtgcccagatgctgcagatgctggagaaatccttgaggaagagccttcctatgtccttaaaggtgagaatggcaaattcttggggaattttccccttggggagtgaggactaggaagttcctgcaaatgaagaagagagactagtgtttgctaagtgcctattctgtgccaggccttagagcatgtttcctctggtttaacatgcataacctctctgcaagatgttcgctgttatgcccacatcactgctgtgaagatggaggcttggtgaagtgatttgcccgataccccacatagtgagctgcagtgctatggtatgaacataggaatgcctgagacctaacattgctttttttctccaagttgaataaaaaagtgttcccttgcttctttttaagaaacattccataatagcactgggaatttgcccagagctctcctacaaaattagctaagactgcttgttaacttttaattttttctccctaaaggaacagttgccagatcatgagccgcctttgaaattaccaatgaatcaatttctatttgacttaaatttccaagtttctctgaacacactgcacatcaggctattttgatagtcaggctgacactgaggatctctgttcacctagtacaattgatcagaaacgttaggattaaatagggaatactcataaacgcccccatccagaactgttccatagcagctctactgactggccgaggtcctcgcctatgtttttctttagcaatgaaagggatggtgtccgttccagtggaatttaaatgcaaccatgtgtctgtggggagtttgagcaaattctgggccatcatgaaggacagggaggtctgccgtgctgcagtccatgcggttgcagagtcagctatgactgagtgactgcacaacagcaacagtgggtgtgtgtgtgtgtaaaatcattttccctaaaatattttttgtttcttaggtcagattagaaactagatttctactgttttgtcagacactcctacaagatgcatacag

SEQ ID NO: 32257 - DNA, 1750 bp, Bovine  19866880207413
  misc_feature (1)..(1): n is a, c, g, or t
ntcttgcctggaaaatccatggatggaggagcctagtgggctgcagtccatggggtcgctaagagtcagacacgactgagcgacttcactttcacttttcacttgcatgcattggagaaggaaatggcaacccactccagtgttcttgcctggagaatcccagggacgggggagcctggtgggctgccgtctatggggtcgcacagagtcggacacgactgaagtgacttagcaagcagcagcagcaagccaggttcaagcttggggagggacccctgaggaagtagactccatttttctcactgtccctgggacatgggtgcccatgtcagccctgtagtcagggtcactgtagtcagtaccaaggcagaaagggtggagggcggataagagcattaacaagtgtctgaccttgaatcctgggggcccctgtgctccaggcaagccagccacacctggatctcctctcttcccagcagggcccatgggcccggggtccccgtcatctccttgctccccctgtgaagaaagagggcaaaggagaatttttcatgtttcaggaaataggcagccaaggaggcagggtgacttcaaaatccaccagcgtgggagaagcctggtgggggtggaggtcagactcagggatggaggccatgtgtgagaatggctggaccagtggggcaagaggacttgaagattcgtgggtagggagatgagggatcttaaaaaccagaagctctctgccctggacaggggttgtccctctgggtgctggcatggaggagagacagtgagacaggccattgtccaggtaccacagaatgaagccactgaccatgcaggaaacttctagatatgctgattctgcccatccaagttcccaaacctgctcctcctggcccatggcctatggcaccccacatcccaccacacgcgcacctcgtctcgaacagagacaccctctgttaacccccagtccggctcacctgctgtcctgcttgaccatcgcggccaggaagcccatctggtccagcaacaccctcggggccctgtctccccaccacgccccgaggccctgggagcccctgcaggccctgggagtaaacgagaagctggtgagggcttctggggagggcagggggtggggtgggtgaacgaaaagctgtaagccactcacctggatccccctccgtcctggcgccccagccttgccttgctttccctttggcccctgaaaaatcaaggggcacacgatggaggcttcctggaggaggcgcagaacccaaggggctccagaagggagatccctctgtggctcagccctgcccctctacctcggcatctgcatctgccaatgggcccaggcacccccacccagaagcccagggtcaaggccagccttgggacctgccaggtgcggcccctgaccctgctctgggccctgggccctcactgggaacccggtggcagagggtccaggcattggcaacttcctggtgggagctaagccccatggctggcaggtccgtgtgatcctcaggggtgtgggtatcccggaagggtgaggagtgtgtgtgcgagcagaaggaaggcgtgtgtgtgtgcacccctgggaggaagttgagggcagtgagacagccctggcccagcctcagtggagaccgatccaggaggcctgggtgaaggcaggaaattccctctccaccgcctccgaattcctccatgagtgtcacgctcccttcttcctcca

SEQ ID NO: 32258 - DNA, 1013 bp, Bovine  19866880207813
  misc_feature (1)..(1): n is a, c, g, or t
nctactggaaaaaccatagccttgactagatggacctttgttggcaaagtaatgtctctgctttttaatatgctgtctaggttggtcataactttccttccaaggagtaagcgtcttttcatttcatggctgcaatcaccatctgcagtgattttgaagcccagaaaaataaagtcagccactatttccactgtttccccatctatctgccatgaagtgatgggaccagatgccataatcttagttttctgaatgttgagctttaagccaacttttccactctcctctttcactttcatcaagaggctatttagttctccttcactttctgccatcagggttcctgctcctacaagcctccaaatccaccctccccttaaaccgctacactagattgtacttacctattttcctagcaagatgtgagctcagaaggggcaggatctatatgggattctctcgtcctggtgccctgcatggagactggcactgaatgggtgactgccccacctcagcacattcacagacatctctgctgctctcatcagccaggccaggagagggttaaacaactgccctggccttggagaggcaggtgacccaaagtttaaaccagatgcttcagagccttgtagaccgctaaactcaggaattcaatccagccacatcttcctggaactgggacctgggcccctcccatccttctagacccctctcccctccctgggctcagctggaagcagctggaactgctgcggaggggtgaggtgggaaggaagattacaaaagggaagaagtatgtggagagagtaggaagagcctggtcccatgctctgctcagactgtgtggcctgggctgagcctgtcccagtcccggcctcggtatccccatctgtgcacagaggagattggtctggtggtccctcctgatgggactggccaagggcaagagatcctcagactcccgaaccctctaactccagacttttccaccacacagggggaggttgggt

SEQ ID NO: 32259 - DNA, 1380 bp, Bovine  19866880374712
  misc_feature (1)..(1): n is a, c, g, or t
nttctacaatatggttataataaaaacggactctcagtccccttggagacagactgaataaatattattcctcatgattattaaaactcattaagtgtgtttgtaaggcctgggaattcccagtatctgccagtgtctccacgttgcggggagcctaaccccaagcccagggcctggcgggagactcgaccccgggaaggaggaacccacgaggtggtcatctccaaggcagaagagagcggaggcccgagctttctggaaactccatctcatcaattccccccacccggaggaattggcctccagctgcagaaaggtcgttgcccctggagacagtcccaggcacgctggaggcatcaagcccaagaccgtctcctgcacgtggaatgttctttctctctcccttgattgttcgcgctcaccctgacccttcttaccccaaactcctctaccagggcccacagatcaaatgtcttacaggagcgagcaggtaagagaaaccagatgaaagggctgggtcggaagaccaatcatgagatgtgtggacgagtacagacaagagcgggcctgtcctgtccaaggaagcagccgcaacccggccacagcccatgggccactgcctctctcccttcttccaagaaaagctggtcaccctgtcttttataagaaagctctcacattcaaaaaatattaatcacttattaaatatttttaaacaaatgttgcatgtgccaaataaaacatattcaggactacccatggacaacctttgcctgaaacttgcggacaagccagggggctggaggagctctggtccaggagtcagagagctggcctttggggactgtgggaccaggggccagtcagttcgtggttttccttcagccactcaacctttacagttatgttagcgagcagtcacctggggcttgggccaaccaaagcccagagatgctcttacctggagggggccaccagacccaagttcatcccaggggactacagatctgaggcaggatgtacaattcatgaatatgggagagatggaggcatggggggacccagggttcaagtcgaggctctgcctgtaaccagctcttcggtctagcttctcttcctctgccctgatcaagagcaaccgcccaaccacccctatcagccactcaaggtccaagcagaacgcacacccaccaactcttaccggcaaaccacagtctcccttgggtcctggaggtcccatcagcagcaggaaaggtgtgggtcccaccaggtggaagaacgaatagccagtactcatgggctgggggctggaggccaggaatcgcgccggggccagcaccggggccggggtggtctgctgcctggtccggggctgtctgg

SEQ ID NO: 32260 - DNA, 1023 bp, Bovine  19866880543332
  misc_feature (1)..(1): n is a, c, g, or t
ncaaacctcaaaaatgccaccaacccagggcttaattgtatgcagttcaggttttctgcaaaatgtatttcatgctaggctttcacttagtttgtgttctaattataattactgtgattggcttgataaatgcatcccaggagctaagatcccccattccccacattttatttctgtgcaaaggatatttgcaagaaggtactttgctttaggcagcagaaactactgttgcacacacgtttgagtaggaaaagcaacaccttcttctgcaaacatcagaaacccatctgggatgctgggctattgcttagtcatagaggctgattagggggggcagacaagttcaaggacatggaaaaagaactcactgggtcttcttccatccatcttgcaaaacctccttcgtatcagtttgccctgtgtactcttggatacaaggcagtgtgtaactgtgctcaaacctcaagaatcctatttcatgtctgaagatgtgtttgttgttcagaaataagctcttggaaacccaagatgcctgggctcctgagggctgcccagcctccggccttgaagacctggaaggaaatcctgagtacttgagcagacctggccttggttgcatactgccctcttcagaaggaaaataaaattttccggtatccgctgcaggcttcctttggctgtcttcaccaaagcgcctttttgtatagtccactgtcattccctaactctggcaaatcactgcccttctcctgtggatgttctgggaaactcggacacactggtgtggttgaaaaggcagagggaagaagactgacttgtcttcaactgacaagttgtttgtgtggaactgaatttttggttgtttatttctcatgcgtttgttttaaccaagagacaacatattaaattgcaccctaaatattgggcagaaaacgtggtttcaacttcataatgtccctttactagttgagtgacccatggcaaatggcttccctgctcaattgcaaaatgaagtttctaagc

SEQ ID NO: 32261 - DNA, 705 bp, Bovine  19866880582261
  misc_feature (1)..(1): n is a, c, g, or t
ngggaagggcaatgggcccacatcagctccatcctgtctcacataaggggagagaaggaaaaggctcagaaactcttctagaggtcccagcccaagaactcacgcccactaaaaaaactagtgagagctttaatcctaaaatttaatcctctccttaacaacttaccaccacatcataaagacgagagcataacaacactggattgcaactgagagctgcaagacacagattctatctaaggaggtgttcctagggaaacccaaagacaacaggaagaggggaggggggataaacaaggagggagctgaaacctctggcatctacaggtacacgtgtgagtgccaagttgcttcagtcgtgtctgactcattgtgaccctgtggactgtagtctgccaggctcctctgtccacgggcttctccagtagagaatactagagtgggtcaccatgccctcctaccggggatcttcccaacccaaggatcaaacctgagtctcttatgtctcctgcattggcaggcaggttctttactaactagtgccacctgggaagcccatctacaggtatgctgctgctgttgctgctaagtcgcttcagtcgtgtctgactccgtgcgaccccacagatggcagcccaccaggctcccccgtccctgggattctccaggcaagaacactggagtgggttgccatttccttctcca

SEQ ID NO: 32262 - DNA, 2752 bp, Bovine  19866880658225
  misc_feature (1)..(1): n is a, c, g, or t
ncagtctccccatctgtgttatggcctcaggaccttgagacccaataggcagcagagccagggaggaaaggtcagcaggaagaccagagggatctgcttagatgacaggtatcttcaaagggcaggaaagagaagaactcagtctccagactcagggccaggggtgggagacgaccgcttagccaggaccactgcatgtaaaggaagctgcctactagcttcatgctcacagagaatggaagagggaggagagaaggggagacaatggggagtcaggctccccccaggtgcaaacctggccccattgcataccagctatatgaccctggatgagtccctcagcctccctgagcctgtctccttctctgcaattcagctgacgttccctatcttgcaagccaggcgtgaggattaagtgagctcatgcatgtcaagggctcggactgctgccagccacagaagtgcttcttagaccaaccctgctgcccttgcaagctggatcccagaagggttaatgctctgctcaggggctcctgccaagatgggcagaggcagtgatccgatttcaccttcctgtgggagcagccactggtgacacccgaagccactggggcatctgatccccaggcaggcaaaggggagggcggcacgtggccagagtgggccagccaggaggcaggcagaaagaaccccgccaggcgggtggtgagggcaaaggctgggacacgctggcccaggatccatttccaagaggaaggctaggatggtgtgcttctggggaattgtgtaatccaggaaacccatctgccagagtggatgtcgggagccccaggttcttcctagctccctggaggccttggaaaacaagctcacactctgtgatttaatagcaaatcctccaatttaattgtaattagcatccatggtaatcctgacctagacaatgtggaaggcaccggtggttacctacccatagccttccccctcttcttgcttgttctgggagacatgaacttcaaaggaaattagatgactctggatagatctaagtccatcttgggaatttgccatgccagtgactggtttaggcctgcatatatgacgcaaatgtggccaatgagatgccaggaatgtctgtcaggacctcaaagaaagcatttcaaaggaacacaggaagggctttcttctagcctttcaatgttgttgaatgaaggcttgctgctgcagccgctttgtgtacatgaggtgacaagccacatgaacatgtgagaacgccagaatggaagaacggtgggtgtttgatgacacttgagacgctaaattggccaatcctattacggcttttcctttggacctctggatataggaggtaatgagtcccttactgcttaagccatgttcaactgggaattacatgcagcataaggcaagctaactgaaacagcattcagacgctgatggcagtcccttgaaagccttcagcttctgggccttagcacatgctaatctttagtgctctggactccactcttttgcctggtcagctcccactcacgtgttagagtgcagccaggatgtcatttcccacagtctgctgcacgtacctccccaggtatcccatgtgtgtctgtctatttttctgtctcattttctaactcaagtccctgaagggcagggcccacgtctgtcttggattcccagcacctggcaggcatgtagtaagtgttcagtgtatttttacagaagaaatgaatgtcgtctggaactacaggactctgaactttaaaaagtatcttcccaaagacttaatgccagtaggcccaccccacctctgactttttccaagggtgctcctggataacccttgctccctccttctcttctccaatctgctgccaccgctgagaatggttttcacgtgggacctgtcctccctgtctccagcttaccaccaggaataacaaaaggtcggtgcctagctgtcctgagttggggagagggctcgaggctgacccttctggcgtgacctgcctacttggagcaaatggtagccccatcagctacgacaaacgataagaggcagctctttttgatttgacaaaaactgagccttagggagggcaggtactttctcaaggtcaccgtgggcagcctctggggactaggtcctttttcccatacccaccaggtagctactccaggaaactgaccagatctactgaggaagagccgtctcctacatactagtcttggtagttccaaagcacaactgcatatcaaaggctctgagaagttctgcaataaagaaatcaactgccctttctgttggtcagcagtccctgaaactagaggaccagggtactcatttctcttgagaagacctcttcagaagacagtgctcctggctctgcagggttcctgcaacctcactaggttctctttcatttcctttcagtctcctcttttcccagccttttccaggcaccagccctcactccttgagtctctccctgtgtcgtcacatccacccttcttaggatgctccccaagctgataaagacaggccaggtggagaggagagggtacaagaaccacgcacatccttctcggtcaatttctcctgctggagttatgccaaggtgactaccctgtagagaataaaaggataaattcagaggcaatagttgtaatcccaggagaaagaagactcccaggggagatgggatcacactagccccttcaattaagcttc

SEQ ID NO: 32263 - DNA, 1896 bp, Bovine  19866880669803
  misc_feature (1)..(1): n is a, c, g, or t
nactccatccaggctggggtagctttgtggagtggtgctatcaaccaaaacccggggctccccgatagacctccggagggtgagccctgaccttgggcccaggcccgagggccagtgacaggcccgagtctaggaaataagtctaggagcttccctcagggtctgatggccctctcttctgttctttggaatatatcttgtggggtttgagtctcatataaggagactgttgcggggtttgacaaatggactgccagctttggctactccagccactgtgcagagacattctatcgagagggaggctggtgaaggccctggagaattggggagccccattgttcagggaagatcagtcctgggaagaaggcccagaggctcccatgggcaatgtgctcctgctcaggtaggtgagagcagagccagggcagggtgaggagtggaggtccgatcaacctgtgtacagatcccggcctcacttcctctgggctctgtggtcttcagttacaggctcacttcccgagcctcagggatccactctgtcagatgggatctttacgatcactcttgttaggaccccatatatacccagaccagtctagagccgggttacttgggttcaagtcctagctcccatcactcttttaattgcaattctgagcacattttctaagcctcctgtgcctcagtttcttcatctttaaaatgggaataatatcagtccctaacttgggagagtactgtgaggattcagggaaactagtacatataaattgcctagtactgatgctgagaaagattgaaagcaggaggagaaggggacaacaaaggatgagatggttggatggcatcaccaactcagtggacttgagtttgaggaaagtcctggagatggtgatgatcagggaagcctggcgtgctgctgtccatgggctcacaaagagtcagacacaacttagcaactggacaacagcaagaagtacatagtaagcactcaagaagcactagtaataataataataaatttattaataatcataataatgattttattactactacttgttaattaatagtaaaataattactgttaataagtagtgattcactagtagtagtagtgttttatatactagggcttccctggtggctcagccagtaaagaatctgcctgcaatgcaggaaacccagattcaatccctgggttgggaagatcccttggagaagggaatggcaacccactccagtattcttgcctggagaattccatggacagagaagcctggtggactacagtccatagagtcacaaagagtcgaacacgactgagccactaagcacagcacagaacagcagccatttagaatgctgcattgagaaagatttcaaagtcacattagaaatcatcgggagacagtgctgcaattgattggtgatgtctgccttggcttgggattaggaagtgtcaacatgtgagtcatacatttgtcatccccgatgtcctttgtggagcaccttctttggcacaaggcactgacctgaatgctttggaaaaagaaatttctgcaatgagtattagggaacctgactttatgaggatcttcagaagtcttctggtccaaccctctcgaagctcagcaggactcccttctggaggattttggtcatatgaacgttacactccaacttgaacaccctggtgttggaagctccctcccttgaaagtccatccactttcacagagctctcattgtgcagggttttcctgtgttttgagtccaactcatctccctgtccctgggagaggctgttcaagatgtaaagatggttgcatctattattcctaaggctgcttcttcaggctatatgatccccgtccccaaagcttttctgcag

SEQ ID NO: 32264 - DNA, 1354 bp, Bovine  19866880674699
  misc_feature (1)..(1): n is a, c, g, or t
ntaagtatttcaacgtagaggtattcagtcatgtgaaagcctataaaagggagattttgacctaagttaggaaggttagagaagactgccttgacgaggtcaaggttgagctaatgtgtgaaggacaaataggagttaactaggcaaacagagggcaagaggaccctagcagagaggtcagcgtgtagagaggccctgtggcaggagagggtgtggcacggctaggccagggaaagactgagagggaccgtggaaagagctggaacagaagacctcacggggggtgcagacagggaccttcagcccatgttaaaggctcagctctgtcctgggaacatactggtgaattttgaggtggaggaaaatactggtgaaatttcaggtggaggatgcgatgattaagtggctgctacaggggtccaggcaagagactttagggcagtaggtgagtttgagagcaccctaggaggtaaccaggaccggagcaggtgacaggttggattgtggggtttaggggaagggaaatagcaaagacaccctgcaggtttctgccttgtgcagttggatggggtgatgtttccatttgctgagacaggaaacactagggggacaaccaggtttaaggattgaggctggaggacctttgagaccaccagaggaggtattaggtaagtatttggccctatgggggaatttactgggcttcttgccatcaccccatattaggaaaatgaaagcccaggggttgagatgacctaggtaatgggactcggtgagtccaggtctcgtgtatatgaagccatgacgtgtctttccagagtctgaagaagaggatgaggacagcccagaaagttccaacttgcctctcagctggctcccccagcaggatcctcaatcggacatgaccaaagaggatccaagtgaggctctgcaaggtcctgaggtccaggaagctggagagagctccccgaggttggggtatgagacctatctcagctcagggggccatgggagcaccagccccaccactctggactggggtcagcctgcaggctgggtagcttctagcaaacaagccagtggagacaaacttccagaacattctgaggtcaacccaactgctgacttcagttcacccaggtcctggagcagtgggactgtgagcctaaatcaccccagtgacaacctggattctacctgggaaggagagactgatgtcccccagcccactgccctggcagaaacttcaccccagagccccagccaccacctcctcaacccaaatgacagaactgaaggaagtgttgctctggcaacgcccacggaattccagggatcctcagcaccactcgcc

SEQ ID NO: 32265 - DNA, 1682 bp, Bovine  19866880748116
  misc_feature (1)..(1): n is a, c, g, or t
ncaatgggaagatctggccggacttaagcccccataagacgaaagcagaaccagaagctaaagaaaggttccttatgacactgaatcagatataactctgggctcttccgtagatgataataagtttccttttttcttaaaccacatagaatctgtcattgtaactaaacaattccagccactatcggttttttccctaggcagccaccacccggcacacgtctgaatgcttcccttccccaccccatctcagccaccagctatctacatccccatcttccatctaggaatgcaaatttcagaaatgaatggtgccaagggcacaagggagaggagcggggccaagtctgataatgaattcccatgcactctgtgagccatttggtggttattcaaaaacccattcaatgtttttctccagtgatgataagtacactgttcttggtattgtgtctgtcaccagctgaatgatagtgatatttccacttaggatcttagtagactcgtggctctgaaaataatgtttctcagagagagattggcagtgcaacagatgtgtgtgagcagaatgcccccagccccacccagccgagcagctggctgcccgagattcgctgccctcagattcgctgaggtctggaccctaatattttcagagattcctggcttcagaaggctttttctttccctttgaaatgggggctgcctcctgaaattggtgtctcccatgtgggcagtacgcagctgggaaggaagtggttagcagtgcaatgggggacttccctggtagcccagtggctaagactccaccatcccaatgcagagggcccaggttcaatccctgatcagggaactaaggtcccatgtgccacaactaagaatttacatgcctgaacaaagatgggagatcccacatgctgcaactaagacctggtgtagccaataaataaagaaatccagtattcttgcccgaaaaataccatggactgaagagcctgatgggctacagtccaaatggtcacaaagagtccaacacaactgagcgactaagcgcgcgcgtgcgcgcacacacacacacacacacacacacacacacacacacaaatatcaagcaagatgatgggttggctcagatcttggatctctacacctgctgcttcagaatttcctggggagctttctgaaagtgcctcttccagtccccattccctgcaagattcttaatcagtaggtctgggagctaacctgatatttatcaaggtgtctgattctaaagggcagccttgatgcagaatcataggtatgagatgtccagaggccagcgttcctctgtttcctctttgggggggccctcttcttccagcctttaaggtccctcgtgggaaccctcccagagtaacttttgtgagatcagatggtgtagggagcaatagtagagaccattgatgtagtgaaaccctgtaacttccaaataagaaccagaaaggccaaatgaatttccaaagatcacacagcaagtctacagattaaccagggtacaaaccagggaggctaaacatagaaagctctcctgggcctggtttcccacgctgaattatgggtgggggtgatatcccctgattgggcttcccaggtgtttcagaggttaaagaatccacctgccaatgcaggagatgcaggag

SEQ ID NO: 32266 - DNA, 798 bp, Bovine  19866880763666
  misc_feature (1)..(1): n is a, c, g, or t
ntgcagggagccgcatccttcaggtctgcaaaggagagagggcagtgtgcagataaacccacacgctgtcggggccctgcagagtccagcatggctggtgtggtcagagctggatcttggggaaggcgggacacggtcacaggggccagtcacccagagccatggatggagttagttctttgtcccagaggcaacaggaagctgttgaggggatggaaacagaggggaccttttaggagatctccctggaagggtgggttttcacagagtcggacacaactgatgcgacttagcagcagcagcatacgctgtgttgaggagccccatgaagaggctgtggctgtactgatggtgatgaagacagcaccgtcttggggcttgggaggagcgatctgagggacagggggaggactggagatcaagcagcccacatctagaagctcgggcagatgtcctttggaacagtgggtgggcgaaactgcgttccaggccgagggcacagagtgagtgaggctcgggagccagccggaggcttctgagcaggggaggccgccctgagtcttcagagatgcctaggagagggtgctggtggacgggcggggggtgatgctggatgcaggtgaggagggagctcaggaccagggtcctcagtgaggcgggggtgggggtgagacctgcagagtcccaggctccagggtcctcgccctcacctgtccctccagactgcactaccaagcctcggaccccaaagagggcccaggctggcttctcccgactgtctgtgtgtctgtctatctt

SEQ ID NO: 32267 - DNA, 709 bp, Bovine  19866880765796
  misc_feature (1)..(1): n is a, c, g, or t
ncccgtctgcgagacctgtgactctaacacctctcctggtctccaaacagcacagccaagttcacggtcttggctgtttcaaatacaggaaaactggactgtacagggaaggctgataaaaacctcaggatactgaatacaccactgagatgagctagtttacagtgtgactcgaggaacaaaaagggcaatcaaaaaaaaaaaaccctccaaaatataagttatagacattcagtgcctcctagcagagtttaaatcaaatttgaaaaaaaaaaaaaggcaaaaactgctaaaatgttaggaaaaaattattaaggagtggagacagttatcttatacttctttgaaaatgtctttttttccctctcttatattaaaaagcaaaaggtcagctttatattcttaaaagtctcctttcctgatttggggaaatagataggtgtgtttctaaggcggctgccccctgacacccaggggtatcgtaaaggcagcagctcaatgccctgaaggtgaacgagaacaaagtccagtgcagaagctgtccatctgatgcagtttggagaatccatggcagggcagctggggaggagtgggggtgtgatagggtcaaggaagactaggggcaggggtgacgggcagtagggggaccacagggtgaaggatagagagcgtcaagtcacttcagatctcagcgcctaacatttcacaa

SEQ ID NO: 32268 - DNA, 1581 bp, Bovine  19866880839906
  misc_feature (1)..(1): n is a, c, g, or t
nttggatgaagagatggtgggaatatgcaacaggaaaggtatacccaggtggcactagtggtaaagaatccacctgccaacgcaggaaacacaagagaggtgggttcaatccctgggttgggaggatcccctggaggaggaaatggcaacctactccagtattcttgcctgaagaatcccatggacagaggagcctggcgggcttacagtccacgggtcacaaagagtcggacatgaccaaagcaacctagcaaggacctgcaaggtatacccaggagtttctacaggattggaaatgtttgtttcttaggataggtagagtacacccatcttacaagattctttagggctttttgcttttaaaatacatttcctaataatttcttgtgactgtgtttatactcaaagctggtaacgcaaatcgtaacatttatatgtgttaatgaatctgtctcttctgctgagacatgaggtcacaccctcttgaagccagaatcacccagctaagctgcttccaaatttttgacccgctaggtttgggggtaattttgttacacacaagaaaactattatgaggaatcactgggtattcttgagcaaagcagtgacactatgaaagtggtatttaccaggctatcgtgtagcctccaaagaccaaatagctaaatttgctgttttgcaaagccccaggtggttagcacaaacccggaagagcctgcagcccagaactcgtgggcggggtaggcaacatgttggtactttcagtacggcctcagaccaatgttaatcaactctgaactttttccaaccaaatctacttgcctcaacagttcacccctgaggacaaaaagtagaccttcagacttctctgcaaacctccagaactcagctaaacatagagcaggggcagctgatttatgatgcttcacaggtgatgaggaaaaatatccccaacctggccgggagatgccgtgcagccctgagggacagagtgccgagagtggagccagagcctcctgcccttgcagctctccttgcagcctggtaagacactattccaggtttcatgtcctgttcgccatgctagacccatgcttccagtgagcacagaggtgagggtgggatagtgatgggtaaaagcagctcatgaaataaccataaagggaaaagcaaaaaaacatttagctaagcaaagggagcaatctttctctctaggctgcagttcccaaagcagattcaaaaagtaaactctgcagtcagggcatctccttaaaacaagctctagcaattgcctaagaattgagctctcagtgaaagggagagggatgaggttggtgacagaaatagatatggtccctggatggaaaatgtgtcatcatcctgatgtgctgttaggggctcagcttatgactttgattacaacaggaagacttagtgttgggttggaagtagtcatctcaaagctaaattccatttcttggaggtggagtagagaaaactcaactagatttgggcaaagttcacattacaagaagaaaaacatgacctccccacaaaaacagaaaatgtaaaaacaagttt

SEQ ID NO: 32269 - DNA, 1292 bp, Bovine  19866880852394
  misc_feature (1)..(1): n is a, c, g, or t
ngagggaggcctggctggtggacctgggcagagggaagaagaacctgttggcacaagtccaggcatccattcatgacaactgggatggcacgcctgctcttggagcagagatcccttggttactccacatctgtggcaccacccataaggctatggtccttggcttgggctatggtggcgaagctgactgacctcagaggaggcaggaaaaccctgcagagtggacgtgtgttttctccgcctccttgctggggtccatgcatgtcagcagcaaggccccttatgtcctgggaatcacacacttctggcaaactgtgtccaagtcagcaggcaattgactgccttgagctgtagagtcccatagtggtcagtgccacagaacggggagccagaagacagaaactttctgaaggtccatgtcagggcaggcaccaggagatgagctggaagagccgacctcaatcctttggctgagctagaatttggatagggtggatattgctggagacaaggggccagtggctaggcctgtgagatctttgggttttattaagctgttcactgcaaggggatctgcagtaggcgagctgcctgcgtgagaaagcagacagaggaggggcaccttggtacagcccttcctactggcaacaagagtgtctgaaggacgaaagactggaagagagaaatgactacctgcgaccttatgcctgttatctggatgaggcagtcccaggagacagccttcagaaaccgagtggcactcacgtcatctctgcagagtaagccaagccctaaggatcgaactgaggtggaaaggagggacagaacaggaggtgacacgtttaactagatacctggaatttagtaagacttcctagaaatttcatgctggagggcagacatccccgagttccaaggagaaggacgctgatacttgggcttggtcctgatggctttgcaacacagtgaaatgccgacttgtggagtggcccctaaaatgaggcaagaccagcacagctccccgctcaaaagcagagagaggatgggctccgaggcttgactcctaccaactacacaacacaggcagcttccaccctcctgtgtggctcagagtgccaggtctccccggcagcaaggctggaggccttttggctgtaggcatctcacccaccagcaagcctgcagccaccttctggaaggtctcccaaagtctcatcaaatagcctgtcaatgctcccatatactatagaatgtgacaagcggtgactgtccagtgcaggtaagaggctctt

SEQ ID NO: 32270 - DNA, 759 bp, Bovine  19866880957738
  misc_feature (1)..(1): n is a, c, g, or t
ncgtctgggccagcttcaggaactcctttccccgctcaccacgctcagagcacccaggtcggcgcacatgacccgcagcagccgctctgcgatgttctgccgctccttctcggggatcatgctgttgggtgtcaaaccactggtcgtggctggggggtggggggacacaaagagaggcgtgattaatcctggcattctaggcttcttggtctggcagcagcctaatactcaagcatctagtattaggaattacgaagtgatttcatcttgtgtgcaaaccgatggtggcggcaagtctttaacatgtgacagtctcccaggaatgaagttctgtgatagactagaaatgcctgccatgccatgaagttctgtgattgactagaaatgccggccatgggcatgggaacagagggtaagtggtatgtgtgcaaatatttgctgcatgtgccattcacctcgacctctgaagctaactagtctaaccagttcctcaaaacagaaacagcctctgatacagaaggcgttagtgaataagatacctgaggccacagtgtcaggaaaaagcagaccagagaaattgtgcagggtgaattctaattctgattctgtcatgaatttgtgttctctgatcacaaagagatcaggtctccccaggcctcctcttccatcctgtgaggtcggaattcccatcaactaggtctcaggtgtgaaagtgcttggtaaaccgttatgcgtggtcttgcatcaccatgggaggta

SEQ ID NO: 32271 - DNA, 1011 bp, Bovine  19866880979079
  misc_feature (1)..(1): n is a, c, g, or t
nctgagtgggacgggcttccggggtctggctttctttgtggcttctgatccagtgggtttcttgcttccagtggaggctgaaccaggagcgagagtgggaggcatcgctgtggccggtggccgagcggtcctgggagggctaggactggggacaggtgatgggggtgggactgtgggtggggggaggtctgtgtgtgctggtatgggcaggagccggctcactggcacgactactcatcttggcctcagcctggaccactgggggcaaaggctttttagaggaggcagcagctggaggtaggggccgggcactgggtggcgggagtctgggcatgccggggttcctctggatcggcttcactgtgggacgggagactttggcaggaatgggctgggaagtaggtagcaccggcttcttggtgggtggggctggctttgtgaaggcaggcagagctgtcttctgggtggggcgggggcttctgactggggcaattgaaggagaaagggctgaaggtgtggcggggtgacttttggaggtcttagtggctgtgttcttctgcaatggctggacaggtctgggggagctggcaggagagaccggggacacgggaggaggcccttcactgactgatagcttggcaggggacagaggggtccaggctggatgggatgtgatgggctggggcgggcgtgtggtgctagtcctcatgggcttgacgggcacagcaggcaccacagtcaccccaggccccctgcctgccggccgtgaccccagggctggcgtggcagtggtcagattctccaggcccaaccgggcgaggtcggtctggaaggtgaggagtgtgccagagtctcgggggaagaagggtcccagctggggccggtaggtgtcagcctgtccacactgctttctcaggtgggtacagtaattgtgagcgacctgcgccacggggtagatactaactgcacagggccccctcgaacggaccgcgtgcgggctcatcttcccaa

SEQ ID NO: 32272 - DNA, 3184 bp, Bovine  19866881087929
  misc_feature (1)..(1): n is a, c, g, or t
ngtgaacacgtgtgaaacctaccccaccaagaacagtgaacatatcctccacctctggacgttccctcctgccctacccaccctcccagtcaccctcattcccagaaaaccactgacctgatttctgtcataaaagattgatttgcattttctctgtttacttttggatagtttctactgctaatctttaagttcactaattttgggtcaggtttaattgatttttctccctattttactgcttttgcgtgtgtgcgtgctaagtcacttcagtcatgtctgactctttgagaccctatcaagagacccgactcttgagattgtagcccaccaggctccactgtccatgggattctccaggcaagaatactggagtgggttgccatgccctcctccagggaatcttcccgacccagggatcaaactcccatttcttacgtctcctgcatttgcagataggttatttaccactacctccccctgagtagcccacctcgtcactttttattgaatgccagacattgtaaattttgccatgttgggtactggacattgttttattaaacaagcaaatttgaatcgtgaccattttaatttactacacttgaaatcagaaatgaaaaaatgtattacttttaaactttgtacacatttagcccatccacttagcattttatctggccaggtcacagtcacttatttctataaaatactttgagctgtttttctgagatgtgtttcagttacttggcagcagtttcatcctttcatggctttactctatattttattaaacgtgaacagagaaatatttagtctagtgttaattttctttactaatgaggcaatccccttttcagtcttcttgctgatgcttcatgtattatgagagttttccgctctggctgctcccaatgctgtgtgaacgctcagcgatataccctttagttctctcaggttttctttcctcagtcttggtgatttccacacacacaggcaggtgtcagtaaatgggatacttgtgagtgaccccctgctgacagccagagctctctctgttcagctttcttccctctggtactctgccctacaaatgcaagccaccttgactttctcaaactcccaggtctgtatcctcaactcaaggagcctacttggcttgacctgattctcccatcaacactatagactggaaactttctccaggtggaaagctggagcgtgggtgagacacttcattcatttcccatctctcagggattactgtcctttgttgaaagtgaaagtattagttgctctgctgctgctgctgctgagtcgcttcactcgtgtccgaccctgtgggaccccatagatggcagcccaccaggctcccctgtccctgggattctccaggcaagaacactggagcgggttgccatttccttctccaatacatgaaagtgaaaagtgaaagtgaagtctctcagtcgtgtccgactcctagcaaccccatggactgcagcccaccaggctcctccgtccatgggattttccaggcaagagtactggagtggggtgccattagttgctcagttgtgtctaactctgcgagcccatggactatagcctgccagactccctctgtgcatggaattctccaggcaagaacactggagtggaaagccattcccttctccaggggatcttcctgacccaggaatcaatccagagtctcctgcactgcaggtggattctttaccatctgagccaccagggaagcccctttactgagaatgttgtttggtttctcagttattcaaggaggaaagtacatctgatacctgtttctccagcttggccggaagcagaagccaggaaaaatttttaaactcgctaagactccatttccttacctataaaatgcaaataaaaatagtggcaatgtcacagagctttgcaacatttaattgttgcaacaattaaatgctttaatacttgaatctaacacctgttaattgctcaataagtggaagttatcatttttgttttaattgttattgctgttgtactgttattattatccatggatgggtttctaggatctgtaaacctcctgaattttcaattccaaacacagtccttgacacttccaaggtattaaatatttgtacctttactgctctatcccagacctctgcagtagatagctactgagcctcctactttggagcaggctaagaatgacctttgagatctttaacagccatcatttctatgcctcagagatctaattgatattctcatggagcaaattagcatttgcagcaaacatatttcactccagatttattatgccccctaagttaatgtaacaagggtattcagaagagcaaaccagagtttaattcatatgagtctggaggtcagtctctgagttagcaagaggaattcagggcaggaaagaaaaagcttattccaatccttcccaggctagtcgtatgggcaaataagatagagaactcggctctttaaaaaagagagaaggacttcccttggtggtccactggctgagcctctgtgctcctaatgcagggggcctgggttcaatccctgatcagggaattatatcccacattctgcaatgaagatggaagatcccacatgccacgactaagacccagcgcagctaaataaatatttaaaacaaaggaaaaaaagagaaacctatttgggatatgcagcggaaatgaaggaaatagtggctcagctcctcagtctccttatttccagcttctaaccttcagacatcttccatcagtgttgatgcgggtgctgtcaaatgcaatatttataactctttatggaccagacatctgcctgcatccttcaggaggcctgaggaaagccagttctgaggcaagacacaaatgtgtcacctgaacaagtaggatgtattctatgacagcctcagacagccctcatttcagtcttcctgtaagactcttcccacctggttcagtcatcagaaatagggtctgttccccatgtctcatcctgccctagtggtacagagacttatgcttcaggggcttataatgccccacacaatttcttaagaagcaggagcccttgtcctgctttatattgtttcagaaaagtcattttgtcattaagaactaaaattcttagctcaaatcagcag

SEQ ID NO: 32273 - DNA, 1266 bp, Bovine  19866881118387
  misc_feature (1)..(1): n is a, c, g, or t
nagtgggagaagcaggttggaaaggtgggcccaggttaagtttagcttcactgcttcccacaaggtcagtcaccttcctccaggtccctaagtcaggggagctaggtgaccttctcaccctgccagctctgtccactaggcaatatgccctccaggttttctagaagccttgcttcccaaatcattacagggagcagatccgacttagtaagagaatggcttccagcccccggggaacccaaaacccacagacccgaatgggacctggatttctatgcccaaaccagtcctgaattgtgtactctgattcaaaaagaccctagaagactaaatagattgaaattcttttggcaatcagaaaaactgtcaggggtggtcttttagatttgttattgctcatcttgttaggtttactttcttccaaagtgtttaattaatgtttaggggaatggataaggaaagtggcaagcattttaattccctcccccaaattactagtatctcactctgtgcctctctcaagttcccatgacccctccattttaaccacccagttatgctgattcctataccactacatccagagaaggcagtggcaccccactccagtactcgtgcctggaaaatcccatgggcggaggagcctggtgggctgcagtccatggggtcactaagagtcggacaagactgagcaacttccctttcacttttcactttcacacactggagaaggaaatggcaacccactccagtgttcttgcctggagaatcccagggatgggggaacctggtgggctgctgtctatggggtcgcacagagtcagacacgaccaaagtgacttagcagcataccacgacatcatcttcccttctccatcccaaactcttcagtcttgtcgtccgtccaatgagccaatgaagctgccctgtgacctaaccctcgagaacaagttactcgttctgtctggggtgttcagtttgccttagattggtgtgatccaagagaaacggaatataagtcattaggtaatttcaaattttctagtggtcacatgtaaaaaactgaaaataaaagcaagtgaaatgtttaatatcttatttaacacaacatacaaaatactaccattttaatcttatttttaaaaatgatgactgagatcttctacagtcatttcttatttttcctactgattctttaagatctggatctagagaagagaaaaatgacaattcaaccaaaataaataaataaataaaacaaaccca

SEQ ID NO: 32274 - DNA, 1029 bp, Bovine  19866881123119
  misc_feature (1)..(1): n is a, c, g, or t
ngcacccgggcactcccagagcccctgtggcctgacctggctgctgggcagggattgggcccctgggaggggagggctgtgcccggaagagacttctgccgcccagcaacattttgtgcaaatgtcatattttccgagcttgctgtttcccccacaaagtaggtgaacagctgtccagagtcctgagtcaggcactgggaaggggggcggggggcagagaggctggggcagcgtgaagccaggtttatgtaataaaagggatcttgctgtggccagctggccgggtccctccatctcggcgttgcgctgaattcattccccggtcccccagctcctctcctctgatgggatccttcctgcttgagtctctagcctgccttccaagcagttgaggggctccagtgcaggaaggtgcagtgatgaagcaaggacctggggccaagcagcctgggtttaaagcccagctgtgcctctgattataagctgtgtgaccctgggcaagttattgggttggccaaaaatttcatttgttatggggggggggtacccaaatgaacctttggccaacccaacactatatatggctcagctttctcaccctcttctgcgaaagagtggggatgacagacagtacctgcttcatagatgacggagagagtcaagagttaatgcctgtaaagcacttggtacgtagtaaatgctcaataagcattagttcttcttattgttgattatatatttacctgtgaagttggggcaagggtggcccttctgtgtctccatggagcccgcagtggtcagaggctcctggaggctagtggtgaccacctctgccagctccaggtagctgagttgggaggacttggcccctgaactgcagcgagtatgtgggggaggcctggagactgcctggtatcagctttagagcccacctggagagggtgataaggggaacctcctcagtgccccctggcctggccagttgtcatcttcccagggcgagtgcgaggggctgtaagtggtagggtg

SEQ ID NO: 32275 - DNA, 680 bp, Bovine  19866881211841
  misc_feature (1)..(1): n is a, c, g, or t
natagaaaatgttattcctgcctcagcccaggctcaggatttggggaagctgggtcattttcccctttaaggataccgtgtagacgctttctgtctgttgggctgtgtggtaggctctggggaatccagaggcatggcgtctgtcggggaagatgtatggtccagctggaaacacaggtcataaaaagatgactgagtgcaccagctggttgatcaatactatttgaatggctcaggcaataagagaacaggggagcgaggtcagcctaggaaatggagccttcggtgaaagggaagggtcctctcttcctttgcagaatgtagtgtgaagctacgccttcagcagtagctgggacaaagagggacacagagtcgagtctgtgcccccggggacaggaacacacccgtctcctatgatgcggtttggaaaccaccaccaggcccctgcagtgtggatctggagtcgcctttgaagatggacggttctggggtcttcgcagcccacccagctggcatcagacttgataccccagagcctccactcctgatccttagaacacagtgttctagatctggtcaggagatgcttctagtgtccactgggtgcttgggtcttccaagtaacgttaaggacagctggcttttcaggtgacactcgtggtacagaacctgcctgccaa

SEQ ID NO: 32276 - DNA, 927 bp, Bovine  19866881213377
  misc_feature (1)..(1): n is a, c, g, or t
naataatcccatggaagccatggtaaaataatgggtgccctaatgaattcaagataccagattttgttttcccctgcaaagaaaacagaattgtagaataatttcaaaatagtctggctgtcttgatttctcagcaggcgcccatggggatgtgtagaattacaatctttcttttcttcatgggcctctcattttgagggtaatgggcgactctttcctatccaactgtgagaaaaactattttgattttttaaaaaatttgtgcagtcattttccccctccccctatttgcctggactgttgatcttgtgatatatttatagagattgtggttggctgaccaggagttattttgcaataggaatttgtaagatttctactttgagcatgtgttccagacttttctttctttaaaaagaaataaaaaatctttcgtagagcttccactttgcccttgtgtaattatttctctttcacaaccaaagtaagccttctgttttgcatagttttttaatgtgtatttcgtttgtctctggtcttctctctcctttggtgtctctttttaactccagactttaaaaggccatggttccttcttcatgtaggaatgttttcgcagatgagaatgtgaagactggaaaaagggtgctttagggaccaggagacctctctttctctatctgtaaaaaaagagtatcgggctaaatttgtgggggcaagcatgcttctgtccccagctttacctcactcactacagacatcaataatcaatcacagcactcttcctagaggagcgctggtctggccccagaatccttctcagcacattgccccaggcagccacaactaatcgtgtagaattggtgctgaacaaaaatgcctgttggcctttcttggactagatgacccccttgaccccattcacca

SEQ ID NO: 32277 - DNA, 887 bp, Bovine  19866881247722
  misc_feature (1)..(1): n is a, c, g, or t
ntgctttacatttaattaggtgtcctcataacaatggaattgcagaagtccttatatcactttgaattagtggtgcagctctttcaaacttctttaaaaattttttttcatatatcattttttaaaatagagctcattattttaattatatccatttaaatgtacagtggagcccttggatattctcagcacgaatcattaggtatattagtgaaaaagcacttggaatccatctacatgctgacactccataatctattctatttgtgtcgctgtaaaatagatttatatatagataactacaaaatagttgctcaagatatgctatgaattttatatttaacccgagtcacacttcaacataaaatctaaagtcaggcactaaaaggatatttctcagtaagtacatgctgtctgtggtcactagctcaggccagaatgccaggataggagccaaaccaagcaggtccctacccaaggaattccctaagggacctggcctttcactaaggtgaaggttctcaaagtgtgatccttgaaggcctaggggttccagagtgatggcccaaaagcaaccatggggcctgaattacaagggtggtggtgcgtaggcctccaggaacaccactttatctgtctctgatacctacaactttgcttttagtggtggtggtgggggggggtggtagtggggaatgggtaaatggtggcccctccaaaagatagaaagggttagttgttcagtggtgtcccattctttgtgaccccgtggactgtagcctgccaggctcctctgtgcatgggactctctaggcaagaatactggagtggatagcccaattcaaggatcaaacccaggtctcctgctgcaggcagattctttactg

SEQ ID NO: 32278 - DNA, 1955 bp, Bovine  19866881297413
  misc_feature (1)..(1): n is a, c, g, or t
nccaccagtaagcacactgctgactcattttctccaggagaccctgtgccagggcagatgccagcggttgggtagaaaagcggtgccaggagagcaccccacagtggggcccaagctttagacaagtgggcagtcacgcggctttgaggcccagcctctgcctcccttgctgctgcagtaccccagatgctatgccctctggcctcctagctttgctcttctgcacctcccagatcaggttccaggacactgttatggagcatccctggcttctctttgcttctccgtcctccctgtcctcagagcactcccccttccatatgcttccataagcctgctgtaccgccccccaccacccaccaggctcaatccagtagccatcagcaaccctggtgttgcattggcgggggccctgcccttcacatgtaaccccctgtctgtccctctctaagcacactctacctgttactttattggcatgttctcttcctccctctctgtgtttcagggaccctcttgataccccataacctgcccgacccacgaaatgccatgtcaattgatggtggaaacggaagcaaaacataaactcacacccatgagccaggagagcatggcaggccatgtgaatccctgcctctgttctgcaagctggggcgggcaccttgcctttctgcttctcctttttctcgtcctcaaataggcatcttcatttccagcaagcagggtttggtgaggattagtggggctgtgcttgtaaaaggcttttagaacagggcctggcatatagtaagtgctcaacaaacggcagctgctatttttatcattattcacttcatcttgaatggatgtgtgagtcagtgggaaaattctgggccgcatcctgtccagacagatgacctgtctgtgttcccatagaagaggtgtaaggtgtgaagaaggcccgggagtggctgtctgggcacatggggcctggccagtccatggaggcaggtgggacaggtccacccctcctctcttttctgtggtcctctggccagcatccttccccgctcgctccatgggagcacagccaagcccagagaccatgggtccacttggcctcgtgtttctatgccccaggtcttagctctgagtgcacagtggatgttcagactggtatcggtccctgaagctcccctgtgttctcaggtaacaaggatggaggaagaaaccatgcaagccagctgcaggttctggcagcctcatggtccagagaggaacacctgggttcccttcttggagggctcggtggccagtctgtgtctccaaggtcaggctcccgaactcatggcttccgttccggccgccttctgccgtctctggcccctgtgctctggtcttcccgacattctggagccctggcttcgctgagccaaggcccacgagtcagtggtgaaaacagaagtctggaagaacaaagctctgagccagctcaggcactaaacgttattagcagtagcctaaacaggattggaacgggagcaaaagaattggcagggcctccctctgggagccaactttccaggcctggagcttacttagatggctgttggctccctaggctgcatctctttcctgttggtgaaggctgggactctggtctctggcaagtaggaagtccctgtaagtctttgatttcttcttgggagatgagtcaagcgaaaatggtctgctaagtagtggagtcagatgatgtgggtcactggcatgctgtgtggctttgggcaagttgcttcccctctctgggccccagtggcccatttctacaaaggggatgagactagaatctggcctcgaaatcatctcagaggaccttctcccactctatgaagtgaagtgaaagtcacacggtcgtgtccgactcattgcaaccccatggactatatagtccgtggaactctccaggccagaat

SEQ ID NO: 32279 - DNA, 801 bp, Bovine  19866881334129
  misc_feature (1)..(1): n is a, c, g, or t
nctttgagctgatgtgttatacagtaatagatatctatctaatacagatggtgagataagcgtatatgggtaggaggaggcactgatgtggaataagtaacttctctatgtgccttgtcttgtacaccgctctgctccaccagcctcctgcttacctaccaattacaagcctttctcacctcgatggttaatactctcaaaagggagcatcccaagctctgactttctgattaattgcctgcttgcccctgaacaaactaacagcacatactttctgaaggcacccaatggaccacctagcctaagtctttatattgtatagtgggggaaactgaggcccaaagagggaaaagagatccccccaaccacggctgaattaggagcagggctcagactagagaccacaattcctgccttgaagctcagtgctatttctcctccaaaagcctgtgggctcctggtacccccgagtttgagtcctgcctctcccactcaccgcctgtgatgacattcccatcagggcagtgagcaacgctgtgggccctggcagggacgtgccagagctcttggctccaagcataccttacatctgtctgggcataaatttgcattctgaatccaggaggccccgattccaagtatgtcaaatgtaattaattacagcaaaccttctgcaactgttttcaaacgcggtattaaaggctctgtgcgcatgaaacacacagcccaggtccaccgaggcgagctgggagctgaggaataggagacggcaagtgccatacgaggtcctcggagtaggga

SEQ ID NO: 32280 - DNA, 987 bp, Bovine  19866881379242
  misc_feature (1)..(1): n is a, c, g, or t
ntgaagaatacagttgccacgttcctggggcttcccagaatccctaatactactgtgattttatactagtagataaagtgaggctcagaaaggtaaagttacctgccccgaatcacacagctggtaaacaaatctgtacccaagcttgcctggccccaaagcccatatactcaactacagtgccgtaactaactcacccaccaaaacaaatgaaataagagcactataaataatcagactgcaacacaacacaaagaaacagtgggacttccctggtggtccaggggttaatactctgcactgacacgacagaggctgcatgttcaatccctggtccgggaagctcggcatgccacagggtgtggcccaaagcaagcaaacaaaataaaataaggaaataatgtttagagccgcacaatcttcccagaagtggtgggcttcctggggggaggaggtgcaccatcagagaaaagacagccatctggagaaaaaatagtcaatcttacaaacaaaaggatggatctgctctgggggggaggggataaaaaggagaagagagcgaaagggatggtgttccttgctccagttctgaattcttctggaagatctcaggccttcctaatactcccacagaccagctctaaacacccagcttttccatcctccatatttaaggactaccaaatatttcatttccttttttcccctcttcccgacttcacaagtgtagtaaaaagttaatgaatctataaattgctcactggctttaaaaaatgagaaaaaaagcagttaatggaaattttaatgaaaacaccctatccgcataactgatggcaaaccgagggctgaaatacctggggatttcacagcccaaactgggtgtcacgaaagcttgcacatatttatggaaagcggggttccaagctcattgatatctgaaagacgacaaagtctccactccaggcttcaaagcagcactgtgcgtga

SEQ ID NO: 32281 - DNA, 1430 bp, Bovine  19866881391783
  misc_feature (1)..(1): n is a, c, g, or t
natgcttcagttatgttatgaaattcatattagcacaggaaatgaatagcaatgcaatcctatgtactaagccacagaccttattctggttattcaggtttcaccagtggcccaaccaatagtccaggattcaatccaggatccacccattgcatttagttgtcacgtcccctcaattgtcaccagtctgggacagaccatgggcctttctttaaattctgtgcccttgacccctttaaagcgtccttactaattattctgtagaatgcctctcataggttttccagatatttgctggatcactgagttgggttctgtgtttcttttcgtagcttgcccagaagggatgatacccctcctgggcatcacagcagaaggtacgggatgttagtatgatttatcactagtgatgtgaactttgaacacttagttatagtggtgtctgcctggtttcccagttactctcttacctttcgtattaagaagtatctttgcgactatgcgaataacttgattctcattacactttctgtctctgacatccttagatgattcttgcctgcaacagttattactttggtgtttgccaaatagtgatttcctatttctgtcattctttgtacatttattagttggaattctactgtagaaagagctttcctttcttcctcatttattcatttatttatttatacaggtttaactcctggctgtttattttatggattataatccattactatcatattctattgctgaaattgttccagatttggccagtgacagccccttcatgcaggctcctctgtccttttgacaaatgcccattattctttgagcttgtccttacactcagcaaggtattcagggcttgtcttgtgctgtcccagccctggaaacaacctttattctatgaaggcaggcaggggttttgtctgtgttcttcattctgttgcatcctggtgctcacagggtctggcatgtagtaggatcacctcaaataatttttggatgaatggatgaatcctgggaaggaagattccataagctaggtacagaggcgacctacaattcatactttgcctagtctcctcctgatgagcctgaatgaatgatttagaaagggaggggtcttttccctgttttcctctcctgtgagcctcaggggctttgacagacccgttttgtcactttcagcctgttctccttgctgcacagtgtgaaaaggatcccagggcatccccgatcttgtagaaatagatcttgtcgagtagaaagagccaaaggcggggaaagcagccaagaggagcaggctggctggagagttagctggggctggcagagccgagcctgcttgctgctaatgacttggttgaacaccagccgtggcaggcaggaggctccagcagttgacggcagaggtctgggga

SEQ ID NO: 32282 - DNA, 750 bp, Bovine  19866881493299
  misc_feature (1)..(1): n is a, c, g, or t
nctgggtggtcatgcaaggaaaggaggacccagagtatggtgctgggtcggagggagggtcccagggcaggagcagagagagagactcatctgggtcttgagttgccttgctcatcagaacctgtgtagaggaggtcgtgagacatggttctgacccgagacatgatttactgtagaacagacctttggaagtcaacggacctctcagatccagagacagaacggctaatgatgcaatttcagactctatgacagtcactaatgaggtattctaggtgaggaattccaacccagaacacctaaaacaaccccacagggaaacctcctatgtcctgtcctgccttgctgtcacctccttgcctatctgaagaagacagctaccttctggaactttctagaagggaacactgcactggagagtgtattagacatgagcatctccaagggtcatccaagtggaaggttctgcggttcctagatcacttgagccataaaatttcatgcccaaagtgttcaacttctcatgccttttggtgccggagctctgaggctctaaaatcctggaatcctacctggcgctgcctttcggcttctatgattccatgcttctaaggctaagagttctgtgatccttcaaccctgtgacctacttcagggtagacaaggacctcacacaaggggagcattcattcccggcagggactatgctcagagacgccccgtgtggctgcctgaccactatgatgggca

SEQ ID NO: 32283 - DNA, 669 bp, Bovine  19866881496833
  misc_feature (1)..(1): n is a, c, g, or t
naagtgttgtctaacgaaactctagtttatttacatatgctgatgggtgtgcacgattaagtcctactgtgaggtatggttaaaagaatttgacagttgctggtccagatgatcgacgatgatgtgctccaggaatcctgcatattgctgcttatacttcattttcttattaccccagtagactttcacgtgaaccctttgggatcagtgtcctgggtcacattttttttttttattctctggttgagcttacctgaagggccagctgtgaagaagtctcaaccacgtagctggcagtcaggcacgtaccccagcttgttggccttggatgagacaggaagggcaggtgctgttagcttgtccttccagagtgaagtggcatcttggccaggtcctctggctgggaaggagactgtataagtagtgtgggatcccagtcttggtcactgggagagcagccccagttacttttattcctcacttacttcacattgccagaggactttttttggagttaagaaagttcatgtctgtgctatatttaaatacctatcagactctgagtgaatgtctgtgtttttgtgtgtatgcgcttcctaaaaaactccagaattgctgtcttggtcttctcatcttttaaatgtgtcaggccagtgctgtccaatcgaa

SEQ ID NO: 32284 - DNA, 766 bp, Bovine  19866881585107
  misc_feature (1)..(1): n is a, c, g, or t
ngggaaaacaggctgcttggggtgggcttgtctccagggagaatttgaaggaggccaggatgctgatcaaattctggtgtcacacagatcggacccactaatgaaggaaagagctgattcactcaggggctggggagtagaagctgcacccacggtctcggaaaggtgacaaagaccccggaaggtgccgacaggctcgtcggcttctgtcttcggctgagcagaaccatcttccggatgctgagtccaccaatccaaacaaaacccaaagatgggggagcagaccccagagctgtccagggacccgggagggagccaaagggcaaaatgaagaacttctttgctacaagtagcagggtgaccctgaggaggccaccctcaccctgctcagtcactcagctccctcctctgcaaagggtggtggtgactgtatctccctcgctggccgtggtggccgttcagccagctcccatcctgaagatgcgatgcagccccctggcacaaggcagtgcctaataaaacgagggagcccggctttccactcgcactagccagactgctgggaaacccggcctctaagagaagtttttttccacagtgaccaggggaaggaatcagggccatggaagagaggccaagtccatttgtctaaagatagggctgtgtcaaggccaaagtcaacacagtggaaagtagaacttgtggcttttaggaaacactccctcatccatccgggcgataccaggagtggtctttggaaggatgg

SEQ ID NO: 32285 - DNA, 1482 bp, Bovine  19866881679592
  misc_feature (1)..(1): n is a, c, g, or t
ntgtgcgaaataggcagcaactggttccaacccatctacctaggggccatgttctccttgaatgaaggggacaagctgatggtgaatgtcagcgatatctctttggtagattacacaaaagaagataaaaccttcttcggagccttcttgctttagtggtaagacagatgtcattgtatggaggtcctctgcttcttaggtcctaattttcctcacttgtaattataaccaggaggctttgtcggaggatagagacggcagttaagaaatttaggggccaaaagttcatactttatgtacctgactgatgagaatactaatcagaaaaaggcagaagagagcagacctattatcagaactgcttggaagagtggtgagtttctaaacattaaaacactgatcaccaaatgaatggaacatttccatgcctggctcctatgcatttgtcaagaagagggcctaggtactgttcaattttattatgcagcatttgcttcagtttaggaaacttaaaaacaaaattcaaagccccagaaatagtccaaacacttcagacgcaaaatcctgcatcagttcccccaaacacatacttcaatgccttaccagaaaaaaaaaagaaaaaagaactgatatttcttataaatgttcttcaagaaaaggaattaattttcatgccatctatgcccaatgagaaaaactacctttctatttcttatgtacacatgcatcaaaacaagcaactgtgagttccacatgcatattgaaaacacaacagcacctgctcagcacagtgttcttgagcaccttttgtgtgtgtgctaaaccaaaacacactatgaagaatgagacagactctacccaaatgtatatgaatacctggctcctggtcaaatgccgctcaacgtatttcaaggtctaattccaactcctaacaagtatcactggatactgttaaacagaagatttctggagctctcctcactatgttagacaaccagctgattaggccactcaagaaacttgaagacaagagttctagaaaacagaccaaccatataacaaagttgattgatcccaagagatgatggacttattccctggagggaaaatgccaatcaccaaatctggagatgttaactgagatctgctttgaggtttgactcactttatgtgcagagtgttatatgggtactttgaaaatattcaaagggatttaaatgtggaattggctcatcagcccagccaaggcgtctttcctgaagaagaggcagaacactctcctgtgcttctatgagttcatatcctctatgatcctcaaatctgtatgattttcctgcaaccatatgtcaaaggttggagggacattcttgttctcttagcctctgttgatttgtctgtaaaggaggaatccatcaatttgtttcccaggatcaaatgcgctcatagggatgaaacatgttagctttgagcattctgtgaagc

SEQ ID NO: 32286 - DNA, 716 bp, Bovine  19866881853778
  misc_feature (1)..(1): n is a, c, g, or t
nactgggggataggggattaggggaaaggccggggaaactgaaggctcacttcccaccacccaactcccctggcccaggagtcgcagtgagtggactcagacccaggttctggcggagatgctgaccaaggagaaagtgatgccctctgcacctcccctgcccgcggggccgctaaacgcatcaccagtgctgagaggtgaagaaaggcgcgagaggagggctgttagcgttctctgtgatcttgggccggaactcacctccaaaccttagtcttcccatttctgaaatagggggcggattaagtggtgagagtctacgatctttctatttctcaaacctagaattctctcccagatgtattctggggcccgtggtgtgcatggcagattgagctgggagggccatctgagacttccccagaggctgctgggaccctgatgggcctgggtgggcaaggcccaaggaggtgatggcctcaagccgcaccatgtgccctttaggtggggctgcagttccaaacctggcccggagactggaggccctcagagaccaaattggcacctccctgcgacgtggccggagccagccaccccctcgctgagggcacacggagccctagccaggccctccgtgcctgtgtgggcagcgtgggaacccaggagaccttcatgtggccttgggctgggctctgcatgctgggtttcagtctctccat

SEQ ID NO: 32287 - DNA, 1789 bp, Bovine  19866881910767
  misc_feature (1)..(1): n is a, c, g, or t
ncttcccagggatcctcgactctgccatgaacgggaaaggcctgctccttcccacacggggaaggggctgaggaacagcaggctcagctccagccctgcttcacaactcagaaaggtctctgtcttccctgctcagctgactgggcagctagctgaggtctctactgaacgagtgtgcctgtggtcgcctcaggccaggttcccacacctcctgcccattcctttgcttggtcatctaagttaaacctgtgtgtgtgtgtgtgtgtgtgttcttgcttagtcactcagtcacatccgactctttgtgaccctttggactgtagccctccaggctcctctgtccatgggattctctaaaaatactggagtgggttgtcatttcctcctccaggggatctttactacccagagactgaaccctctcctcctgtatctcctgtattgcaggcggattctttatccactgagccattcctctccctaaatcccacacttgttagtgtgattgaggaggatccaggggttctcaatctggggtccctgtaaggctccatggatgcatttcaggggtccgtgaacttgagggaaaaactacagctgtcattttcgccagcctctagttgaagctgagcactcccctcaaacatgagcttaaggcatgtaggcaacatatctacagcactggtaacagtcacagatctttacacatcacattacagtcactgctgcagagagctccaaatgtatcggtgaggccggtcaccacttcaaaattgaagtcattatcggacctgccattagatctcgttattcaaggcaagaataaagaagcaaatctttgaggagatcacaatttaacataatctcacgtttgtatttcaatataattcatttccttcgtagtcttttgttttgtattttgtcatttaaaagaagttctctattctgagatggctagatagcatcaccgactcaatggacatgaatttgatcaaaccccggtagacaagaaaggacagaggagcctggcgtgctgcagtccacgcagtcgcaaagagtcgaacacaacttagtgactgaacaacaaattctgagaaggggtctatgatcttctccagcctgccaaaagggtctaaggaacaaaataaaaggttagaactccaggatagagggatttcagaggaagctttgtgctctaccatcctaggattccaagtatctatttcccaagggccctaccatgagcataactatgaaattaaatttgctgaacgtattgccttttttttccaatcaggaaatacatccaggccgcggcagcccttccaaactcccgggcttcccacagaatgtgctcgaatgacactggaaaggtttcaaaaatccagtcctccccttgctttaattcctttcttccccccaacagatgttgtaggcctggtgaggaagctcctcgtgtgcgtgactctcacggcattgatggcgtttcttgggagagacaaattcttctgggtccccagcatcattccccttccagcccgaggcagccccttgctgggttcagaggatggggtccttctttaaaggagtggacgagactgctaccttccgacctgagctacgagcccagagcttatgctttcaggaggcgccgggctgcagaagagggactaaggccggtcatccactcatcagcctccagtgccaagggccctggacctcaacactgaaggttatgtttctccaacttccttttcaggatcacgtgcaacctcctctccgcttcaga

SEQ ID NO: 32288 - DNA, 1728 bp, Bovine  19866880349440
  misc_feature (1)..(1): n is a, c, g, or t
nctgcttgaggacaagaactccatccgatccattctggcccagtggtgaacacaggctttagagacagagagcttacctagtctggaatccgaactttgccactggcgtgctagtaactcaacctcttttgaacctcccttcatctgtaagatacaaatgatcctacctgtcgcacatgcctgtgatgatgggcagatacgacaacgcccacaggcgctttactcagcctagcatgcagtaacagaaagtcactctcatcctgttaggatttgcgtgcctcaaatctcacacagccttgcccagctcaggctctcaggatgaagcctgtagccaggctgggaagcggtcaggtcttctggattctcccctcctggtccaagatcatctctggatccctgactaagtgctcagcctgccaggcgcccatgtgggcctcacagcctggccccagacatcaagccccaagcccactgtgggaggcagtccaatttgacgaacatcaattatcaagtgccagttggccaaaaatcaatgtgtcaaatgaccaattcatcaaaagccaattagccacaaattacttcgccaagtggctacattcccaaattatcccaacagttacccaaaacttatttatttcaaccatttataaagatgacaaccatttgtgttggaagagatggttttagttttagttaataagttctgattttgtgttcagtgcagcatttaaaaaaaaaatattaaggaggtcaaaatcaaggaccatgggttggtttagtcatcttatttagtatgcactaagggactgcaaggagatccaaccagtccatcctaaagaagatcagccctgggatttctttggaaggactgaggctgaagctgaaactccaatactttggccacctcatgcgaagagttgactcattggaaaacaccctgatgctgggagggattgggggcaggaggagaaggggacgacagaggatgagatggctggatggcatcactgacttgatggacatgagtttgagtgaactccgggagttggtgatggacagggaggcctggcgtgctgcaattcatggggtcgaaaagagtcggacatgactgagcaactgaactgaactgattcggtgtatttcattatgagttaccgaacgtcagtgcttcacacaggaaatcttgaagttactctctgcagtaggttgaatggtggctcctgaaaagacatgtctgtcaaatttccagaacctgggaatgtgaccttatttgaaaaaaaggtctctgccaatgtaatgaagttaaggattttgagatgaggacataatcctggtggaccctaaatccagtgagaagggtccatatgaggagagacacagagagaaggagacaacaggaccacaggtacacggactggaggctgctgctgctgctgctaagtcgcttcagtcctgtccgactctgtacgaccccacagaaggcagcccaccaggctccccccccatccctgggattctccaggcaagaacactggagtgggttgccatttccttctccaatgcatgaaagtgaaaagtgaaagtgaagctgctcagtcgtgcctactcttagtgaccccatggactgcagcccaccaggctcttctgtctatgggattttccaggcaagagtactggagaggggtgccactgccttctacaatgcgtgaaagtgaaaagggaaagtga

SEQ ID NO: 32289 - DNA, 674 bp, Bovine  19866880435108
  misc_feature (1)..(1): n is a, c, g, or t
ntgggagtgtgcgtctcggtgcgtgtatgggttcacgttgcgggagtgagcacacatccgccgactcccttttcgcagcttgtgtggtggtggtatctcagagggtctgcccacgggcctgcgggtgcgtagtcggctgtccctgcgctcagccggatcccagagcgcccacgaggcgaggtgtgcagcccgtgacccattccgagtagtctccgcggctttgccagtaccctgctccgggaatctctgccgtcagctccgtgtcccactgggtgacgcgcacaggcgctctcccttctccaggcctcagtttccccttcgtccaaagaggactggatgggggcagattgggtagctgggccttccgcgagtcggggaaggacatgctagatgttcctgcgccctggaggggacttttccgtggatcaggtaggtttgtcacgttagggtgagtgtggtggcgctaaggaggaataaacggagggatggtgacctgctcaaacatcgccccctggaccagaaggggatcgctccgctcattctgacgcgcctgtgctttctcacctccgcagaagcccggcgagaccccccagcggtgcgccccgccccggcgccatgcacttgcgaagtggccgaggcgcactcagacaagaggccgaaggaggcccccggcg

SEQ ID NO: 32290 - DNA, 923 bp, Bovine  19866880510328
  misc_feature (1)..(1): n is a, c, g, or t
nttatttttatttatttatttatttattttccagatttgggtaactttatttgcatttaatagtgatttttaagccctatatccaatgaaaccatttttaaaagctttatgaggaatggaaatttagatgtctattccacttttctttaaaaaaaaagaagcttaaatttctgaatgagcaagattcacttttgcaggtagaggccctgcttcttcatgatcttcagctttagatctaacaaccacaagagaagaagctggatatctgtttagcttttgttcattcataaattccaagtcaccatagatactcagcttctcagagggaacatactgctgcacagctgtagcaacagttgcacagcaaatccagagcaacaccatcacagagaggacaagagtcacggttaaaatccacccagagttaagagccaggcatcttaaaaagccgtcactttctccatcttcaagatagtttctatgtgcttgtgaacttctcatttgcagatctgaggacattttgcttagtgatgagtctttcaattttgtaggctcctgctccaactgtggtgcatactggatttctggcttagactggaatataactatttttccatcatcagcttgaagataaaaagtccacgaagaggttatgaagctctgtgcagagtccaccatatcactccagaatgatcttaccagagttagagggaagagtagatgcatttttggcatcagggacatgagttgttcttgtctcaattctgtgtatggcagctgattctggcaaccaagatggcaagcatattgctcatcagattgggaatatgccttctgtacatgcagattcacattccaatttggtccgatttaaatcaattccatcatcacaaactgacaaattaaaacagcctgcaacctct

SEQ ID NO: 32291 - DNA, 3238 bp, Bovine  19866880651449
  misc_feature (1)..(1): n is a, c, g, or t
ntgatgtacaaataaagacgggtctcggccggcccagacgagacgtctcccagggcctggcccctgctctggcctggggtgccatgcagaggaccctcacttctcgcttgctctcacaccatccctggggcctgctgcgcccttcccccttctttgctgtcacatcaagaagcgcccaggccctctccccctcccccaggggagaagcaaggtctctggtggctgcttccacctcctcgctgtgaggtgtggggcctcagtctccttacatgtgttgttactgttgttcagtcgctcagttgtgtccgactctttgcggccccatggactgcagcacgccaggcttccctgtccctcaccatctcccagagcctgctcaaactcatgacctttgagtcggtgacaccatccaaccttcttgtcctctgtctcccccttctcctcctgttgtccccttctcctgcctcatgtgtaaaatggggataataacgtcttcctgccagaagtgttatgagaacagaagcacctgaagtccctactcttagatcctggcacttaggaaacagaccccctgttccccagtaccatcaggtttccaggaaatgtactggctgtggactaccggaagttcagtcaagcctgtcctcccaaacttctgggggttataagtgcctccagcattcccaactatgctccccagcagatcaggccctggagacagtctgcactctttcctggggattcacaccacgtgtagcaccacacccccaaggagcctgccttgtcatcaggaaccttgctgcagaactgtcttcaaacacaaaggccacccgtcagtcctggcagctcaggctgctccccaagcacacagaggaagaaaccgaggcccggagaggtgagatcacttgcctggcatcaggcagaaagcctctagactcccagccccaatatgtttcagttcacaccagtgagaaagaggtggtacttgccacccccaagcagtgatggggaggtcacggcaggacacattgatggcacctcagcccacagcctgcacaagtgcccagttcccttgggacttaaggctctgtcttccagagccactcatttgaatggaacctcactgagggtgtgcttgggtcagtcatcccagtgctatcagctgggacacagacagaatcggctgggagcagagtaagagtgaaacctcccatcctggggaagtgagccctcactctctgagcctcagtctccttaagtgtaaaaggaaagcactggacccgatgaccctcagggcccacgctagccagaaacttactgggatccagctctccaggccacccctgctataaagcagggtatgtctgtggtcctgataaccaggcctggctgctccttccctagcgacccgtcctcagcccgagaggtcattccccatcactgtgtcttcctccccagacccaagtccaaaactgacctcctggtcactgcagcccctcgagttcttagctacatcagcgacctgggagggagcggcccgacacctcactttatctcccactacgacctccagggcatcttgggcccctggtggggaggagtcagggtccacacgaagcggggtgaggaggcagcagccacgaatgtccccagcagcagctgcatggctgtgggagctgggcccgcaattaaaataaaccccctgaacagccttaaaataactacaaggcatttcaagaagattgtactgttgaatttactgtttgtttactgagacaatctgagtcgggtttcagatgaaagtaggagggagaccagatgtgaggctgaacgtctgacctgcagcatctgccgccagggcaggagccccgcacggccagggggcaggggcgcccacccagaggagacaaggaagaccagagactcagaacccctgacccaaaccaggccggccagggcccagaaggccacattccagctccactggtcggcttccaccactgacacagagggctgcgtggagccaaggcgtcccagagagaagcctgtcctccagaatctgagatgaaagttcacatgccagctgcgcctccctggacaggtcactatgccactctaagccgatgtcctcagctggaaagcacacttcctacacgtctgaggagatctggaaagggcctggccacagacggtaaggccagcccacttccctccttctccctccagcttaacagtcttttcttataaagagtggcccctaggctgcccgcctgaggcagcctggcctgaggagcgccacagccacgttctagcatctccccaaggtcagtaaacaggtaggattctcccggtccccagtcccagcccagagctgaatacagggcagcagtccccagccctctgctgaatgaaggagggagacggcagggagtgagggagcctccactcgctccaggaagggtcagactatccgtcagggctcagctaatagatttaaaaccttttcctgttaatgacagcatctgctcttcatgtcctcctggaaaaggcaaggagagagatttctatcacacaaatgtcatcatggaaacaccaaggcccaaagagattacgataatttacttccctgtccacaatccctgttctttggcagtgagtgggtgctatctgtgtggtgagcatgggacctactcacccaaggacaccaggaccaggcaggcaggggacactgcagggagaggggacagccatggacctctgctgctgacagagctgtgtcatcctgggcaggacacttaacttctctgagcctcggtttccttctttacaaaacaaacgcaataaaaccccctcaggacttcccggtggtccagtggttcaaactctgcattccaatacaggagatgtaggttcaatctgtggttgggggaactaagatcctgcatgccccagggtgtggccaaaaatatttttaaaagattaattaaaaaaaaaaccaccccccccttatgaacattaagtgaaataatggaagggaagatgttctgtgagctctaaacagcacggaaccatgagagttaccatgctattattatcagagaaggttttaaaattcacatggtcagaaaataaatccatcctacttggggaagggtaagatataggcaagtgtatgtgatgttcctgatatgggctgagtgaagaataaacaaatgatactccaaaagaagctgtcagg

SEQ ID NO: 32292 - DNA, 1113 bp, Bovine  19866880675317
  misc_feature (1)..(1): n is a, c, g, or t
naccgggagctgactgtggctcagatcatgagctccttattgccaaattcagacttaaattgaagaaagtagggaaaaccactagaccattcaggtatgacctaaatcaaatcccttatgattatacagtggaagtgagaaatagatttaagggcctagatctgatagatagagtctcccctcagcatcatctaattaagggctggtcccagtatggagcccagaagatcgggtcagcagggctgtcctggaacactgggtcccagcccatggagtggagaaggcagatggggtccaggccatggtgagctggcttgcggaaagggagagcggagtcgtatgcttggacccgagtccatgggggctgtgaacctcgtcttttgctacatcatctctctgtgtcacctccttcccagcaccacaggtctccttactctgaaagcaacacactgcttctgtctctgcactttctcccatgctcttctctctgcctgaagggccctccccttctttatttgactaactgctgctagtcttttaaggctcatttcaggccctggggagacctgctctgacccccaggctgggtcacagctccttctcggggcacctacagccccctgagcacccttttgcacagcctgcctcaccagtctggtgatcacttgttcacggtccatctcctccaccaggcagcagatcttgggcgtgaggactgtgtttactcctgtctgggtccctagtgcctttcatcaggcctggcacactggggaaagcttgtccaatttgattagtaatgatggtcccctcgtgtttgaaaatgtttgtttttcaaagcacgttcacgatccttttgagccacccagccgttgcagagggaggcaaggcagtgctgacaaggtttggaagcagaggctcagtaagctgcctactgtaatggccgcagagcctggcctccaagtctaaggctcgcttgcgctgtctccccctactgcctgagtaaaagctgtgggtggcgcccacacccttggcgaccctgaggccaggactgcttgtaatcagattgccttcctccccactgagctcatgctgctgagggaatggaaatttgga

SEQ ID NO: 32293 - DNA, 1712 bp, Bovine  19866880706746
  misc_feature (1)..(1): n is a, c, g, or t
ntcctggcagcctctgccggcacgtgtaatttatttacagggttggaaagtcggcaaaatacatcatcaactcttatacaaacttctattaggtattaaatacccaagcctcagagaagtaattcatatagtccaacaacgttccaaaataaacccaatctccagccctccggagagcttaaaacagcaaatgggatctgtgtttttaaagccgagtttataatactccctggtttcttgctaaagctttgccatcaaacctgttacttaaaaacaaaagcaacaacatctaagagagtaatccggttgctaaaaaagacataaataggaagaagctgagccacaggcaaccaggccatccttgacacctcttccggctctcgctttcacacgcggggtcaatatctaaaggcaaaggacctttgggcaagccaaaagcctcctacaatttccacttcagaaaaaatatgaccccttgagaacgtccacgttcacatacattctcacaaacacatacacgcccccgtgcaaggccacagacccaagccagcagtgggacctcctccttccagagaggggcatttgactcattcatcatttgacacaaaagacccatttcccacaaactctagttcactctgatccctggcttgctctcccccacaagcctttcttcatcccaccaggcgttgaataagaaataattagttaatagatctccagccatcatgcccagggaagcatgcattctacacaccaagtgtagtgggattatgaggaattctcttcaaacagaagtcttcactaccagcagaagggggatcacagccagggcctgggcaacagagctcccacgcacagtatgacaggctcaaatggggacttgaacctgcagtaaccagtggggtgtgtgtatgctgcttctgagaggggtctgcctcctgggtctccagtctcaggctccttgcctgaggacccccatgtcacaactgggaaccactgtcctttccccatttctgcaacagagagtagtggggagagccccagtggaggcagagtctccccttaaagtcatacctcagcctgtgagctgagactgcagtctgcccgagggactgattgtctgtacctgcctgtggccttccactgctgtcccccagggttcggagacacacgctagagccaccacgactcttagctgctgcatgggttttaaaagctgtagctgagagctctgtgctctagagtagcagtcccctacctttttggtgccagggacctgtctcgtggaagacgattcttccacggaccaggagaaatgcagggtggtctggcgatgattcaagcgcatcacatttattgtgcacattatttctattattacatcagctccacctcagatcatcaggtgttagatcccagaggctgaggatccctgcttcagaaggagagcaccggcttcgctgtcagacagagctgggttcaaatcccaggctctgctatctactttctgtacagtgagtcactgcaaaattaaatatggagctcactgtttagacaaattgctcaacttttccaagcctcatttccctgatctgtaaattcagaataatgcctccttttctcatagggttattgggctttattaaatgcaatgacagctatgaactgcttgacctggcacagagtaggtgctcagtaaaggttagttg

SEQ ID NO: 32294 - DNA, 1220 bp, Bovine  19866880719396
  misc_feature (1)..(1): n is a, c, g, or t
nggcaagtgggggtggaactggcttttggaggcaagagcttggaacctggagtatgaacaaagtaggggaaacagcctaaagaagtgtgcagccctgggacccatcaactggcacttattgagcaccactgaatactagagtattctgtttacatatagtgtctccttcagccctagcaagtacccctaaaaatgaaaactccccatctgtaaaatgggagattaagcaacacagccgagtttacccgtcttaggagagacccagatgtgacccagggaccgtgatcctttcctctgccctccctgacctccattccccatgtcggggaacaaaacaagggctgaacccgccgtcaggaggctgcactccaagtacagagatgcctgaaatgcaagactccctggggccacttggatcccagcagtaaccctcgctttacaaggtgggaccattcagagggttttcctcccctcggggagccagcaagctccaaatggctaatgctgtgttcgacagagggttgagtttaataaagctagaagcagctaatggctaacaataaaaaataatatttttccttcaagcaattaaattgtaatatagagctcactaattccttcctgttctttcccaagggatctcagatcaagcaccaggagaaataaattacgtgtcgctattccctgcttgaaacccaagttttaaagaatctatgggagaaaaactgcttccttcattaaggcagaaatctctgaggatttttataatggtttcattccaagttacttttctgcaaatgcgagatcccctacccacccccatcttaaagactgaaaacttcacttcttgccccttcttctccgaagaaccaaagtatataaaagttagggttaccagagcaaaaaagctctccatagctccctgtgtctacagggaaacaaacaaaacttcctacccccgcccctctcttggcctggaacccaaggccttccaaccttatttctctctgttcccgccacagacccttctctccaggcaagcagaacccaccactgctcctcatgcacatgctctgctctcccctctccaggcctttggctgtaccaatggtgttgcctggaattcccttcccaccagtgcccaattcccaagttggagcaggtcatccacgcgtggaactcccccagcaccctctgtctcgtgaagaccttctcctttt

SEQ ID NO: 32295 - DNA, 746 bp, Bovine  19866880808338
  misc_feature (1)..(1): n is a, c, g, or t
ntacatctgtaaaatgggaagaatatcttgtaaggattagagatatttaaatcacttggcaaagagcaggtattcaagaagtgtttcctgttttatatgggcactctgtgattctgttttagagcttatgaaaattccgtttggggacaatgtgggtcattagctctgctttgatatgttaattcagaatgtgccctgacacataatagaacctatgtaaaaatctgttggatgaatgaacacattttaacttttttaaagtataacaaataagagaacataaaagtctacatctggccctgtggaaagacctactgttccactcaagttagcagggagaacacagcaaaagtgtaataatgatttcaagacagaaatgttggcctggactacaaaaggacctaggagatggacttcatagtggttgtatgctctataatgtcaaaatggttttacagtctacttccagttgtttctgactttatggcttagatattgaactgagaattgtctaagcaaattctggccctgaggatttctagattggtttcttcaacttgtacattttctttcacagtattttaatggtaaagaaaaagtatctcatacaaatgagataaattgatttaacctcagctttcataaagtaactggtgacctgtgttgctgctgctgctgctgctgcatcgattcagtcgtgtccgactctgtgcgatcccatagaggcagcccaccaggctcccccg

SEQ ID NO: 32296 - DNA, 3339 bp, Bovine  19866880856543
  misc_feature (1)..(1): n is a, c, g, or t
nacctgtgagtgtgtgctcactcgggaactttctctctttctcattgtttctgccctgctgtcctagtcagggccctggcctctgaggccttccagccccccagcaggggaccctgccttgtaagaggcggggaacagccagcgggtggccagacgaggtccagatgaaggtcactgggctcaggccaggcctgggtaaggatagggcagacccagcagcagagggtggcaccgtcctgtgccctgaggaactttctgggagaccagactcacaggctggacacaagcaaggaatgcaaggaggcagttgccctgacggccagagctgtcaggccgggttccaagctaaaaggagtgggagagtctggactgcaggtgggcggacatcaccaagagcttgtgggaaacccagggcgggctctaggaaggttcatttctgaggtcagtggcttggacagagaacccctgagcggacagagcctaggccagaccctccctcccctaccttcctggcaggcccgtttccacccagcacctcctgggccttcagagcagatcattcccttgagcttcctgaaacaaaacactttttccccttttgaagattaagaaattgatttcaggaaggaagagaagctgggagaaggtcactcggccttcgtctgagcttgcaggtgacagactccccccaggctctgccctgaaaagtcccagaagaaggaagttatggaaaagaggatagggcggcaggaacatctgagcctaggcgccctaccggagactactaacctgctgaactctcttctctcttgtcttttgcatgacactccaaagagacgtatgtacgcatgtgtttgtgtctctgtgctggtgagagaccagtgtctgtatccatgactccttctcggaggaaggcaagggagttgcatcgtgtgtctctgtgtggctgccatgtctgtgtgaatgtgcctgtgcatgtgagctggtgtgtgagcatgtagatgtgtgcatgcaggtgggcactagtgctgggggcactgccccttccttccgtggggaccccaaatgctcctcaggcctctctggaccactttccctccctccctctgctacaggccccagcagactcacctccagggtagatcaaactgggaaggcccagactcccctcttctgcctccatgctgactctccagggctgagggaccctctacctgttctctgaccctgactcacctcaaccctggaggactctgcgccttcgtctttcatggaagcctaagtcacgtggcactctccccttccccatcagagccatctggcacctcctgctccacccagtgctcagtaaatacggtggttgaactgccactcctgcagaaggagggggaggaagtgagtgatggtgactgaggccatgagtgagcaggtgaacaagtgaacggatggtgctgagggagcagtatgcagtgtgctatgggagaggtcagggagggctgggagtgatgggaagacccgaaggtgatgccctccagagaccaccccagagctaccgtggctcagcccaccctgaggtgctggggcttcccagtgttgggcctggccgagtcatccccagcccgccagtcatggggttgccatggtcttgttctttcagttctgccaacgtcccagagaaacaggaggcggcccaggggtaaaggggaatattcccccagcatggctcaggcttggggggggggggggcacccacagctatgcatggcctggggtgggaagctcagaccggctgtgtgcatggccctggctggctcggcacagctctgcttggcttggctggagtggcggggcaggggtctaatgggcagagggtggcacggcaccttcccctggcttgaagagttaaccttctgtgattctaaagcccagaagatgctgtgagaacttggtgagccttggtcctggcctctctgacctccactaggaccctgccagacgtggtgagggagtggaggatgggggaaccagatcccttcatcccttgcagcagtcggtaatcttgggaccagacttgtgaccaagtgtaggaatagggacaggggctgagaggagaggagtggggaaaaagtccaccatagttcacagtgggagagaactgacttagcaacagtgccatggagatagaggcctggcagtcttaaataaccacaggctcagtagagggcagcccttgtagtagttcagacccctctgggtggtagactagctctgggccccgtccagagagggacatggacagaaagagtgcatccagagaaagacacctgaaagccaggggaccaggaatcagtgctttaaggaaattctgagggagccattggactctggccaaccctgcatggcaccagctgcctcagggggaagtgggcttcccgagactggaggtggttaagcaagggcatttcacaggggattcttaaggtacttgatggttggacatggcacatgcttactgaggtcatgaggaaggagatgtaagaaacgtgtttgtgaaaggaaagaccttaggcagcctggctgcctccaggctggtgatggacagagtcctggcctgggaggcaaaggacccgagttctggttccaccctgtcctgtctgtgtgtctggccttaagcaaggaccctctctgagcctcctcttgcccagtcacctggctgacgaggctgtggctcgatgaggctctgagggaggctgaggctgccctgaatctctgcttcaactccaggcccatccatgtcctgcccccaccccagtctcaattcctggaccctcaggagcccatgtccctctctaggcctgaacgagtgtctgcacaacaatggcgggctgttcccacatctgcactgaccttaagattggctttgagtgcacgtgccctgcgggctaccagctcctggaccagaagacctgtggcggtggagcacccccaccccagcccctcaagcagaggcagttcctcctgctggttctgacctctgctcctccccacagacatcgatgagtgcgaggacccagatgcctgcagccagatctgtgtcaattacaagggctactttaaatgcgagtgccaccctggctacgagatggacacactgaccaagaactgcaaggccgttggtcagtatggacactacaaggtgggggcaggggagcagctctgagcaagtccaggaagcagcgtgcttaatgcgaggagtaggtgtgcacacataccccctcacacactcagataggaagttgcaatatatagcacacacacagtgcaaccgtgcacacaaca

SEQ ID NO: 32297 - DNA, 1472 bp, Bovine  19866881017614
  misc_feature (1)..(1): n is a, c, g, or t
nagtgtgtaagcagagtcccttgggggtgctttagtaaggcagccagccatttgtaggatggctgcaccactgcttttccttgcagcctccggattccatgatttctgttccataggcctcacaagctgtagctcacaggcacggagggttccctggagggggtagagagggaagctcagatgggcaggacaccccagaaggacagtaccatccagttcaagcacgctcaggaaaaggccccatagttggtaggtggagtaagacctcttcccaacccagccctgtcatgtaccgtcttgttccccagtacggggagctcctcatgctggctgctggcaccggcctggcccccatggtgcccatcctccagagcatcacagacaatgcagaggacgagaccttcatcaccctggtcggctgcttcaagacctttgagggcatctacctgaaaaccttcctccaggagcaggcccgtttctggaatgtccgcaccttctttgtcctcagccaggtgagcccaggggatgacttccgtccctgatggagactctgctgcccccttgcacccctcccgagggcccgctgtgggctctctcacccgtgccgtaataatcattctcatcactggtggcagccacagcgtgtgcctgtgttatcatgttcgtcatgcagatgaggaagctgacgctcagaggtgaaggcaccagcttgtgtcacgctgccagacggggtgaggccaggatctgagcccaaggctgtctgcttccagagcaccagctctcacccagcatgctttgctgcctgccatccaccctccggcatcctgcgttgtgtgggcaaggggcctggtggtggaagcagtgggccaggcacagacgtcctctggctgtcatggctgattgaggcagggacatatttctaggttaccagtctctcagtgctccacccagtgccaggcacggaggaggcactcaccctgtcaacagctggtggagtaaactagatccgagttcatggcatttgttagagtcttttccacatcccttttctgtgcaagccccagccactctagctagaaatggctttgcttcctgagccctcttccctttggttccctgtcccgccgttcattcaagggacccctccgggccctcccttcagggccacagcttgggggtggggggatgtcttgcctcttacctcaagctaggccttcaggtgtctttgtttgtgtgccttcccctagtctgtagcttcatttctctttcctgcacaccctgggttggggtcccctgctggtgtctcccctccgttctcttgctcagggtcagcctcattgccctgtacttagagtgtccctaaagacttccatgatccttgacattgtgggtgggaggctgtcaggaaaccagagatcttgaggtccccaggagccagagtccacaggcctgtctatcaggaggaatgctca

SEQ ID NO: 32298 - DNA, 2939 bp, Bovine  19866881036813
  misc_feature (1)..(1): n is a, c, g, or t
nccctcccatggggatccctgccctcaggagcccaggcggtccacagggctcatgggagaagaggaactggagacggaacgtccccccatcgggggggctcctgcacccaagatgcatcgtggcattgaaggtctagtctcccaagagacattctctggctttgaagtcagctagacccagattcaaactcctgctctgccgctcaccaacacgggcaagttacctcaccactgtcagattcagccacattcaacgtaaaaagtaattccgtataaactggtgcagctactatggaaaacagtatggaggttccttaaaaaactaaaagtcgatcagcaatcccactgctgggcatacagccagaaaaagctatgatttgaaaagatacacgcacgccaatgttcgtagcagcactatttacaattgccaagacatagaagtaatctaaatgtccatcagcagatgaatggatagagaaaatgtggtctgtatacaatggaatactatttggtcattaaaaagaatgatacaatgccatttgcagcattataggtagacctagagattatcatactgagtcagaaagacatatatctatgatatcacttagatgtggaatttaaatatgacacaagtgaacatacttatgaaacagaatcagactcacagacatagaaaacaaacttatggttatcaaagggaatggggatttaggagggataaattaggtgctcgagattagcagatagaaactactctatataaaataaacaacaaggtcctgctgtataaaacaggaaactacatttaatgtcttataataaaccataatggaaaaaaaccaattcattccatggctcctggcaaggtcctcatgggaactgctgttactgtgcatttaccctgtgccctgcatgttctgagctctatgcattagttcactttacctgcaccaccaccctatgaagcaggcactgttaggatccccactttatagaggagaaaacaagacagagatgtgtacaggagacgcaaatgcagggcacctggaactggccatggcatccagagccgctcaaagtatgaatccttcctctttgaacggatgggggcagggcttggggtccctgagaccaacaggacagcccttgtcccaaggagtccacacaccaaactggtctccacacagccctcaacacaaacctcctgatcccaggcatccagaaccaggagtgctgtggattccgcctgcccaggggaaggctccccagttccccatcgggggtgctagatgctccaatcactgtctcaggccctgtgcagcctctgattccaagaccatggccagggagacccagggcagggaaggcactccggatccctccaaaccacacacgtttaaagcctcttagattttccgattttaatcaagcctagccccgagcaacattctacaataaggagggatttgtttagcttgttctgagaatcatttacctactaaagaaacaaaatcctttgccccaccccccagtctcacttgtgcatttaagaccattcgtggtctttaaaaatccttctccagccacttgttagaaatgcccgctcacaaccaaggctgcaaaatattgggccttctcccaggatcgatgtgccataaggacaccctgtgcaacaactcctttacctgggcccacctgctcactgtcctcagcactacttttaacccattggaacagatctgcggcagaaataaagcagatattaccaatcctatttactgatggagaaatcaaggcacagagaggggaagtaacttgcccaaggacacacagagttagcagccatacacagagtttttaattcagtcgactcaacatcttgcactactcagtcacatcaccctaaacccgggtgagtgggtggactatgatgaagaagggggaggggaaaggatgagaaaagaggagggggggaaagggagagctctttgaggatggagagaaccagaggagcctcctgcttaatgagccattccaactccagcagtgcagggcccctccaagagaggggcttcagagtggggatggaacaggcctgacctgcagtgggacaggtctcaggttagctcctggctctgtgggacctcgtagcccccaaatcttgagcaactcatttccccctatacctcaccccccagaactgcctcatagtgagagatatgacagtagccctgggggagtgctgtcaagtcaaaggagagggtgctctctgtaactttcccatgggaagcacaatcactgttatcattattttatttataaggtctgcagttttccaagggctctcataagcactgtctcttgggaggcagaagagggattctcagcccgattctgcagatgagtaaaaggaggccaggggaggggaatgagcagggggagcttgcactcacacccactccctgcacacacctaatggcactgggaaatgaaggaaggaggctttggctccttggggctttcctaggtccctgctgcctcctgggaagatctgcagattctaacgtggtgtcggccccagttcagaagcttcatatatactgtggcatctgactcgcataacaactatttatcctacgaggatactgaggcccagagggagaaagtgacctgcccaagatgcccagctggccagtgacaaggccagggggtgaatccaactggcagatttcagagccagcctccccacaactccacagatccctgccttaccccttcatcgagatgaaaatcagctgtccagtctccagggagagggcagatgagagtccataaagactcttgcacagagaggaaggcaatgtttccaagagcaagcttttctattgcgggaagtggaaaggggctggcatttgtccttctctcctccttgtcag

SEQ ID NO: 32299 - DNA, 1207 bp, Bovine  19866881096518
  misc_feature (1)..(1): n is a, c, g, or t
nccccaagtatgcaccaggccccacgccaggcagtgagcatgcagtgggtacagcacagacatgtgatgtccctggtgggggtgagggtggacagagaggaacacagtgtcgattccggcagcttctgtccagctcccatctcttcccccagagtcctctaacttcaaactccttccttcctaccctctacacagctaccccaggaggctctgatgtatgaaagagaccctgctgctcttgcctaaatgcgggcctggcattcaaacacccaggccctccacacttccgggcccctctcgactccccacccaaggctcacagcagcaggggtctgccaggtaatgccaagtctttgtttctgtaagacactcagcaaggaatgtcctatctctctcatcacagtctgtccaacccctgtcagcctgcaagatccttcgcccacagacccgaggcgcattccctggtccccgtgtgactggctgccctttcctgcttctcctcactgtccaccttccattcccaaggctcttgccacgggcaggaggaggaggtgccctggcctgcctctgctccctctgtccaggagtgatgctagaggtttaaccacacacgacagtcagaaagtgagcggccccaacatccccacctcagagacggaggcttcctagggtggtcccgcgttgggacaggacacaggccacgtctggtgccaaagcccaggtgtctcctctgtgctcgctgtcttcccaggggcagggggcagggggaggcgattcttaagaagaaatcagaggaggccgggctccctctcttgagccactggttccatcgtctaggccaggacagacgacgtgagacaaggactcagagacaacggccggtctggtgcgggcactcccggcgcctgtcccttaaaggcctggccgcaactgcaggccgcgctctgcttggggctggcccaaggcaaggcgcccgcagctgggttttcgaaagctgttccacttcctatttccagatgttatgccttttccatgcatcaaaaccagaaggaaatcctgttggggagtaaataggccacaagccacgcccccaccccctgcaaggcctgggccaggttcacgcatagtgaggccgagcagctgaagggcaggctgcttctcggcccgagctggtcccctttgttcctctccagcccttgccggggag

SEQ ID NO: 32300 - DNA, 2719 bp, Bovine  19866881145030
  misc_feature (1)..(1): n is a, c, g, or t
nattttatgagagacaaggagacacatgagctaaagaaaatggaaaattaaagctctaacctatttctaattgtagaatcccaagacaatgaaaaggaggtgctttgaagagataaccactgtaaaacttctacaaatgaacataaatccgcaggtccaggaagaagaatatatctaggttaaatttaaagaaacacatgctgtgatagccagtctacaagacagccccagtgatcctcacctcttggtgttcataacccacgtgtagttgtctcccaagctgtacccaggttggtctgtgtgatcaacagaatataatggaagcaatggtatgtcacttccaagataagatgataaaagatactgtggtttccatcttggttattctctcttggatcacttactctggagaaagtcaaccatgatgccatgagcagccctataaagatataagcccaggcatagggctgataagaaactgaggccttctataagcaatcctgtaagtgacccattaggagcagatcttcaagccctgctcaagctttcagatgattacagccccagtcaacagcttgattgtaacctcttaacagaccatgagtcagaagtactcagataaacagctcccagattcttgaccctcagaaaacctgtgtgagacgacaaatactttagctgctaaacatgggggtaatttttacacagagacaggtaactaatacacatgctaagacaacattttcgggtttttttcccactgtgcaacccacttcagtgcctgcagcctacagacagaggccaggcaatggtttggggccagtttgctctgtcatgggatgctatgagaggcctgggggacagcctgccataaacccaaactcatgcctaagaccaaacagtttcaaatgacttacaaagagtcttttccatctgatccagactctctaactgattacatttcaaatataccagactgcttttagtctctgcaatgcaccatgctctctctgtacagctcacatgacatagtcctgcatgacacattctttaacatcttctctactctcaacacacgtactccttgatctaacttctcctcatcatcagagcactcacagaaatctcatgggacagggacaggaaggactctaaaggtgggagaatgtaaacattctcaggcaatgatacaaatgaatcttcaggctagcacctaacataactacaaaggaaccgaggaacccttatattccacacaaccttaggcaaggcccgggataaggtcaagactcaaatgttggatggtttccaggtcctcctaagtcatacccccttgctgtggtttcattatgatccttgaattgaaattcctgaacatcagacacgcccattcttgaaagcatactcgtaattgtacttagcatacttgcaactgtactcaaaggacaaacagaaatgatttttaaaactgtcatctgttctgtagtgtaggataattccagtctattatgtcgatatttaagatctgattgtaagtgtatttgcggtgtgcctaaatatgaacatatatatacacatatgtacatgtacacatcataaaatattaaccactagtaccctctactggtggaaataccttatctgctcatatgaatggtcttattgccctctagtgaccacaacctataaagagaaaatccagcagcagatgggagaatctccttggctataatgatagggttttatgttctttaagcatctaattttctcagattctggtttatattacaggggtgcaactctcaagactcttgggggaacctctgggggatttcacacagctcttgccagctgttagcgccagtctgaagctactctctctcctgcttctcatgaacaagaggtcaaggggaggcagagaaggcaatggctgcacgggtgagggcaagcacagcagctgtgaatgactaccctggactccctggggacttgggagcagcttgaggaacacatgttggccctccctcgcatattattcacagttgtgtactgtactagaacggtaattcgatgtagttcctgacttacctcttaagataactccaatgctgtaataagtgatgtaagatgctatcattttgcttttacaaaccatgctttggaagttacttctacttaagacagaaaagccaagatttaagtgacctgttgcctcttctacggagttttttctgaattccccagatgtaagactactctgttctctgtgccagcatacaccttgcacagatcagaatggtaccacagacattattcatatattttaatttttaatctaaactattttactacttacacttgtctacttgctggtttctccaccaaaccctaaattccttgacgtcacaatcatgtcttcttcatttttgcacacccagcatcaagcacactcaaaacattacccacagatcatgcaataagtacagaaacctgaagtaagcatttagaaacttttatagtagtctgacaaagtacttccacatctgttgaatctaatttttttagaaatagggcttgcactctgcatattttaatttcatttaattgttaattttattatactataaaagtattagtctacaatcaatgggagaattttttaaacaatggtctctcaccacagatagtttggagaagtactgatatgatagataactat

SEQ ID NO: 32301 - DNA, 1403 bp, Bovine  19866881257306
  misc_feature (1)..(1): n is a, c, g, or t
nctctggaacttgtgatttcattattaagggaaaccactagagataggcatgcagacaagcatcaggagacccatacaaaaatgttcacagtgatgccatttacaatggcaaaaacctggaaaccaagctaatgtccttagaagaaaaaatgaattaataaattatgtcatctgcatataatgaaatcctgtatggcagtggaaatgaagcagataacaactgcagtcagctctagaagggaatcttaggagcataatggaagcttagaaacataagctgagggagaacagcgtattcagaagacttcagaccacacaatccaacatttagagggctcaaaacaggcaaaaacaaactgtattgtttaggttttcatacatatgtgatacaagctttactgaggaaatgactcaacaaaatccgagataatggttacttctataaggaaggcagattggaaatgggataaggaagaggcccacagtgttaatcatgttctcacgtttaagttgggttcaaaggtgttcattacgatcccttattcccagggttgccatacatccggtgtttccaggatagtccgggtttatacctgttgtctcatataatttcactgcaattcctttctttctcagaaagttctggtttggataataatgtatatgactactctatttgtttcttataaagtacaacatgcatctctcttgtatataacttttattatatcatatatgtaatgtataatgccagggccacagcctggccacgatctaaggggttttttgtggtttggccctggtatccttctgaaccagcctgggtatctgtcctcagggcctcagatgacccctgcagccatttggattccccagtgcctgagtccttataccccaccccacccagggtcccactccccaactcccatccacttgtgactctgtgtaggaccatcctccagtgtccctgaaacctcgcctgcaatcaagggtcactgacatccccttggtgctaggccctgtgctgggcaacactgggctcccaatccaggccctgccctagaagacctgtcaaggttcagatggagatggagatgtgataacccaggggaccagaggagagacacggctccgggctacatatggcactgcaagaaacgtgggccaacctggagaccctgggatggctgcctggagctgatcgagctcacgggaaaggtggggagagagctccaagcagacagaaagaatgcagagagccatgctgtgggaatgagcgggctgggctcggggaaggcaattcacatccttcactctaagtagagcagagggcacaggacaacggggcagtgcagcggcgggaagcagggcttggaaagggcacctcctgggggcccctgaat

SEQ ID NO: 32302 - DNA, 917 bp, Bovine  19866881280758
  misc_feature (1)..(1): n is a, c, g, or t
naaatgatatttctaaattatgtttttaatatatgtatatctgtatgtctagctttcctgccataaagaaatataacatgttttcagaaaataatagtaaaatttggtcttctgaaagagatgctgtgtgttgaaagaactctgcccctttgcaaggctggtaatccacatacacgtaattgttagtcttcagatatgaatcgtgagctgctgacagggtgattgtccgtttttaagaggatggatggaaacctggcaaagaaccatggtcttttcatctctaatactgcttgaattctggctgtagttacatcttactcccagatatgaggatttgttggtgtaatcattgtctcataccttaatgtctcccctgacccttaccaagaatatgaagctttttgattgtgctaaatcagtatcattcatcttatttatctgtgtggtgttttgaaagttttgctttttcaggtcattacctatgtctgataagtgctgttaccaatatttttagcaaccatttagtgtaccaagcgttgtgctaagtacatacaatgtatcatttagaatcactttgtgagtttcttacttatataaattaaggattttttgtttttgtttttggctgcaagtaacacaaaatctattacacaacaagataaaccatcaagacacggatttttaacaagaaatctggagacaagtggaccaaggttggttcagcattatcggtgttgtccccagggactcaggctcttccagctggtccttctcctctgccgtctgttgcgtgtcttgatgtttccccttgtgttcaagagatggttgccacaacatcaaacatcacgtctcagccacagcatcaggatcaggaagcaaggcaggcaaaagcagatgggctctcttcacatgtctct

SEQ ID NO: 32303 - DNA, 3099 bp, Bovine  19866881325899
  misc_feature (1)..(1): n is a, c, g, or t
naaatagaatgtgtaacttccaagacatgagaggaaaaacaagattaaggagaactcgggctgttaaataaaatataagaaaggaagaaaaaaggcgaagagaaagtatgtccagtatatcaggaatgatgataaatgcaaatggattaaccatgcctattaaaaaatagaaattttcagattggatggggaaggaggagcaaaataaagcagccataagttactaaagcatgacccagaaaagttgaaagtgaaggatagaagacatacgaatatataataggcaggagttcactaaagcagtgtttataataggaaaaatatgagggggagaaaatgctaaatatgcattaggggaatagattttaatacgctgagacattgtatataaaaataatggaataatattcaatactatcaaaatggatcaactgggtttatacacatcagtatgggtgagtcaaactatattgagtgagaagtgcaagttgcataatatatttatatctacttcctactgaaaatatcccttgctgctgctaagtcgcttcagttgtgtccaactctgtgcgaccccatagacagcagcccaccaggctccaccatccatgggattctccaggcaagaacactggagtgggttgccatttctttctgcaatgaatgaaagtgaaaaatgaaagtgaagtcgctcagtcatgtctgactctttagcgaccccatggactcctaccaggctcctctgtccatggcattctccaggcaagagtactggagtgggtcttcagtattttgccttctccgaaaatatcccttacctagcttcattcatttgtctttcatgccatttaacaccaatgttattttatattgtaacaggccatagaaaagtcctgtgtctcaattttggttagggttcctaaggactgaaaacaaagtgtgtgtgtgtgcatgccaagtcgcttcagtcgtgtctgactctgcgaccccatggaatgtagtctgccgagctcctatgtccacgggattctccaggcaagaatactggagtggattgccataccctcctccaggggatcttccccacccagggattgaacccatgtctcttaggtctcctgcactagcagatgggttctttactactagcgtcacctgggaagccttgagaacaaagcattaggtataaagtggtgttcccaaaagttattctaaaccatctgtgcagaacttgtgaaggcaggatgtgaagaccggttttggaatcctgaacctatcacctatcttaggtaataaggaaagttgaaggtaaagaaaggaatgaaaattcctttggataaaatgggatggctgtggtattttcttttggagaacttgacctcagttcctggcgttggtagacaagagaccagacctgtgcctgggaaagtctaaaaccagaaggtttttactgatgccactgaaagggaagtggttgcatttggaaggctgttatgctcagagtttttcagggcaaagatgcgggcatagcagagataatactggttaacctggagttgaattaaaggggcttggttcacaaggatccttggaagggtaatgggaccccttcagagaatgtatgaagctggttgccagaagctggagacttaggggtagacctgtatgtggctggctggaagagaccttgccagtgctgtgggaataccacaggtgagagctcaaccctgggagctgccatgggaccacagaaacagctcacgagagagagtcagcttttgactatctgccaagtctagagagtactgaaacctggtgagcacagcatcgcaaccaaaagtaaggcttttcctgtctgttactgtacctccttttcccagtttcaaacctggaaggatcagagactaaagcaaacaagcagctggggaaggaggagaagcaaagatggggaaatagagaagtccccagacaaccccttctcccagcacaggcagctaggctagaccctgcccagggcggtaaatgaagactttttggggtttctttttattaaactatcacaggcatgtagcaaagtagacaaatcatgagtgtacatcttaaagattttcacaacacatttgtgtcaccagtatccagatcaagaaacaggacatgaaccagaagcccctgtgccccttcccagaccctaaccggcccaccaccccaaggtataatgatacaaaacaagaaacaaaacttttttgttattataaaagcaactttattttttgtctcccagtttattttaaaaaattattagtgaaaataattttaagtgcaacatagtacaaagacattcctcatccctttcacctggattgcttgttaatattttacagttaatggaaagattcatgtcaactttaagatggtagttttttctagatatggaaggaagggattaaagggtaaagggtgtaaggagacttgaactatacagtgttttattgttttatgtgaaatggcaaaatgtaactctttcattataagtggtcgagttactctaactttttgtgtttgaagttttaaaaattcttcatacaagagaaggtttgagttttaccatctgggaagtaggaagctgttgaagtgtgctttttattgttgaaataactatgtctttatgaattctctgctctctgtcctcccctatggattgagacacttaagtgagctatagggttggttcacctcagcatcgtttttcttttcttctcttcctttttgcctctcagtgctaagtgccccgtggtgtccgacatggtaagattaaaacttgcacttttcctaatagatgtaactctcttcctgatttgcagtaagcaggggctgcttttaagcaattacccatcatttggggccatcaatatactgtgctttggttcaggtcataatcaataattcatatgtcagtaggagccccattagctcaggtgaaggcagatgtctttctaatgaaaatgttccattttccaaatgacttttctttttcccagagagttgtggttatagaagacataaaaagatggaaaactatgttggagcttcctgatcaaa

SEQ ID NO: 32304 - DNA, 822 bp, Bovine  19866881365532
  misc_feature (1)..(1): n is a, c, g, or t
ntaggcactcaacaaacactgtctttcaccatctcagaagctgtcaactcaattcagccaactctccccagaaaggccttccactttctgccctctcacacagaaacctcctgagaccccaccgccacctccctccctcccgcctccctcccaggtcctgcctgtccccagcagctcctacctttcatggcttgggctctgaggtctgggcccagcagcgccactgccagcagcagacagaataccagctccaccagcatctcctcatcaggtccccacaggtctgcagagctcagggcaggccaggacttgagggtctgaagtgggggaaagagaggtgaggctgcaagggcctccaagttaatggtggtgtgaataattcatcaggccctcgaattagtaagctgatcccctgcgcttccttcactccaccctaaggtgacggatctagtgtcaccgggttgacacttctgagctctgcactggccacactgggtggggagagggctgggagagaatctggcggtggagaaagagcaggggtttgggggctaggcagatctggaatcgtcctgggttggcctccaccttgccaggtgaccttgaacaaagtcatccaacccctctaggtctcgatctgactcctctatctggtggggccactcagccctgcctatagggttactgtggaaatgaaatgtggtaacacatgctaaaaaacacagtcggcgcttgctacaggtttccccatcgcctatccatgtgggaggggacaaggacccctgagacatgcatagatgagctcagagggagagcgaaggg

SEQ ID NO: 32305 - DNA, 1371 bp, Bovine  19866881738705
  misc_feature (1)..(1): n is a, c, g, or t
ntgtcttagctcttgtacctcattttaccttaccctcataaaggaacctggcttggtattcgtacttcacaggggctaagagagatgaagttgctggactaagaccacacagtttttaaagggtggtgccaggatcaaaccttgataggcccaagcccagcacccactacctccactccttgatggctcactctttcttagccaggactccctagaacagaaagctggagcctgcgccgggggaggcagcctgtcaacaggaggtggctggtgctggccgaagagtggtgtttgttcttttctggtttattggttcttcttttcagaaagaagcaggtgctgtagcaacctcccaaacagcattccataagctagtccaggaagccgcagagcccagggtgatcagccaggcccctcccttggttcacatcaacagaacaggggatttaatgtcacagcctgcagagagaactcaggcagccagcgtcaatatttgccatgtcccagcctccctggccccagctccaagatcagtacattaagtacaacaggttcttctctgtgcaaatacacagggatagataaatggaatttaaaatggctcaggcttcgccacagggtctggactggaaatctggcctggtttaaccttctgccatcactgtttgcctggggctctccattcatccttaaattcaccaaaccacatacatcagagctggtaagaagctcagagtccagccagatttctggtaggaagacactgcttcctggagaagtagagagggaggggaccagcccaaactggaactgcctggtagccatctctgggattctgagggccacccagcaattccaggccaggcagaagcgatttctcttcgaaaaagagcgatttctcttctaaaaaaaaaagcagtttctcttttttaaaaaagttatttaaaaaacacacatttatagttatatttacatttagtgaaatacacagatcttgagtgtatagttcagtgaggttttttttttaattgggcttcgttgggtcagttgtggcatggaggatctttcatcatggctcatggactctctgattgcagcacgagtctcagtagttgtggtgtacaggtttagttgcttcgtggcttgtgggaacttagttccctgaccagggaacaaacctgtgtcccctgcattgcaaggtggattcttaacaactggaccatcgggggagtccctcagtgagttcttttaaaaaaaaaaaaaacaggtttattgaagtatgattgacaaacagtaagctatacatatttaaaatgtactctttcataagttttggcacacatatatacccatgaaactatcacataattt

SEQ ID NO: 32306 - DNA, 1728 bp, Bovine  19866881807454
  misc_feature (1)..(1): n is a, c, g, or t
nctagagcaggcctgggcaggcttcgtgttacccccaggtgcccctctcatccacaatgccgcctcagagactctgtttctcatctgcagcatgggctcactggggactggatgaaatgatgttggaaagtgaccagcccgagaaggtgctcaagagatgttactggtcctgactgctctccccgggacaagccctgggctagtacctgggagaacaggcttccaaatgggatctgttgctgacctttctggatgaccttaggccagtctttttcctgcccagacctgagtcctcccatggtggaaacgatgcagctgtaggacctctgaccctctgtcccagggcagccattgttaaccagtcccagccctctttcctgctaagcctcagaagccttctcaacacagagctccagccccaggcagctggcgtttgagacacaaaccttcatccctagattgggtcaactctagggcctcttccctactagggtccctctattttagcaactctgaccctatgagctgcagccatggcagaagggacccctagttggaggcaggtgggtatggtccctcctccatggacccatcctcctggggtgtcctcatcctgtggatctgtctgagcacagaccctgtgtagggctacctagagaaagggaaaataccttcttttcccaaggctatttggtaagtgctttgatggagttttaaatatgctacaactttaaggctgagggggaagaattttaaaaaactagaaaataaaaaatgtttaaaatagttggggtaattcaagaaatcccagaggacgggaaaagctttctgctctgatactgtggtttcttcgggggtggggaaaggggcagagcacaggaattgtcagctggaatccacaggctacactgccctttgctgggctgggttcccaagaagccaggaattcctgccggggcctgagacctgccccgtggctgctggcaggggcaggcacgctgcctcagctgcactggaggctctgagcatctagatagatgggtggcagggtcccaggggtctagggggggccctatcttatgatgagctggaagcaattacagccaagctgcccatcctctcagagcttcggttttctcttctgaagtaaggagtcgtggtggggagtacatgggactttaagttggggcccaggcatgaaccctgaggtgggtcctgaagaaagtgcaggacctgtcatagtgaaggtgcagggagtggaggctggcaaggtgtgtacagtggttcccaggcaagagggagcctggtgtgttcagggaaccgcatccaatgtgccaaggttggggcaggaggccattaggaatgcctaggccccaggaggcctgggcggagcctgggcttcatcccacaggcaatggtgagtcaaagaggagtgggtatgaaggaacgtacacctggggagataagctgcctgggcaatgaagttcaagggagtgggcacctccagcaggttgtgcccacatggcccctgttgctcatggagcacggctgtctgcctgcagggctgggtgcagaaagggcccccccggccctgcctccccgcttgcctacctgggagcagttcctggcctagggcgcggccacccttcccgtcgctggcagccagctgtgttggacgtgtggagctgctgcagggccagacactcggtcaggatgtcagcctcagcg

SEQ ID NO: 32307 - DNA, 1553 bp, Bovine  19866880472492
  misc_feature (1)..(1): n is a, c, g, or t
ntattcattcattcacccagccaacaccattaagcatctactgtgtgccagatatggagtttagaaatgggggtgtaagtcaaattagtcatgatccctgcactcagggccccagattcaaggcatacggatgggtgaggcagatccacaaatcagagtacagtgtattttcttaaatgcaacagacctcagttcatagttaagccttgttaaccacaagtgtgtgatcttgggcgagttacataaattctcagtctcattttctgtaggtgtaaaatatgtattttaaggggacgtacctcttggggcagttgagaggatgaaatgaaatctatgcatctgtgtgtacctctgtatctagcactgtgtaccacagatgttaactgtctgtgtccatcttctgtgtgcaccatcgggttgatactgcctcctcttaaagtactgggtagctcagacaaccagtgtttggggcccatcttcccttctcttcccctgaccaccccatttgtgggactgtccaacctggagttgtggttcagctcctgagagatgtcatctaccatgtcgttctcagaagcctcgtgggccatggctttgcagagcttacaggccaccagggccttggccatggcctcctcgccatgctgccagaagaacagggccatcttctgccgcttcatcaggacggcccacaccatcagttcatgaaaagggaaagggaagtggttgatctcagggtcatccaagtcaatgtccacctcttcttcacgcttcttggttgtctttcttcctcgcctcaagggaacatcatcctgtaattttagggaaaaagcatagagatgaagttagaaatgaatccaatcaattcagtaaatagttcctgtgtatctgctactagcccagccctgggatagatacagaaagaaatgaactatcctagcttctattctaaaagaactcacaagttcatgcatgcctaactttaaaacaagctataataaatgcagaagcacagtcctatgagaacatgtcagtgttaagactttaattttaaacaagtctttctcaatggactttttaaaaaacaaaacaaaactttcatctattcgtttcctctacaggtagggtcatttgtacctcgtgatggacagcattaccctttctgctgaaagcacaaggacatcctatacttgcaactggatatagggtaataaccacatgaacagaagatgggagacagatactctgtctcgagtttctgcatacttcattagatgcatttgtgaagaatttctggcctttgggtctgttgccatttgtaagcacccatgagtagatttcacttactggaacctatatgctttcttggttttcaagttagtatttcaaatatgatttatttttgtttgcaatgctaatataacctcatgatagaattttcaaagctactgtgactacccccttgtcaccgggaaaaatgtcacttccttattttagaatcatgtactaagtcctaccactggaatgaacatatatatatttaaaacatgtaa

SEQ ID NO: 32308 - DNA, 368 bp, Bovine  19866880478276
  misc_feature (1)..(1): n is a, c, g, or t
naaccagatccaaaacatttttaaatatttggggcagccagtgattctctcctgagtagaccacaggatccagctttacaaaatcacagtccttgaagcaaaggaatggagtctgtggcatgccctttttaatattctgaacaagggctttataaataaaatgccactgtgaattgagtggttgcagtgcggctccaggaaagccagttgctgacaagtactgcaaagtcaaggatgccacctgaggaacatagcgttcagcagccagaggaactgtgtacggcgtatgcggttctatcatacagcgagaacttgaatatacaggacggggactaaaagacgagattcttttcagtgaatttaagatt

SEQ ID NO: 32309 - DNA, 2053 bp, Bovine  19866880506131
  misc_feature (1)..(1): n is a, c, g, or t
naaaatctgtttaagaaagcatgttattcattttagcatcccgcagcatttcgtattatccagcagtaacacacacacacacacacacacacacacacgggctctgtatcactatgagaagccccctgcaccacgccccaggaggcccagcactgtgtttcactaccaagcacatgagagatccagaacctcattgtttcccgggaccaagtttctgacacctgatttgtgcttcctaaatcttctcccatctcttccctcaatcccaaaatggtttatgtacaagcttctgagtacaaccttccttgaagaaagtgtaccaacatgacgggctaagagaggccataaagggcaagtaaaaatgatcctcaagtaaggaggcaaggacagcctgtgcttcagtgcccagggacttgagagcagctaagggaaaggggagagtggtgaccctgcctcagggtgcctggcaggcctgggaaggctcagatggcaggcctggcagccttcagggcacatgacaccctgtcctcagagctgagagccagttttggcattgtttgtagtgtggtgctggaatgcccatgacccacttcatggaacccttctgtgactctgggccaagatcccacagacagggtgggtgggggagaggtgctggttctatcagggtggtgtcagcagattgctctggtttggtggcccttttgttttgggctgacctcagagtcacctagatcaggttgttctaggtaaatataagcctggctggtttcagttgcaacagctacaaactaaacaaataaagcattttaaacattctttcaatctcctcctttccccattttgtcttttaaaaaactctttcagtttaatgttttccttgtaaaacacagaagaaaacataaaaaaatcgaaagccattgattatcctatttcttatattttcaacccagggataagcactacaaaaagcttactgtgtatcctttttgtttttttaaaatatgaagttatatggatagaactatacctgtacatgcactttaaaaaacaacaaaatatggtctcaggctacatattggtctgcaacttgtttttcttcactgaagaatagatcaggattatctggcagcatctttacatataaatctatctcatttttatttcattaaaaaaatgtcttaagtttagctgataggagccagtgtctctttatgacatggtgccaagggagggccaaggtgttcaggcttgcatggaggtaaaaggttgtccaggtaagtgtctcctggtgtagcatggcttgtgacagagtaaatggtaccttctatggtaccggtgtgtgattgtcacctgtgggtattctgagaaatattactgtctatgcatactatctctagaggctctttttttttgtttttttcctcttggtctggccacacggcaggtgggatcttagttttccaacaagggatcaaaccggtgccccctgcagtggaagcatggagtcctaaccactggactggcaggaagtcctacctagatgttctgatttagcagaatttggggttggccctcatttccatactttacaaaagcccaattatacagaagattctgatgcataggtggggcttagaagtcccctcctgagttaagaggacacctactaccactgcagatttggcttggaaaactcccaccaacccctgggcctcatagctgacagagccttctgggagcactgaccttgaggcctgagttcttgcgcatccggagccgacccatccacatgtctgtgagcaacatctggctgcacgtgtgcgcgatgaagtcacggtgcttggcagctaccgcaagctgcaggcacgtggcattgctccagttcttcagttcatacgtcagcagtttcatggccagctgctcatcctgcttgtaggactggtccaggagctccacggccagctggccaaagtccctgaaagagagagcataagggagctgtcttttggcgatcttggagacttagatgatgaaagtggcaacccgatgg

SEQ ID NO: 32310 - DNA, 2813 bp, Bovine  19866880514307
  misc_feature (1)..(1): n is a, c, g, or t
ntttataaactatatattaacatgtctctctgtgtaaatgcatataagcagcatatactacagaactctttatatgtttatttgctttctattttagtctaccgcatcttttttatagctctgtgtataagaaaaatattcatggtatgcctgctactgatggcttgggttgataccaaactcccagtcaattctaaggttatttatggttttgaaacttccctaaaaagtgctttggaacatttccataaaaaagataccagcccttgaaaaattccaattaaatttatgctgagctcagattaaatggcaaaactctaggtatgaaaatatccacatgtaaccagatattcatatacaaaatggtcatgtgataggtggtgtggaaaattggcagttacatcctggagatgttcagaagacatggtggattcatacacataatgagggtcacacaagcagcatcacacataacatagatggtgggaatatagcagtatctcatatggcagttttaggtgagttctgcctactattttttttttagttcactattatattcagtgagtggcttcattgatgataggtgagatacaaaataaattaaaaaatataaaattatttaattacattcatcctgagcttacttgactatacttgaatgcccactgtatataataaaccacttgacaattgtttttaacatcaactcttctttcattttgattgcaatacaaaaaggcatttcttttccctttattttcttcaaaagagataaaagttgcggcaccagaaatgaatatataagagacaggtgaactatgactgttaccttgttttttctttataatgatcaattacagaagtgttggcatgagaaggatgtgggacgttaggtagaactgcttgctgccggcttatactgaataaaaaggatgctcttcatcagtcaccagtgatggagccaatgtgaaaagaaaacagaattgaagtttagaatatctcatttatatgctggctactttattttattttgcaatttagccctgcatcctaaaactcttgataatggtcagaaatggaaagatgccgcctggcatggagcatgcttgatgccccaatcattcccagagctcatggctttctgaaatgactagttatacacattcatctcaacccttcttctcctctttcccctccctacccatcaagtgtgaacatgacttaaatcccctgcattttgcactgggccagatcaaatgttttcttgatctgtgacccagaagtcaccttttagttaacaactcccaaggaatgacttgttttgctcagctaagaataaagcaggtgagtttcaagaaacaggaataggtgaatttcagggagaatttgagggctggattcttgagcctcctgcaaagcttattagaaggtttagttgtgcttgctttcaaagctgtgaaaagcagacattctggagagtctcctcatggacagactgtcccctcggccctctggcttagaggacttactcctctggaagggatttctcaggcttgctgtgttccgctgcctgtcgagtttgtcactgatggagaagctcttcctggtgtgggcatatggtgtgcttggctcctctgctgagtagctgttggcacgctctatcttgggaactgtgatgttgttcgacagggttctgtctgaattatcaccctcctgggggggcattgtgatggtggctctccggcccttggcctcattctcctcaccatcagagctggggtgactcagttctgcctctcgctcgggatggcagcacaacgattcctccactttccctccaagacctcccaggaatgtggttctgtcagcaatcacttgaggagcattgacacatctcgtgtcaatacagtctgtaatacttgtatattctgctgttttcacgggcaccccaaagttggcataacagctcctcgaaggagaaaacataaagctatgtgatttcacgatggaggcttcttctagaagaaagggggtggtggctaggtagcggctacttttggaacgctcaatggtgtggtacattggagggtcagtgtcccatggattttggcattctgggatgtgggtatagtctgaagaaaaagatctagtgtccatggaagtgatgtcctcaaaatcagtgctccggcttggcagtctgtctgtgggtgcaagagttgcataggcactacttgaaggagctgcggaaggtactggagccgaaaagcttggttctcccagcccaaggatgttcatggaattgtccagtgggtctatatcacagtggagctcatccatggcagagacatagatgtctatacatgaggatggtcttctggagtcgggaacaatggccaaggtgtttgcaggggctgcaggagctttggattcttttgctacagagtgggaactagtagctcggtgtaggctcagggacctttctttaaaaagactctccaacttttctatcccacctttgtctttcatattgactgaatagaaagaatggcttcgcatacggggcattaaggttggagaagttggggacaaggtctcctcacctgcagggtctatactctcttggagcttgaaggtgttcccctcctggctgttgaagctgctctggcggacaatgtaggctgcatctgtgcagtccgaggaggtccgcgagcggattttgttggactcagcccgctctagacctgtcaggcgctccagggctgtggccatgcgcccgatgaggtcttcgagctgcgccagccggatgtcca

SEQ ID NO: 32311 - DNA, 1765 bp, Bovine  19866880541050
  misc_feature (1)..(1): n is a, c, g, or t
naaaagttatttattaatggacatattagccatgtagttcccataaaattgtgccatatggacactttgtccattactcaggcatatttgcaaagcatgtgtccaggatcctttgcaatggctttttgtattcagaaaaccgcagacctgggagaaaagaaagatagggggaggagtattaagatgcagagaagtccttgtctctctggggaactagcatgagaggtgcagacaccagggcgtgcaaactgtggcctgtcataaagcccctttgaatgggaacatggaggagctagagcacctccacctgaggctctcaccccacatttacagatgcttccaggagacttcttccccgaggccctcttcctctctggggagttaccgagccccacccttcaggaaggtgaccaagatgaacaattcccagaaatcaggacagagtgcagggcagccctccctgtgacctaggccttagctgaccttctggagtaacagggcccagagggccagggtgagttcacagctaagcccaggtgccagagaagtgaatctaagcccaggcctcattctgcttctgtagcttctgtctgtgtttatttgaagttctgcttttggtggtgatggtagtagttttgcatctgcaaatgtaccaaaaacaatgtctttaaacactagaattatactcagtacaatagaaacaccatgaggtgcatcagggaacggagatcaaccaagggagggaggggatccatattacccatttcacacattctccaggacatgtcctttctaagtggagtggcaggtgaaatcacctgtcctgttttacatgagctagctggctagctaggtaaatagatagatgggtagagagatgatagataagtatgtataaactcacatttgaatacatatgttaaatttatataagttaacttcatatattatatattttatacttttctcctcatattagataacctcaatacagagatttgaaatcagaaaacttaagagctggttctttgctctgtttctccccttgctactacctttaaaatacagttaatttattcaagttctatttgcatgaatctctttagaagtaaaagtgtacttctataattgtctatttaaatggataattattaaattatgtttttgtcaccaaatagtatgtataggaaggacccaatacaatattcaggagatcattaacaccttggaggaactgattctgagaaactcttgtctttgccatttttatatagcaatgaccatgatgtatctaaagcaatacaattccaaaatatagtgagctaattgattgtaaccaatgccgttacttatttgggacaatatctagctagtgataattatattaaaatagccaaaattttaagctgttaagcaacattggtaactaccttcttttctgaggattttttaccctggcttacaataaccaatccttggagtttgtgccatcaaattctgtgctcatcatcctttaactagtgggttctgtttcaatacatgtatactggggcttttactgtgtaccaggcaataaggcagagctctgtcctcaaaaagcacagtctcactgagttctagtgtacacccaaggcaggaacagccagaaacatctaactcacagttgtcaaaccttagaaggccgtaaaatcatctggaaagcttgttacaagacaggtttctgggcatccacctacatccttgggttcttttatatatatatata

SEQ ID NO: 32312 - DNA, 810 bp, Bovine  19866880677657
  misc_feature (1)..(1): n is a, c, g, or t
ntgaattcttgtacttctagaggtagaattccatgggttctgttgctaaatgatttaaccaaagccacaattttagtcagttgtgaaattggactagaaagtataagatgcttagtgtctttagctctcctaaccactgaggcccacaatccactaagttgcacatcatttctcagtttttacaaagtgacaaactacataccagtgacagacagatccttcaaaagttaatgacctcagggaactgggatttcattacaaatggttagcaatagaaaacagattttgggttgttgtcagaattaaacacctgcagatgagtggttggatctatcaagtggctaatcagaagagtctcttctgttgttaatcatgtgtaacatttatgtacactttatattgcaaaaatctctagactcacccacacaggttacctgtcaagtagacatttgcccgggtatatctcatgtcttgactcttccagaaaatcaattggttatgagtggtatatctcatttatctctgtagctttagcattcatcacaatgtctggcactaaatagataccactaaaacgaagatcatggcatctggtcccatcacttcatgggaaatagatggggaaacagtgtcagactttatttttctgggctccaaaatcactgcagatggtgactgcagccatgaaattaaaagacacttaatccttggaagaaaagttatgaccaacctagatagcatattcaaaagcagagacattactttgccaacaaaggttcatctagtcaaggctatggtttttccagtggt

SEQ ID NO: 32313 - DNA, 2148 bp, Bovine  19866880835250
  misc_feature (1)..(1): n is a, c, g, or t
ngtaaaaaaaaatcagaattcaaaaatcaattggaaatatgttgatcaatagaagaaaaatatggatcaattgtgccaccacctggagccattaaaaatgattaaatgtttgtatattgtcactggcttcccccatggcacaatggtaaagaatttgcctgccactgcaggagatgaggaccctcagcttcaatccctgggtcagaaagatcctctggaggagggcatggaaacccactccagtattcttgtctggaaaattccatggacagagaagcctggcaggctacagtccatggggtcacaaagagtcagagcatgcactcgcattttgacattaaaaaatgtcactggtatattgtctttttaaaaggaaatacaaagcatcatatagggtgtaatcccaatgtttataaaaactaaaccaagtatacagatatagatatatatatacagtatatatactatatatactgtatacagatatacagatacagtatataaatagtaaaaagactagaagaatacagaaaaagggagagaaaggaataagttttgcaacagaatttttttcagaaattcaaatactgttgaagagtaacctaaagtggcctaagtaaagttggttcaagtaccagtagacatcaaccaagagggttttctttgacttctttctgtcctgggtgctgcaataatcacaaactctgtaatagcaagtcctctccactaaaaaatgataaaggtggaagaaaagaaaaatgttagcaatgatttaactattagtgtcatgaaactgtaattttaggcacaaatacaatcagtgcctttctagcaggtactttgttcctctggaagaactgaaaattttattaaaaaggcaagactgtcatgacttaaaagataattacatactccagttatttaattagagctgctgagaaaaatggaatgagcagcccaagtttagctcatcaacactagaagtgttcatgtagcagcagcatggccaccaggaaggcagtgtgtggatggttttacattcaggcaggaaacagggctgtgttatgtactctgagaatctgcatagaacagcacagagatgctcttaaaagtaagaggtcagaaagagtattgtagctaggcagggcttcaaggaatgttcaggactgaaaagacaggaggtgaggggaaggctgaggtccaaggcaaaacaaacatgtagccatgagaacacataagacactgggagaactctgggaagccaacctaaaagggtagagggtccacgctggagacttgtgcgaaagaagaactatccctaatactcacttaatcttctcaacacatctgtgaaattgacattcttcttcttccccagacaggaaaagatgactcagcattttatacataaatgccaggtttgagtttgaattccattctgtattaaaaagaaagcgactgaagaattctggggaaaactgtgatgtgtaaaaacatggtatggtcaagaagggagaggagcagtcaggggaactgcaggattaggcaaaaggagattaaacccccttgatgaaaagacattctgaagaaatttcacaactccctaattccagaaatatttcatgggtactgtttgagaaacactcaaccaagtgttggcgcattctgtttgaaatgtcatcctcttacttcattccctggtgaacaactagtcatcctttctagaggattattttctagtgtgtgcccagctgagaaccctttgagatacctccttgctggcagttgttttgtacaatgtggacaagctgtacccttcctctcaggcacaattttggctacatctttgagaatttggaatagaggcaggggtagggacaatcgctgcctataaccataatttgcagactcagaaattgtctacagtcatcttcctacatgggcttccctgtagctcagctggtaaagaatccacctgcaatgcaggagaacctggttcgattcctgggttaggatgatcttctagagagaagagataggccacccactccagtattcttgggcttccctggtggctcagctggcaaagaatctgcctgcaatgtgggagacctggggtttgatccctgggttggggaagatcccctg

SEQ ID NO: 32314 - DNA, 1067 bp, Bovine  19866881050870
  misc_feature (1)..(1): n is a, c, g, or t
nactttgccctctccctgtaactcccagggtgctggggtaagttaaagtgttgatgaccatacctcacaggggaggcatagagtgagaaggtgggaaagttggttagtagaggaagccagtagccaaaagattggaagctaaatgtgatcttaagcaagtctcatgtggatccaatggccagtttcctatatgaaacatggaaagttaaaaaaaataaaagtcacctccctgaagttatcacagtgctaagaaaatgcctaagtggtttttatattaaaggctacaaaaatcagctgggggtatattttaacttgttgaatcaactgctagctaaattatgggtctatctatttctgaccacaggtgatcagcttgattatggatttttaacatataacggtcataataaattacctaggggatatagcatctgccatttgccatcattctgtcctttactatagggtgagttgccaggcacatgatgggcaaacattggttgaattcagctgaattaaggaatttcatctatttacactgagtcaatagacactgctgttttcaagtaaaaaattaccctaacatcagcacttatgtatgttcaatctaacataataaagagaagtactgaaaacaaatgtccataagagacatgaagagaaaagaaagtgaaagaaaagtgaaagtgttagtctctcagtcatgtcctactctgcaaccccatggactgtagcctgccaggcttctctctctgtccatggaattctccaggcaagaatagtggagtgggcagccattcccttctcaaggagatcttcctgacccagggatcaaccctaggtctccctcattgtaggcagattctttactatctgtgccaccagggaagtccatgagaaacaaattagttttcaagtgacacctcaagttatcatcattggtgaatgaataacttcttttgttcaatttggtgtcacgttgtattttttcactctatcttgtcagtatagttagaaaaatgggcagttccataaaaatgagatgttttgtaaggtacacaaagcag

SEQ ID NO: 32315 - DNA, 1338 bp, Bovine  19866881087173
  misc_feature (1)..(1): n is a, c, g, or t
naataaaatttaaaattcaatttcttagtcactctagccacaattcaatggctcagtgcctatctgattggacagcagagataataggacatttccatcatcacagaaagttctattggacagcgtactcttgaggcagacagaagtgccgagtcctcagcctgaggcacggacctaacaggacactaaggtggaaaatcctgaacagtgttggctgcatctctacaacgtttcttcttccccttgcctttggttatgaatgtgcccaagagttgaaactgaattgttgccaaaggatacagagactgccacatggtcaggtagcttctctgttgccaaaattgtaaggaaaaaacactctgatttcattccaagtgaaatcccatcagtgaatactgcacatagccaagcaagaggaacagtcaaacttttattgctttaggccctgtataaaagacagaatcagagctggcttgagatgtataggctccttgggcaggcaaaaatgttggcacctctcaactgacctgctttaaatgctggtccaatgtttaattcaaaggagaagttaaccagcatgcaaagcaagaaggagaatatggaagctgggtgcagacccctctgttgtctggagtaacgcagatctgaggcaagtaaacctcttgcagtttctggatctcattttcactatgggacaagacatgcagctcctaagagctgacattccagccacatctgcctggacagaccactcaagctgtttgatgctgaactttcctcacctctcctcaatttcctcattcataaaattgagataatcatcatagctaactcaaaatgtttatgtatctagatcaggctcttgtatgtagatctttacaaaaatagcaacttaaatccctcaagtatgcacttgtggggagggtcagggatgtggaggaaaagaagtgtagtagctcagtcatgtctgactctttgcaactctatggactgtagcccaccaggtttctctatccatggggattccccaggcaagaatattggagtgggttgctatgcccttctccaggggatctccccaaaccagggatcaaacccaggtctcccacattgcaggcagattctttaccatctgagcctccagggaagcctggaggaaaaggaataggaaataccaattctcttctaaagtaattgtaaaaatattccttctaaccccacatcctacgctatgagatgttgggacaaatgtaattttatctatttttgtatgtattctgtgatgaattagttcctagctttaaaaaaaaagtattcttttttctagcaaatagccat

SEQ ID NO: 32316 - DNA, 908 bp, Bovine  19866881106873
  misc_feature (1)..(1): n is a, c, g, or t
natggccacttgtagacggacgggacagaatcccactcgtaaagcacacctaacacctccctctttctcccatcccaaaatgtcatattgtcaacagacctatgggggcttaatctcataggggaagaaaggagagataggaaaagcaaaataatgtaagtggaaaagcaaattgttggggaaaaatagcacatttaattgctgagaagaatgatcacaggtgggctttcgagtgttatgttgccttcagggaccatttgaaagaatcaattcaaaagagttttccccagtccctggaaagctgtcttggtgaaggctgcacattgtcaaagatattccaactgggagatggagttagaatttttgctcagtgagttggctaagtcttatgaaatgggtatttgttccaattaggtgttccaaaaaaaccttcttgcctcagataactcattttgagaagaaaagagtatttgttcaaaactcatcatggaagggaaaatgacagactagtgtgttctgtggctactgtacacatactcttcacaggcctgtaggactcacacttttaggtcatttgtccttatttccctagtcttagtcctacctaaaactggcaggggtgggtgttgggggatgccgactagtttttgctcctgttctttataagctatactatctagttatataactgtaatccgtgtccacagtccagagctcagatggctggcctgtcagcaaaaaatgttagaaaaatgttaattcaacaatggtggaaggatgttatttctagagctaaactcctcagggaaaatgagaaatggttgctcctgggattcaactcctccacaatgaaagatatttcttttctgaagtttcttcccaaataatttcccaatgcttggtgtgcc

SEQ ID NO: 32317 - DNA, 2623 bp, Bovine  19866881152601
  misc_feature (1)..(1): n is a, c, g, or t
naaaaaaaaaaagaaaagaaaaggattatgggacaatggatagcctcagggaaagaatagctaacatttattgagtgctatagttatagaaacacttataaacacttcatcatttagtcctaacaaaaaccctaccagataagtggtattattatactcactttagagataataagactgagacacagttaagcagtttgtccatggtcacagccggtaagtggcagggccagatttggagacaagcattctgactccaaagtttgaaggtttaatctctacagaatactgcattcctcagtggaaaaagagttctgatgagtatgtctgcctgaaggggctagtagtcgaggcagtacacagggattgtcttgaatacttgaatgtgttccaacagtgcttaaggatttaccatcactgttcaagatcttccaacacagtcaccagatttagcaaataaaaatatagaattcccagttagatgtgaatttaagaaaaacaacaaataatttttagtatgtctcaattattgcatgagacatactcaaaattatttgttgttattggtcaaaatgtacaaatttccaaatttatttataaagtaagtcatgataatgtaatgtacaacacagtgactatagttagtaatattatattgcatatttgaaagttgctaagggagtagatctttatggtccttagtacaagaaaaaaattgggaattatgtatggtgacagatactaaagaaacactgtaatgatcattttgccacatatgcaaataacaaatcatttacattgtatgcctgaaactaatatgttatatgtcagttatacctctatttaaaaaggaaaagatgagaaaacataaaaacaaaagttgtaaatcaaaaaattaagagatgtagttacatttaaaacttttaatttgatacataaaaaatacatgaatacaaaagagaactaccaaatagaccatcaatatgacaaagaaaaaaacagttcaacattaagaattaataaaatgaatgaaagttaaaacaaataaaaagaaattattcattgtctatctggaattcagatttaactgggcatcctctatttcatctggaattcctatcctgaaagacaagaggatagcaaaccacttacttcactcttaccttaagcaaacaaacatttttttttcgcacaatggcagagttgaatgttgggatgaagactgtatggcccacaaagtctaagatattaaccatctggctgtttacagaaaaagtctgccaagccctgccttagccagtttctcattcattatgtgtaataaacaagttgcaattggcagtgtgccaaagtataattctaaagcactaaattggcccttgtgtctccccctgctccacaactaacctcttgaataatgtttgacccagctgtcatcagagttgatggcctgttttgcaaagtttgaacctagaacctcaaatgctttttcttgaggagccacaatccaaaaacctgccccagtgttggtttagaaaagacaggtacaactgagcaactagaacaaggttcatctgatgaactgcccctccaccagaaaccctccctccagatccttctttccttgccaatgagagcccctgcctagcaaaaccatttgattcttctttattgttttcagagacatgggccctcaaacacattgtaccacttggtcagggatgtcaaaaaggtaagaaccctctggactgcaggtcggaggctctgtcttgactgcttcctgtgattagaaagtgcctgttttgcatgagctgccggagtattcctgtccctctcagaaccccctcatttctggacacggtgtgcgcgtttgtcttttaactctgagacatctctgcttctgatgcagctgcagttttattgccagtctctgtgattttagatgctttcactggacataatgctttgggatagtggaactctaggctttccccccatgctgtgtggatttatgccattacctgtattttcccatctgctcctcacgtttgcggagctcatttccatgccatccaaccgaccatgaaaggcgtatttatttactagctcctgatacagtgtatcactgccacttcttagcatgacacagtataagcatagctcaaaaagtctcagaaaaacagagactacaacacaaatatacattccattctgttaacactttattttctctaatatattttttcacattcatcatccagtttgatgggggtgggggaaagtcaattggtttgggtctagtaggtttattcccaatttagaaatgaggttgaaacacaaggaggtgagaactattttgagtggttagtaaggagctagaattagaactcagatcctttaataatcattattattattattaattggagaaggaaatggcaacccactccagtactcttgcctggaaaatcccatggatggagaagcctgataggctacagtccacggtgtcgcaaagagttgggcgaagtaaaatggtacctaaggtttagtgatgactaagtgtgtgacattaatctgagctttctatgtgtcttatcttatttcatcttcacaaaaatta

SEQ ID NO: 32318 - DNA, 2082 bp, Bovine  19866880678264
  misc_feature (1)..(1): n is a, c, g, or t
nccagtggctccatgcgcagctcctcctccagccccagccccagccccagccccagcccagctgctgacacctcgaagcctggcactccggccagggccggattagcagccttctaagcagaggaagagacagagggatggggcagacacccagaagccaagaagagaggccctcagaagaaactgatagctgacagcttgatcatgaactctcgcctccagaaatgtgagaagataagatcctgttgttcagggtacccagcctgtggtttgctgttacagcagccctaggagacagctatacttagtactctccatttctcctttcctaaattatatggtgtttaaatataaacacataaatactatttaagtgtcatcacttaaaagaaacctccttttggaaaactggttaaattgtttttatcagactacaaataattttctgattgtttggttttcctataatgacaaaaagtcatatgcacagcgcatggcatttatttttaaaatgattggcaagcaatgaaataacattctcttccatcaccccaccctaaaaataatctttggttgaagaaaatcttttttctctgttgacaaaggtttaacaggatgagatgcttaccgaatcgatctgatctaaagaaatcttgccagcattgccctgtgtactgtagtcttgaccagtgtaggaatgactaaaaaaaaaaaaaagaataaaatatcaaaatcgaatttataaaacatactttgatcacctcaaaggaaattttcaaaattctgacaaaaagtcacgagaaaacatttcatacgtaaaccttaggagaaacatagccaagtgttttaaaggtatttcatagaatatgtttaagtaactttccccataaataatacagaaatatagtgctcatctgtgtctcccgattcctaatctagagtactgtttccttaagagcaatatgcaaactgttgttaaagttcacactcctctactactgaccccttataacatcacagcacagtggtggtggtggtttagtcactaagtcatgtccaactcttgtgaccccatggactgtagcccaccaggctcctctgtccgtgggattctccaagcaagaatactggagtgggttaccacttccttctccaacagcacagcacaaagctagggataaacagagcttatgtctgaagtcattgctcagcaggccctagagtgagtcaccaagactctccacactctggatgcctgtctgtcaaatggagacggcactgcctgcctgcagtgttgacggcaggttggagttgaaatatttttcgttaaaggacctaacataccgtaatcactattcattaaaataagtaacatgtgaacagcacctacatgtgcagagtcctcatccatatccttacaacagccccaaacgagtgagtttactgtatatctgagaagaggggaacttctggggtcagagagcaaggcagcagtgcagcaggaattcaaacttttgactcccaacttcctgtttgttcactacactacactactctactactctcttccctgtgatacactgtcgtcttatatatttagaaatgaggaaatgcaacatggttcattctacctaaaggctccacctgtacactttatcacctccttgatacaactccacacccacagctccatcaacagggactcagatgcagacatccagaaaaccacagtcaaacaggggttcatgcagacctaacaactaaaggaagttctggactaaagtatcattacaatcacaggggattccagatgctctactctctacccctcggcactagagcttcttgctgctggttaacatatgacctcaagatgctctcaagtgctgccctcaagggcttccctggtggctcagatggtaaagcatctgcctgcaatgtgggagacctgggttcaatccctggtcaggaagataccctggagaatgaaatggcaacccactccagtactcttgcctggaaaatcccatggatgaaggagcctggtaggctatagtgccatggggtcacaaagagtcagaa

SEQ ID NO: 32319 - DNA, 1400 bp, Bovine  19866880955101
  misc_feature (1)..(1): n is a, c, g, or t
natggaggagcctggtaggctgcagtccacagggtcgctaagagtcagacatgactgattgacttcactttcacttttcactttcatgcattggagaaggaaatggcaacccactccagtgttcttgccaggagaatcccagggacaggggagcctggtgggctgccgtctatggggtcacacagagttggacatgactgaagtgactcagcagttagcaatgatgagagtgtgagcacatttgtaacctctgtgtgtgctctgagttgagatagggggtaacgactttgcctacagtgagggtttaattagtgaatgtatgtggagagtgtaaagcaatgtctggctcacagtgctgttcagagtgtggctgcagcatcagcagctcattaaaaatgtaggttcttaggccctatctctgatctccaacatcagaattgcatttcaacaaaattctgatggacattaaaggtttgagaagcattgctgtgtaaatggtgttggtatttctagctggcactaactagttgaagagatcagggtaagaggggcaaccccgctgattcacctgtccaggccaggttctgagctccaggaagtctttgttcttctccctgattgtcctggctgcttggtgaccagtggactgcattctgggagcctctgcctatatcatcctcagcctccaggtcaaccttgaatgtttcccttacatccatatgctgaagtttctgactccaccaacttatttaaccccaagtccctgtgagtgcctctgttggtcagctatactggaggtattaattagataccacaagctgaggactttctagctcagctggaaggttctaacccatgcgcctttctgatcaaaacaaaagtataaggaacatgatagaaggaataagaaacttggtattatttaacacttccctcctaggttccacatcacacagaaacatttatagtcagctccaagaagcaattttctaccagattttatagcagagaagagagctcagcctttaaggaatgcaaagatcaacaaagcaaaattcattctatttatggtattggtgtgacatttggacctcctagcagccaatattcttttcgctttaggaaagggttcattaccatacctgcttgctttatttcatattaaatggtatttagtaaagagagatggatgcagagaccttccattggtattcatgccaagcttatcacagttccatgatgcttggccaatagcacaatgagaaaggatgatacaaggatgccagagccctggtgtgatgaactgaagggaatataattgtaagtgaaatggatagaaatttcaggggcacacggctccgactcacagggcagaacaacccggcaagggcaggaattca

SEQ ID NO: 32320 - DNA, 1238 bp, Bovine  19866880993743
  misc_feature (1)..(1): n is a, c, g, or t
ntgtgtaagcagttctttgatttagtggcaatttaatctccttattataaaagtttcccaaatgtgatagtctcttaatgaagctactgcaaagatctctacccttgatctgctgtttatcaattactttacaatttcaaatacctttattttagcactttttcaggttatcttctggagtctggtaactgctcctatattttgcatctgttctcatctaactgaatatttaaaatctggttgtttttctttggccagactttcaattaggtttaatctctcctttgatgccaacttaaaaaatcttttactacccttacattaataaagtacattacttcaagcactataagatgtgggttgtgacaaacaagtatttattaaaaatttgtcttggtcttttaattaaaccccagagagctaacctgactaaacaggcagcaaaagaatctcttaatttctgggagtatctgatgtttaaattaaatccacattttgtttttttgtttttcttataattcactgaagtaaatgcacttttttacaatccatgctggctaaaacacacccatctctacttctgtacccatccactcacagctggcctcatatacaaagattcctggtcagtccaaagtcaaaatgcaagaatgccactcctaagaaataaggtattaaaaagaaaatactcagaacatagaatgaacatatcctgatggggcttcagtcaagccaaaaccttgtgggatacaagcacccccatgtgcacccacaggcatgcctgcagcacacagagacccaggcacacacaaggaggaccttccaacagagccaaaggtctaagtgcaccctcagacagactcaccaagctcctgcaccgctgggatgactggccactaacctgccaccgtcagcagagctctaggagctcctccacgacagccctggaccttcagcactaagctactcattccagcaacgcagagcctctgatggctgtgcatggacccagtttagtttgcttcttcatcacctcaaaaggatttgacagagaccaccttaggccctgcaccttcaccttaacccctacgggtgcagtgactgtggacctcttaccagacccaactctgtagccctcaggcttcccaactgtgccacaacctcaccttaccacgttcattttattccaaacttccaagggtcctaccctcaaccccactcagggaaacagggtttaa

SEQ ID NO: 32321 - DNA, 4027 bp, Bovine  19866880995792
  misc_feature (1)..(1): n is a, c, g, or t
ngagtcctgggaagattatttctctggatgcttttcctttgaactctcagaaaagccatgcttactagacagattcagttttctcctaggtgtaatcctctttaatttctccagcctgtcagtaaaatcaaatactcctgaacagctgtgtgtgggaattgttctgaataaagtgaggataaatgggcatgtgaattgcattagttctcaagagctataatgagggaacaacttcaatgtcaggggcttggggggtgtcaggcaggtccactttgctgctctcaatgttaggggcagcatttacggtaaccgtctggggagtaggcaggacaggaagggcttacagaaaactgcttcttctctctccagatggtggcagggagtggtggtggtggtgatttatggtttcatggagggagggtgataattggaagtaaactttgaggtaaagtgcttgtttatttgtccatcttttgcattgtcataattttattaccagtctcctagtaagattaaaaaataatggttagctagatttattgtaatcatttcactatacatatatatataaatagtatcaaacacctaaaattaatataattctatatgtcaattatatacctcaatacacttttttaaagattaaaagataggtggtttcttctgataatcatcatcacaaaaacttgcctgggtaaaatattattacttttctctatacatgtttgtacaaagaaatacattttaaagagatttctgataagggcatttgtgcacagaataaatgttcatacgtctttttacaaatacaattctggctaaaaaacaatatgcttagattagcatttatagtgcaattcaaagataacgacatgttcctaacatataccaggcctgctggaaaccgggagagtttgtaaataatttaacagtcttcagtagtataggctgtggaacatctggaatctcattcttctttttggattgcacactttcagatttgttttgccatctttcctgtttttcccctaaactacccaataaggaaaactgaaaatctgaaatgtgctcatcctcctgactgcttttttctccctctaactttcctggcaccagatgacagaaggaagtttattcccatcatcaggacatgctggtcctattgagaagccattctcaagactaacctcttactgatgccccctgccagaagagttacttagctccactgaaagccatgttgtgcttttcctggctacagctgctgcacataaatgaggtagggaaggtcttagagtcattttatggctattcttcatgttctagagttgagaaatctctgagtccttattaacatgctctctccactacccttagggtccaaattgccgatttaaagtatacatcacatcttggaaattcctgcctcattggaggagaataagtgctgttctgatgaggaaattccatttgcagcagctgcacaggccctgtcctcatctgtcacatccgagtctcctgtgggaagtgaagggttgcagctatccacagctttcccacatggccttcagggcaactgttctggtaaatgtgctggaaagtggtcctgttgggagctgtgcatgtccacagtcctgactgagagtcattttccttctttgtcctgtcctaaaacagcagaatttttgagatttacagggacagtgaacacagagattattgtatcttttctagagttgcctggtgatttgaatcctgtgcaatttagattatgagattttgcatactgtcacaggcattggtaaggaaaatatttttagagtgattccattataaagtgacatatttccagtttggagcccagctaagactaagaatgactaaccaaaaacacagagaatattatcgatggattttgggtcttccaaggaaagcaattctcagtgttgtaacaggcagtcctaaaatccctgtcacattgtacagttaaatcccatttttcaatcacatgaaatctactggaggagaaagagctttgttacatggtataatttgagaattcagacttctttcactttgtggggcagcatgttcagtaaacctgtatgcagatcaagaagcaacatttagaaccctgtatggaacaaatgattgattcaagatcaagaaaggagtacggcaggactgtctgctgtcaccctgtttaacctatacactgaccacatcatgagaaatgtccaactggatgagtcacaagctggaatcaagataggtcggagaaatatcaaccaccccaaatatgcagatcagctcagttcagttactcagtcttatccaaatctttgtgaccccgtggactgcaacactccaggcttccctgtatattatcaaatcatggagcttgctcgaaaactcatgtccattgagtcgagatgccatccaactatttcatcctctgtcatccccctctcatcaaggtcttttccagtgagtcagttcttcacatcagtggccaaagtattggagcttcagtttcagcatcagtccttccaatgaatattcaggactgatcttctttacaattaactggattgatctccttgcagtccaaaggattctcaagagtcttctccaacaccacagttcaaaggaatcaattcttcagcactcagcattctttatggtccgactctcacatccatacatggctactgggaaaaccatacctttgactatatggacctttgttggcaaagtaatgtctctgctttttaatatgctgtctaggttggtcatagtttttcttccaaggagcaagcgtcttttaatttcatagctgcagccaccatcttcggtgattttggagcccgagaaagtaaagtctgtcactgtttccattatttcctcatctatttgccatgaagtgatgggactggatgccatgatcttagttttttgaatgctgagtttcaagccagcttttccactctcctctttcactttcatcaagaggctcatttagttcctttttgctttctccataagggtggtgtcatctgcatatctgaggtaattgatatttctccctgcaatcttgattccagcttgtgcttcatccagcctggcatttcactttatttactctgcatggaagttaaataagcagggtgacaatatacagccttgatgtactcctttcccaattttttgaacctgtttgttgttccatttccgattctagctgttacttcgtggcctacatacaggtttctcaggaggcaagtaaggtggtcaggtattcccatctctttaagaattttccacagtttgttgtaatctacagagtcaaaggctttagcacagtcaatgaagcagaagtagatgtttttctgaagttctcttgttgtttctatgatctaatggatggtggcaatttgatttctggttcctctgccttttctaaatccagatttaatattgggaagttctcagttcacatattgttgaagactagcttggagaattttgagcattactttgctagcatgtgaaatgagtgcaattgtgcagcagtttgaacattctttgcattgcctttctttagatttgcaatgaaaactgacttttttcactcctctaacccatgttgagttttccaaactttctggcattttgagtgcagcactttcacagcatcatcttttagaatttgaaaatgctcagctggaactcttatcacctccactagtgatgcttcctaaggccaacttgacttcccagtcaaggatgtctggttctaggtgagtgatcacaccatcaaggttatctgtgtcattaagatcttttttgtatagttctgtgtatctcttgccacctcttcttgatatcttctgcttctgttaggtccataccgtttctgtcctttattgtgctcatctttgcatgaaatattcccttggtatctctaatcttcttgaagagatctttagtctttccatttctattgttttcctctatttctttgcat

SEQ ID NO: 32322 - DNA, 1798 bp, Bovine  19866881926493
  misc_feature (1)..(1): n is a, c, g, or t
nctgaggtacgtgctgttttgggaatctattctcaccttctggttccagcttgactggtgtctatgcacttgtggatagtatgcagctaacttcctccacctgatgggggtttctgcaaaacagctcatggatatggctccggatattgctttcagtccctcaggaggaactataagtctttgactttgttttatggctaaggtactattattttgtcttatttgactattttctttgtttatgcattttttcacttctctgattaaatctgatctttggaacttggggaaggcataagaggctaaagcttttttcttttatgaaaaaaaggtctgaaaaaaagatcctgtctgtcctggggaaggcccttcagggtcctgctcagttttactattgacttggactcttcaaaaactgtcagtcatgaaaagcaaacaaaaaagctgataatgtctaaggtaaaggagactaaagaggcatgactgctaaatgaaatttgtaattcttgactggatcttgttaaaaaaaatacagctagaaaggacatctttgtagaccgtaaactgtatattaaacattattgcacccgctgttaaatttctgggttatggtaatggtgtgtttatgtaagagaatgtcctggttcaaagagatgtttggaatgtgactagtggtgaggtgtcatgaaatgcaaggtgtgtgttctgtgtgtgagagagatgcagggcagctgggtacagcacaggtgggaaaatgttaacaattggtgggtctaggtgaaggatatgtggtgttcactgagccgttctttcagtttctcatcgttgttcagttactcaatcgtgtccgactctgtgaccccatggactgcaggcataccaggcttccctgtccttcaccatctcccaaaggctgctcaaactcatgtccattgagtcggtgatgccatccaaccatcttgtagctttgcaatttttcaaaataaaaagtggaggaataaaagacaaaaaatttcaccataaaatcatcatttatatatacatggatatttatagatcatgcaattacttcaaattccttacaaattaaggcaaatataaggaataaaaatctaagtacattaaggaataaatgatgttagtagaaaccatttgtctctacttgacagatgaagatgtagatccatgaataaattaactctcataaggtcacccactagtgtgtataagattctacttctgtgagctttatacagcaactgaacatcaaatacgggcctttgaatacttgaaatgttatttccatgttgctagcttaaaaaagctcattctattgtcctttatcagagagaacagagttttcaagaattttgtttttattctttatatatctgctattttttgctcacattttaacagggattaaaatatcagtagggatgctttctatttaacccagttctccctaacctggtaacatagttggaagtccattagatctattgaataaggcaataatgatggtgaaatgaacaatacagcaagaatgttaaaacggattctaaccaagagttaatgttttgtaaatgtacagaatcttctctgtttctctgagctaagccaggactcatataaaactctggaccatcatggattaaccccatatgcctggaggaggaagctgacagagggcttgttcctcaactgttcttgtgtttcagggtacagatcctgctctgtcccctactggctgggtgactaggggcaagtttctcagcctctggcttcaatttccgca

SEQ ID NO: 32323 - DNA, 1552 bp, Bovine  19866880464724
  misc_feature (1)..(1): n is a, c, g, or t
ntcctctgctccaagggaaagtttatgagctatatgtagttcttacctcagtcagagcaaagctatctattccatagaggcattaacaggatgtagaacaagatgtctctttgggtccccacatggtgatttagtctaatgtaaaattctagatcagaagtccatgatgaaaaaaacgtattcaagtcccaaatatttccttctaccatgttaggttacttgtgcctattatattctctacatatactccttatgccaaagtattatgaaatattttaatgaagtgattacatttccataataacagtttttctaatttatgtcaaatggtatgagatttcataagccttgctttgattacactaccagaacccaaatcctcagagttacccagagcattaggtgactgctaggggagccacctgaaaagggaatgttgaaccattcaatggcaagcatggcaatggaaccaaccatggcaatggtcaccattgccactctgagcgacacatgcgtgactctagtcgtccagaacagttgacactgaggtattgttgactttgcttttcacagaagaggctgaagtcagctggatgctcttatggagagcagggactcgtccaccaacaatttcattcatgttcttctttggcctcagcaaaataatgaagcacttgggagcaaatgtacagccaaataaaccatagctggatgccaagattgcaaatgtttccacagctactttaaacttgcctttggtgctcaagtaagcagggacaatccagatgataagaacgaccagcattccaaaggtgatgctttttccttcatagtaattatcctgtggcaactggtgtgccacaaaggttgtgagaaagcccagtaaggccaagaagacatccatcccaaacatagagcacaaaggttctatagaaccttcattacattccagaataatctttatattttgagattccatgttcttgtacacccttggggggttcaatactaaataggctaaagaagaagaagagtcgctcagtcgtgtctgactctttgcgaccccatggactgtagcctaccaggctcctctgtccatgggattttccaggcaatagtactggagtgaattgccatttccttctccaggggatcttcccaacccagggatcaaacccgggtctcccgcattgtagacagacactttaccgtctgagccaccacgccaatttcaactagaacagaggttagcacaatgattttccgataaagagggtggatggatataagttgagttttggatttggaaattctgtaggctgaaaacagtgaaatagtcttaccaagaatgcaagacaggcagagagaaaaccccagtaccagagtgatctgacaggccatgcaagaccagttgtagggcttgctgatgaagagcatggaagacagcagtgtgatgacaagagaaacctgaataagaaagctcaactcccagccattagccatcaccagcgggagtatgtctgtgtatcacataaacagttgtgactgccca

SEQ ID NO: 32324 - DNA, 862 bp, Bovine  19866880478143
  misc_feature (1)..(1): n is a, c, g, or t
ntctcagtccatctatattgttgcaaatgatgatatttctttctttttaaaggcagaatgctgtaaccaaaaaaaatgtggatggagatgggcagagggctaaactcttttttagtgcactctagagatatagtagagacagttggggggggggggaatcacacctatgttgctttcttggaattgtgaggggaaaaaactaatatctaaaagaagaaaaatgagcattgtatgagaattaacagacatcttcaacttggaacacttctcagcatttattataagcaactaaaagccaagaacctatgcttttaaaaatgtaacattagcacatgcaaatatcatttaaaatcttctggaagaagagcctttctaatatatgaacacttataaacctcagacatgagagaatgtaaaccctgcattttgaggttctagatattctgaatagaactgggttcattccaggcaaatgaacatgaggaggctgccacagaagtgtttcatatttactgaagtaattacccccactcagggaaaatactttacaacagcagtggggcagtgaggcaaaatcctggaagttaaaatgccttcaagtataaccaaaggcctggagaccccagagaagaaagccatatgctaaggaactgtgcagcttggcaacgtttaggaaacattctacgagcaggaactttctggccgtttcaactgccttaacaagggcgtcctgcatggtatctgctgccattctcggctgcgggactgaagatagaaaaatgcattagattctaaggagattatagattttatccacaaaactagagtcggcagggggctgggaaatgggcagaaatggtta

SEQ ID NO: 32325 - DNA, 3092 bp, Bovine  19866880555760
  misc_feature (1)..(1): n is a, c, g, or t
nctaaattagcctttccctaactatcgaccacagaacactgttcctaaaatgctaatacatatgctaggagagaaatgcactagcacaaaataagtttgaaatagagggtttcattacatacatttatcagcatgtcaaaagcacattagcatagaaaagactaagttgttctgtggtgaagaaacctattttgtcctttaatctatatttttccaaaattacttgagtttggaatccagttttcccagctctctgttagcatcatacagaatacagtttgccagattccagtttggggacacagtaagtacattttggcagggttcatcttgtaattaatagaaaggctatcaaactaaaaattgtcagtgtttcatgtatcaataataatagataccacttatggaacagttagtaaatcttaggaaaatgcttcttccccactccttgagcagaatttcccctcaatacccctaactttctgtctcactctctgaactcttcttggaggtggagagctatcggtggctatcataatagccattggtcaacatttctcagttagacgaagctaacatgtcaaaagtgggaaggaacaaagacactaagcctgttgtctttcctctgcatctggaccaggggcagttagtaccctgggttctgtcttctgttcagagttagtacccctgctcccgtgaaatacaacttccctcagatagattcttccaaggtcaagaatgggaagaagttagcaagcccattttgttggtccaaccaagttgcgtctagcaacttagtcctcatctttgttaatgctgatatcttagttcttcgtggactaactttattatattttaactagctcagaacctgggcagtgaagagaggtgctgttttgagtcctgctcataacctcaacagaaggtatcatgaattcttcatgatattttacatacatgatctcatttaagcttcaacaacctttcaaggtggatacttatgtatccccattttacagactaggaaattgaaacagagaaattaaatagcttaccaaaggttacatagtaagtgactggatctcaacattttaatgaatgtaacagtgcacactatttaattgtactattgtaactattactagtgaatctcataagatggtatttatgtttggatccctttattatttatctctcactccttttctatgatggaggaggaaatgggtacccattccagtaaccttgcagggaaaatgccatggatggagtagcctggagggctacagtccatgggatcacaaagagctggacatgactgagcaactgggtacacctcttctatgatgcaacatgcatatttttatgtttttttaaatgcatttattttcaattcgaagataattgctttacaatattgtgcaacatgcatattgatctatgagaaacatatggaagaaacattaaaaaaaaaaacacataatcttcatcagtgagtaagatgcttggggaagttgaaagtgagaaaggtttaaatctgaaatttcaaactttcagccagcccacagacttattttgtttgactctcaaaatgctaaagagttgagttagttattaggataagaacataaatttctggcttctctgaaacatgtgaacatctgggaagccatgaacctgagttgatgcattctttggatggagcatgtgcggcacagttcaccttggtccccactgtgtcacttcattttaatgctttgtctgcatgtgctgctgtaaatgctttagtttgccaccctggtgtgagataggatggctccaccctctccccatcctcccctgggaacatcacagccactgcaagaatcctgaggctgactgtcaatgtctgtgatcagggcactaagtggacagtaggtgccttgatgtgaaacagtcaagctggaagcagcagattttcagaagggagaccacttagtgcagatgcttatctcagtccctctagaaaaaatgtgccaggtacaccctagaaagacttcagagagtgaggagagcagctggaataaggggcatgagtctaccacacatgctcgccagacagcatctgctttaggtgtgggatatctgtgcaaatgttattaaagtatcagtttctttcacctctaaaaacattgtaaaataatttgcctgagccctctatcatctaatcttcagtactaacctttctttctacaccattgtctgttacgtaacagttgctcgataagtcttttaaatgagtaaatgaatagacagactttgtaaattctaagcagataattgtccttcccttaagaagtatgtgtttaaatgagtgaagaatgcccatcaaggcctctttccacctttttgatgtctctcttcttgaatctcaccctcactccattaccaggaggaccaaggctttttctcgttaaggttaggtattaactcttccaaaggaatcaacatttaaacaactttctaaagatgacatgagaaagctgtcccttctagtagggagttcaagagtcagaaatcagggtaaatattggggttggacaccttattactccaaaaacgggtcttgaacttaagattaaatgaaatccaacaaactaaatttcaataaatcataggtcatattcaaaaatgaaaaaccatagaatcacaaaacattagctggaactggaaggaagtgttgcaagaaaccatcaaacccaaaattccatcatggtaatcatgacattaaaatgccacctgcaccagattactataaatttcaatttgctgaatggttgtgcaatgttaagtgttgtatatttcttgaaaaagctggtcatcaaagagtgatcaacatagaattttaataggggaaatatttatattgtgctttaatgcattataggcttcccttgtggctcagtggtaaagaatccgcctgcaatgcaggagacctgggtttgatccctgggttaagaagatcccctggagaagggagaggctatccatgagattgcaaagggttggacacaactgagcaactttcactttcactttagtgcattataaat

SEQ ID NO: 32326 - DNA, 2859 bp, Bovine  19866880568738
  misc_feature (1)..(1): n is a, c, g, or t
ngtgtttacattaagaaagaagaaaaattactgagaatcaacttggtaaatatgtttataggtacagcacaaaatggataagcaaatgaaactctgctctccttatcaaaggcaagaatggctagactcagggtgttttcctgtcacggtaagacctctgtgaagcaacattttcaaaggttttgtttaccactgttgactatgggagatgttgaaaagtgcaatcatcaaaacaagctaaatggcacaatatcaactccatcatctgtagtaatttggatttcaatttcactaaaggttacttcattctctccaaccccacccttactgaaacagacctggtaccatcacctccagagctctttctttgctctttgatgcaatgaggtaagttgtttccagaatattttgcatgactaggaagaaagggattgaataaaatattatattgataatttacaaatgtcccttgggaaaacaagtgcatttaaattgacagttctggtaaaggcccccaaatccttttaatctcccactgaattcactcagtgttccacctatgaatacattcagaggaataatgcattttgaaagtgactcacttgctaaaagtagtcaaaacataattcaacaagacaaggccagctttacgtctcatttgggtcctcaaggcagaggtaggatcagtcataactgcttatcctaaagctgctaaggtgaagacctaagggaaaaagacatctagtctttagccatagaagcagcaccattctactgaaaaaagggactctttataggcacacactcatacacattctagaagacagtgtgacaaaatgaacagaatctggacagggatgagtagggatctgtacatgagtttttatcatggttaaaaccatttaactgtgttgaaatgcaagtccttcatctggataatgaagataataatatccacctcctatagttttgcgagggtaagtaagctattatgtgtccatgaacctggcacatagtaggttcacatcctaccacggtggtcatcacaccttcatcctcccaactccccagttattataggctggcaaggaataataaaagaactccagtactagttattaaattatatccagtttttcatctctatgtcctctgcctaggaaaaaaatcacatatattcctgaaaccccagtatttttggcttcttgtggaaagagtggagtagtaaagtctagatctaaattatcttactattaacctatcagacacatagagccccaaagaatatataaaacagtgtatttcctcagatttcactttttaccggagtgggaccttagttcttaacgcttaagacacacacccacatagccaccaccttagagacaggagagaaacctcctctcctattccagttttaacttctccaaggctccttggacactgaaaagatttctctttaattttgaactttagcatattctcatttaatgtgcaggtaatccttgagcgccaaagaattcatgcttttgaactgtgatgttggagaagactcttgcgagtcccttggactgcaaggagatccaaccagtccattctgaaggagatcagccctgggatgtctttggaaggaatgatgctaaagctgaaactccagttctttggccacctcatgcgaagagttgactcattggaaaagactctgatgctgggagggattgggggcaggaggagaaagggacaacagaggatgagatggctggatggcatcactgactcgatggacatgagtttgggtaaactctgggagttggtaatggacagggaggacctggcgtgctgtggctcatggggttgcaaggagtcggacatgactgagtgactgaactgaatccttcctccaccccaccaaatgccatctagatggttcttgggcagggcattttgggagggagaagagacaagggatagagggaaagagccatgtatagcttcctggtacgttcaatgctcagaaatcctgtgggcattttcaatgtgttcttatgtgtttttccaccgatgagaatgagagtaagagaaaacagacccatccgactatgcccccctccacagaaacctccgtcctcacagaggtcagtatcccttcctgtccccacttctgggtgaaaggtcctgaggtttctccacacatgctttgcctacaccatttggtcctggaaccaagagctcacacaacactccaccactccttttgccacacccacacacatcctaggtcactctgtttccagtgtaccatttgcagcccccatctggacactgttggctccagattaagttcttaacaaggggtgtacttcttctttgtttaggaatggtagaaatctccccatgcatctgagaggagggattctgagctcatgccctcaattcaaatgtcaccctcccaccgtacatctctctgtagtcctacggagactagacgggactatcctggtttagtagcagaaaccactaacctcttcatgagaggcaagtcagcctcttgggaagcagcagacactctctctgccagatccaagctgaatagaagagcaaccccagccctggtttggtgcaactttgaagcaaactctataaacgtggtggtatcctagctggccttttgtcagactgaatattgagttcaaatactgtttgctgctgctgctgctgctgctaagtcacttcagtcgtgaccaactctgtgcgaccccatagatggcagcccatcaggctccaccatccctgggattctccaggcaagaacactggagcgggttgccatttccttctccaatgcatgaaagtgaaaag

SEQ ID NO: 32327 - DNA, 926 bp, Bovine  19866880650554
  misc_feature (1)..(1): n is a, c, g, or t
ngagatgatgatgaaagtgttttaagaaggaggtctgtcacctagtttgaaagttttagtaaatactggaaggtcaagatacttcatataaaaatgtaggttttcagtctttcacgaagaatcagcaactctgaaaacacaggactcacaatctgcttggtaaaaagcagctaccggccgctggagcctgagctcatcagtgcgcatgcgctgtgcatcttcgcagtctcccacccactgcctcttgtctccctgactatcaggatttgtcagtctgcatttatcatcatgcttacattactgaaagtcccacaggagagggactgtctccccatcaaagccaggaaaacaaaagatagccccaacgagctgtgtgttttaaaagcaaagttggagagagcatatttctgtgaggaagggatgaatagtctatgtgtttaataagaaaataaagcctcttcaaaagaaacagctctgttttactcgattataatctactacctccatgtcttctgcaggcttttgagttgacccgattttaaattcatttgcaaattctgtttccagaaaaaaatatttctcagatgtttcatcatgtcatttttcatatttaattaacctcagtgagtcctgttggtgtccatattgtctgaacacagaatatatgcactgactgaggatgtttttcaaatctaaattcacacttaggagcatttttccactgtcctttgctggctctcctcccagccgccaatttggcgcctagaggtacgtgtgacaaggcctgacaacaccagttcaaatcctaccccagaggatcattttctaatcaacaaggcagtgcctgtgtggcaaggaggagttcacccctggtcccttcaagagccctggctggtatggagctatagggagcatcagtgctggga

SEQ ID NO: 32328 - DNA, 1936 bp, Bovine  19866880678330
  misc_feature (1)..(1): n is a, c, g, or t
ntttgtaactaaaaactggggaaagaagcaatacatggttttagtcctctaacttaaaaaaagtattggaaatgtctagtggtttgttatggtcttcacttttctaaggaatctgcatacattatctcttagctgctgctttaatcttttatggctatctttgaggtctataatactcctttgacctccctaaattttgaaccttttatttaacataccaagttcaaatttcatagcatccttctcaatcacccattcatccacccctggttccatctattcctccacctgctaactcactcagttgtccttaaatcatagcacatgaggaagattctcccataagagtcatttgctgtggtacataattttaaataaatttagaaactaaataggaaaaaaagaactaggttatggagaagagagcagagaattggagtgactagctgatctgacaaatacacagtgtactgcttattttttaaaagattttttttaatgtgacccattttcaaagtctttgttgaatttgttacaatattgcttctgttttatgtttgggttctttgaccatgaggcaagtaggatcttagctccccaaccaggaatcaaggcagcactccctgcagtggaaggcgaagtcttaaccactgggccaccagggaagtactaaagagggaccactttaaagagttaacttccacaactaaaggtattcatctgtggttttacaaaatggtagttttaaaatttttatccctagaaatgaaaaatgttctaaatgtcctttggattcatggagtcaacactttaccagatagtaaattaccagatagtgaaatcattacttgatctaaatgctacatggattatatgactatttgtaaagttcagcacctggttccccacagagagttcagttcagttcagttcagtcgctcagtcatatctgactctttgcaaccccatgaatcgcagcacgccagggcctccctgtcactaaccatttattagccatgaagacgcaaaaaagtcagttggatgtccccagatgaggagaggcctgtctcacagagccctgctgccctcagtgatggaggaaccgatgcacgatgctcaggccctcctacagcagccctgcaatgaacacttcatactcacctggccaacacaaagagattttaacatgctttcaggtaaaactgatttcatgtcacaatattccaacgctattaaaaagatctaaccatttcccataatcagaaaatacagaggtttgcaagatttatctcacagaaaatccacttagagtttcataacgctcagtcagatcataaagcccagttgagttggattggcagaatgctggctttttgaattaacccttctactagatggttgaatatgaatatgctttctcatctctgaaggagagtggttttagtcaaaggtttacagtgttcagaaggggcaaggagtaacagatcactttgaaatatgatgaaagctaaggactttgttcataggaggcgatgaacaaatgtatatccatataaacacagagtgtctggaataatgttttcagagattttacaacgtcctgaagcccagctacaggttctgcttagaattccccatgagatggcttctcaaatcctttctagctctgctatgccatgcatgctgtagactggggtgttgctcatatccttaactacacacacaagtttccatcttctcagtgtgttggttggtgtcattctcttcctctaaccccattcttctaacctgttcctcgaagaaaaaggactaatctctcactcatgaggacaagcccagtacatctctcagagcagtgctgccccctctttactgtgctcgcaaaccacctagatctggggaaattgcagattccaactcagcaggttcaggaggg

SEQ ID NO: 32329 - DNA, 1033 bp, Bovine  19866880788489
  misc_feature (1)..(1): n is a, c, g, or t
ncttgatgtaaacgaatgaattttataaaacatatttgttatattatgaaaaaatttgaataaggactttgtattaaataatattaagaaccaaaaattaagaataaagcaagaagattaagtacattaaaaccaaaaggatgttttgggggggttgttactgtcatcactgttcattgttatttaggattagtgtaggctgtaattgagtaccaggattttagaactgtcaagacagaaaaactttaaatcttaatcagatctttaaagtctcttgtagtatcacattccaccagcaagattcctgaagtagttctcaagaatttgttagagatacagatgaatgtaagcaacacctctccattataaagtagaacaagaaatggatttcaaaaacgtattttggcaatgagtagcttcagttcataaaattattttgagcaactgttgcttttttattaatatcactttgaaaatgagaatctctgaatactgatattcttgttctaatattaaagaaaagccagccacagccagttttgtgtaaaaactgggatttctccattttagacaaaaggtcttaacttggattttaaaactgatttgtccaatttggagaacactatccattaagaattaatttaggtacaactctatggaggatgtaagaatatatgttaataaaacaaatctataaagataattagcacagttacaagaaatgataataaaccacatatgcacattaactgacaccagcctacatttcatagatttaatgcagttagggagaaatgtgatttttaaagaaaaatgaactgtccacctaagtgggttatacccaaaacatgggaaaacccaaagaaagaaagaaagtgactaaaatttaagttttctagtctttcaggaagctgaatgaaaactcacctggttttttgtaaagcagaagatttataaatgattctagaaagctaatgaacagctcattcaccaatctttaaatacattagagctaatacacctaaactattat

SEQ ID NO: 32330 - DNA, 1049 bp, Bovine  19866880837944
  misc_feature (1)..(1): n is a, c, g, or t
nggagaggagcagaagtccttttatctctggaagggtgtgagaatagagagagaactgttaagttccctccttctccaatacaaatactaagagatggtataatttgaggttcgtctattactttctaataactgcatgaatactttcaatcctaggtgggctatgcctctaccagcttacttcttagtgacaaataccagtttccatcttatcttcgcacagtggccagtgataagatccagtcggaggccatggtacaacttatccaacattttggttgggtctggataggcaccatagcagctgatgatgattacgaaaaatatggaataaaaatttttaaggaacaaatggagagtgtcaacctctgtgttgcattttccaaaaccattcccaaagtccattcttccttgtttgttttaatgaacagaatagttttcataaatattggtcataaaatgttttaaaatttacatttgtctaatttctcttccctggtggctcagatggttaagcatctgcctgcaatgtgggacacccgggtttgattcctgagtcgggaagatcccctggagaaggaaatggcaatccactccagcactcttgcctggaaaatcgtgtggatggaggaacctgataggctacagtccatggggtcgcaaagagttggacaggattgagcgacttcactttcactttcacttttcctcatgattacatttaggttatgcatttttggcaagactactgcaaaagtgatacatatccttttttatgtctcttataggatgccactgtgtctcattaatgacacattaatatcattatatattctgttgctcaaaatttcccaggtttgacaattgggagtcactttgagttggctcctatttcttttgagcaaatcaccgtaatttctgattaatttactttctgaaacactaagatattgcagattcatcttgtatttctctatccggtcttgtagtagccatttctcctgagtcctatttacatttagaatggaattagaatcaagatctgagta

SEQ ID NO: 32331 - DNA, 1416 bp, Bovine  19866880865756
  misc_feature (1)..(1): n is a, c, g, or t
nggctttgcacagagaggatgctcaatcagtagctgttcagtgtttgttccctgactgcagacttgattctcaacaaccagatcttcatacataagcccaagccatagggatcatctgctgccaggaactgaatccaccaaaactcacctgggagctctgtcctcccataggaccacatctgatcctctgaaaatacatagaagtaaataacttcaaagaaggcaggaagtttgggcagcagagacaaaatattagaaatgtaactactcgtcaggtaataaacatttattaagatggtagaaatcactattgaaatgccatagctcaacaatcattcatatgttgtcttgtcctactaaatgtccagtcagttcaaatgaataggtcagccctggtttggaatgttaattctgatagtatataaaagctctttctattctgtctctaagtcacttttccctaggagggtggtgatcatatgaatccctagaaagtctctgtaagcacacacaatgggctctcataaatattaattgagcacaacggggatcctcagctgtcaggtgccagatgaagtgcacatttttgctagatattttgaggtcaccctaactttacttatcttcataagcctaaatataccaaggaaagcatggggtcttgtcttaacccttattccaaagtgtatgaaagcgaaaatacattagttttcaaatcatttctacattatctcaagagtcctttataatgttattagtcctctttgcagttgaagaaactgaaattcaggaaagttaattaacccacccaactctttgttaaactttaaaactcaagctttacaaacactatgtagtataaaaaagcaatgagataaccactctagaatattatcagagagaatgtacactgagaaaatattttcagaaagcaagtacattaagaataaatatatatgtatgtatgtataaatactattgtatatataatatttacccattaattccacttctagaaatagagcctaagaaataatcagagatatgattttttaatctcaaataaagatgttttttataatattacttatgataatgataaatagtaaaataagaatagctaagcaataatatagctataatatgtagtccttggaaacttttaagtggtttttaaggtaataaaataatctgacatactattaagtgaaaaaatatagtatgattccaattcaaaaggctagggtaaagcatggcaaaatattagcagcgattgccctttcatttttatgtttctgttttcaaaaattttctaccaagttcagatgttacttttgtaatctgaaaaaaaaagttatttaaaaacaacaaataaattaaaaatcacatccacagttacacaagaaataaagtcag

SEQ ID NO: 32332 - DNA, 1381 bp, Bovine  19866880887981
  misc_feature (1)..(1): n is a, c, g, or t
ntatagcctgccaggctccttcatccgcgggattttccaggcaagaatactggagtgggttgccattgccttctccaggggatctgcctgacccagggattgaacccaggtctcctgcattacaggcagactctttaccatctgagctaccagggaatccccagtagccaagatgtctatgtaataaaatggtgggtagaataagaataaaaaagaaaaaggatgcagtgctgggctggacttcctttgagggctctgggagccacttaagggctttaagcagagtgactcatatttgggaatcatctttacaaacaccaccctgagaatgggttccaatggagcaagactgcagtgaagagggttttgtgatagtttaacagtgcacggtaccaaggaagtatctgttgctaatgtgcaatgctgcctgctggcataatttaaacaggataggctacttcttttcaaaggaacatgttttatgtaagctctctctaaacacaaaactcgttctttgtcaccccagcacaatgagttattagaatgttagtgtaaatctttatgagtgtgtaattaaatcattaggattagagattaagtcaccagagtctccattattcaatagtgctgtattttggaatcgcccagaaagaatatcactctactgcttttagcagacgctaacatttcttcctgaatgttgttgttctctttcctaagtttttcaaagtaatttcaacacatatatccatatagtaatacttggtggcagatatttttactaatttcacaggttgtccctaaatcccttaagactgggggctttgtacacttctaaatataatgattgttaagatggcttagagagagggagaacacagggtagatactgaaatggggaccatcgtggctctgcaataaacatgaacttcactttttctacaattcaagatctacagcaggtgcagctcatggaacacattttaaaaactgattttcatgctaaaaaataaatcacgaaaacaaatatttaagattctttcactgccactaacatttatcctttttaattagaaatgttgaggattcaagtcaatgttttccataacttgtccttatagaattttgttcagagttaaatggccagatctgatgttatactgacttatatttctacctgtttaataagcccaaatactccctaactatgcttgatccattctgaggtcaaaatttggggcaggggtgatcttcgtcaaatctgaagtttagggcacctaaatcttgctaacagaaaattcatactaaaccttcccccaaaatctgttttattcggcagaaaagttattaaacactatcagccaaaaatttaataaaacca

SEQ ID NO: 32333 - DNA, 1802 bp, Bovine  19866880899459
  misc_feature (1)..(1): n is a, c, g, or t
nctattgtattccttttacccttctaccataattttatatctttttttttttttctcagacaaataatagtcatgatccttcaagcatgcagaccagaactattcttagaagggagctgcaggaggtttattatgtcatgaaacacagagccagaacaaaggactactgaatcactcaccttatcttcatctaagaaacctgagaattacagggtttctcttttcctcccaaattcaagaactgcacttgccaagactgcaggttttatggttgagactgtattacaaaaaatgtaaaaagacagatgcacataatgtttcttactgtatatatgactcatctaaaatgcttaaaaacaaggttcaggatattttttatcaaagtttaagcctttgtttccgaatctagatgtctgattgcttggcacttatttaagcgctctccttaagagtgccacagatagcatcttttccctgaaaacctgaaacaggattaaaattatttcacagattaagtcacaattcttagttcactgagaacacaaatctaggtttacttatctatatcttatatatcactttgttgtatatcttatatataactggttttcaatactgttgactaaatgaataaattaaataggaaggatttaagagttttcccagtatattatagcaccctaatataagccacctttatcatattctatttctgtaactgtctttataattatttagaaaactgattctaaaaataagtttaattgatgttggtgatgtggggaaatgtatcaaacagaagcaatgactgtaacagcttttatgaataatctggtgcagctataaatcctggctctgcccatcaaccttccctccctttgtctcatcccatggcttctccccagccttcccccaagcactcccagtctcattatcccatgatctgctaaactgcagtttacctcctggaaccagcagaaacacatgtcactgagaattagggaattggagccagttacaagccacaaaatagggtcacaaagtatctgaacctgaaaattaagagtttttatatttttaatgataaaaaacttaattggacacttctaaacgtttgagccagatggattgcataatgtctcggcattcataatgaatgggatgggaaagagaactttaacagcatgttatttgttaatcatctgaaaagtcatattaccgttgacttcatttgctgatggtggaaggatattgtctgaatactactactaataaacatttgctattcttgaaggcaaattacttaaaaataggatatagcaagacagtgctcatgtattactacacttacggtattttttatgctgcactttatcccagaaagagtaattccattttcatacatttattagcagttaattcttaccaatgtttatttaatagcaagtaagtataccaatcacgctgccaaatactgttgtaacttaagaagtgtactacaagaagctacagctccttctgcataacccttaagatgtgtacccttgccaaatgctaacctgtgcgtaaacaagtgaaactcttaaagggcaatggagttgtcaagactcaattttaagaaaaagtgactctctcaacagaaagcttgagggatctgactggttcgtgtctaagtttcttgaaacattccctgcagatgattaaccccagaagtgatcaaaacgcctgagcaactggaaaaacaatcacttctgggaaagcctttgtttcttttcattgccattttacgttggtccacttcg

SEQ ID NO: 32334 - DNA, 1020 bp, Bovine  19866880909194
  misc_feature (1)..(1): n is a, c, g, or t
ntaatcagacacaagatgaaacacagcatttgtagaattgcacttgctgaacagttgatggaacttaactgtatttatgaggcaattggtgggtggggtggctaaccatcttataaataaaccactttatgagtttttaatgtgttccttattaaaaacgcattactttccatactaaattaaatagcatttgaagccaatgtttctttttttacctttatttaaatgagatttctgcttgctttagttatatgattaagtagcaaaagctacttgagatgcagactaatagaggaaaatatccctttaaagataaaaaaaggattttagagcaagaggagaactaagaaacagatccaagttcagggaatggagacagctcacaggtggttaaaagtggagtagcctcatccccaatttccagatacttgactaactggaaacttactgctatgatctctttgccattccagcttaggattcattggttccctctaaatatgatcagtagagaatatggtcaacacacacaattgatactgcctcaccataatggacttcccttttctcatatcaagagtagtctgcctttccatcctccataaggggttgagcatgaagctacagaagtcaggtagcttcttccatcacctagatctgggaagtggtccagagtggacaggtcatccactcaaaaccaaggttaatgaaaaaaatggaacttctaggaaaagaaagctactctttccttctttccttctagaagtgaatgagagctttgtcatccatcttgaagaggagagaagaacttgaggctgccacagaccatcgtatggagctgacttggagccatagcgaaaaagaaaaacacgaatgcgaagaaagagaaactagatcctgtccacagtgtttgtaccttaaatctacccttccctgaagttttccctatctctggactttttaattatgtgtggcagttagttttctttattacttaagccagcttgagcatatatgtgt

SEQ ID NO: 32335 - DNA, 1137 bp, Bovine  19866880968941
  misc_feature (1)..(1): n is a, c, g, or t
nctttgagaattccatccagcttacactgctccaagacatctagaaagttcaaagttagaacattaacattgtgcattcaagaatattgtaagggaaaaataattacccatttattagttgcatgacacatttattagttgtgtattttgatactttgtgctatgacttggagaaatgagaaatgtattcattcataaagggctcaaatttaacaaaaaattcacatgtatgaaaatatgagtgaacaaataataagtcattaatacttcatgtaattaaaaagtatgatgtaatataagctcatacaaagtgctgattttctgttgtagcaataaacaggaatatgattgaggtttaccaatataagctgtcattgatcagggtcttatgtaccagagaagtaatgcctacatagactcacacatatatatgataggtatgtttctaaacttctgtgatgacaaaaatcacctggggaatttatttcttaataggccttctcttgacctactgagatgaactctccagagcagaagtttgagaatctgtctttttaataaatgattcaattgtttaagttcaggcaggcttagcaaacattgcagtcttcacaacaattccatgaaaacattcttcttcttcttttatagttgagaaaactaaggttagaaagattaattaactcctcaaaggactcctaaactagaatacaacaatctgactttcagaacttttgttcttttcaccgcactaaaattttctttgttctctgagcaaatgatctggttggatatgaaaacatagcattaaaataattatagaaaaattcatttctactactgcttgaaaacaacattacaatctgttttaaagtgttaaagaatattgagctcttaaagtaagaaagactttgttcaaggtggaaagttaagatgtgtgggaatgctgaagcttttgtgtttcagggaaaagttggacacacatttgaacaagaaacgagatatcctgtagcttcaaaaaactaaggaaaaggcccagcatgtagggaggaaaaatactccagactaaagaaaagaaagttgttctgacaaagtacataggttacctcaatcttgttttctaactttctaatctaa

SEQ ID NO: 32336 - DNA, 1228 bp, Bovine  19866880973776
  misc_feature (1)..(1): n is a, c, g, or t
ntgggcagatgaatgggtaaagaatatgtggtacatatatacagtggaatattactcaaccattaaataggaacacatttcagtcagtgctaatgaggtggatgaacttagagcctattatacagagtgaagtcagaaagagaaaaacaaatacattgtgtattaacatatatatatggaatctagaaagatggtactgatgaacctatttgtagggcagcagtggaaatgcagatatagaaagcagacttatggacagggtagcgggggcaggaaggagagggtgggacgaacagaaacaggattgtggaaacatatgcactaacatatgtaaaatgggacaaccaacaggaatttgctgtataactcaggaaacacaaaccagggctctgtgacatcctagagggctgggatgggtgggaggtgtgagggaggggacacatgtatacctatggctgatccgtgttgaagtatggctggaaaccaaacacaatattgcaattaaccttcgattaaaaataagtatttttttaaaagagttcgttatttacattccaatacataatttttctcgtttttaaaaatcatgttgcaaaacactgaggcactctgcttttccgagtgctccttcagtaaaggtgtcttgcattcagaggtaagactatgaaatcaatacacacctttgcacatctgctggggtttgagaacgtagccgcaattgccgtttgtcttgaatttggctcgatttaactgcatcattcgcccttcagactggtagttcagtgccactgtgcaagttcaaagtttaagagaattaggtaacatagcagcctagactcaagacccacggagaactgctcctcccagaggtatacacacctagctggcaacctgcgttccagtagggcagagggttgaagttactggaatcgatgcggtaggcagagggataaatcctcgtgagctgcttttggttataaatcatgaactgctctgatttctgctgaaccacttgatgtgctcttgtttcactgaaggataacacatttcctgtggttcctaacacagtttttaacaaagaaaacagaaaagtgagaactgcagcaaagaaaataccactcatgaaagatcctgaggccgattacaccaataataaaaggcagagcaaaagagcgaattcaaccggaagaggctcagctcctgagcaagaaagatctataaaatccta

SEQ ID NO: 32337 - DNA, 1832 bp, Bovine  19866880976238
  misc_feature (1)..(1): n is a, c, g, or t
ncagttcagcaggcatctgatatggtacaatgataggaacagtgacattattaagggatcaggcttctaaatctgagaaatacaccatggccccatattagcctgctttaaaaatgcaacattaatgtgttaaggtcaaagctatgtatccattactggccttttaattacaagaggttgtggtttgaaaacaaattgatctaacttgttcttgtggatatttcaccactcttgaaatagaaaataaagaatgcaaaaaaatcatgaagatatgcactatttttatgttttccactctttaaggcttagaaactttttcagtttgtgttgtgatgagtagcatcaaaacacaggcaggaaaaagggctgacattttacgtaaccaccattacagttcacggtaagccatccataaatgattcatcctgcattctcttgactgctgcaaaattacggaatgtttacccattagtccaggagagcaggcaactacagaaactaaaaagaacaaaatactgatatggaacaatagctcctcctatatatacatttttattgataaaccatgaaagttatttgattgagccccttatcatgagctagagttaggtaggaactctcttccctcctgtattgaggaagctcaactagtctaatcatctcccctgcttactcaacctgaagggaagtcgagtgacacagttgaactcagatgctgtatctgtcattgtctttgggtatgagatgctcataggatgtgggagttttcccttgctttccccaatccaagctttacctggcaagtttctcactgtggggaggcctgtcccaatcccaattgcttgtgactagaagggtaagttgacttaattcttgggatcagatttaggaaacccacttgactctcacagtaagttacatcctcaacttggtgtttatcctaataagtaaattttggtctcaaatttgctattgtttgacatattttaatttgttctaaacccaaaaggaagaggagagttttttggcatcttttcaatgcaacatatcataatgtgggaattgaaaactgagaggccacaacactcatgccggtaagcttttggtagggccaggacatgtggtggtgagccttgaacttcagtgagtaggcatggcactttgaacttagtggtttgtagaggtttatattaaaccagtgtatctgccactgggccactggatggaaaaccccaagtcagcaaattgttatattgaccttgatgggtgactatggcttgcggttgtttatccataggctaaagactgtttctccagaggcaagtgatctcagattccgttatgatgttttacgtacctggtagtatggcatttatacagagcagggccatgtttgaggaacgtccaatataaccacgtgctaagttgcttcagtcatgtccaactatttgcgatcccatggactgtagcccatcaggctcctctgtccatgggagtctccaggcaagaatactggagtgggttgccatttcctcttccaggggatcttcccaacccagggactgaactcgcatctcttctgtctcctgcattggcaggcaggttctttaccactagcaccacccacaatcgtggactaaaatacaaactgatatcagtgccacttagaaactttaaaaatgaacaaaaacttattaagcacagttccttctgtattttgattgtggtggtggtggtttagtcactaagtcgtatgtgactcttacaacctgttggattatagcccgccaagctcctctgtccatggtgtttctcaggcaagaataccggaa

SEQ ID NO: 32338 - DNA, 1020 bp, Bovine  19866880995731
  misc_feature (1)..(1): n is a, c, g, or t
nactgtctcttgggctatagtcttcaataagttcccaaacagaactgaactcacagctgtcacactgtgctttctttactttttcagttgacactatcaatttttattcctttgccagtatcctgtttttccatttggaagcttgtggagttttcctttgtttttggagttcagaattttcaccatgtatgtttttctgttaaccttattcaacatttattaggtctttttgaacaaagtttagaatttttcatgaatttagggaaattttcttttataatacatttgatttttcccttctttctttcctcttcattaactcttcctggaaatccagttgtttactggatttctctctctagcctttcttgttactgaaagtagggtctgggtgctcgctgctcgaaagccagtaaagaagccagattggtgaaaagaaaaatttgctttctttcagacaaccagggtagtggtcggggaagagacacatgtctgtccaaaggctgactctgcctatcctcaacaattaggagacgagcttttatagacggagtgggctacaggcagaaatagcagtcagctcagacagtcaccttagtctgaccagagtcatcttgattattttaagtagagttaatcttcagctacagggtcagtttgtttccatttctttgaggtcgattcttggaattgtggcagcttatatcatggctacagtctggtcatgtagttaacatctcacttggtggaggtttcagtatccataagatggctcatgggatatggctcagaatattatctatagcccttgagaaagaactaaaggtccttgatcttgcttattgaccaaactattattgcattgtcctttctgactgcttttctttgcttttgcattttctcacttctctgattaaatttattctttggctaaagtttttccacagacaaaaggcaagcggaggacatgcgtgggggtgggggggcaaggaccataaggtcctgctccatttcattctc

SEQ ID NO: 32339 - DNA, 2502 bp, Bovine  19866881020435
  misc_feature (1)..(1): n is a, c, g, or t
ncccccctctcctgtgcccttctctctatctaatagtcatcccccattattccacccccctaattcttgctcatcctagcagactgcttaggcattgtccctttggcaaacttacccatgccacaatttatttaaatgctccttttcactgtccttagcactctgagcatatttctgccatatcatacagcactttcttgcaattgttggtgacttgcctccttttatgtctttaggatcatgagctcattgaaaatatgtggctatgtcttattctttaaaaaaaaaaaacttttcttttttggcgggggagggagtgctgtttatgacttgtgggatctcagttccctgaccagggagtgaacgagaaaggaaggaacctggggcaccacagcaaaagcccagaatcctaatcctaaccactaggccactgggaaactcccctgtattcattctgtagtgcctgcaatataccagatattcaataaatgacttctgcattaaaaagaggcaagttaaaattaacagttgcataaagttagtcttatagaccttgctgctgctgctgctgctaagtcacttcagtcgtgtccgactctgtgcgactccatagacggcagcccaccaggctcccccgtccctgggattctccaggcaagaacactggagtgggttgccatttccttctccaatgcatgaaagtgaaaagtgaaagtagtggcctttaaaatttctaatgtttggtcttctcattaattaaatatgaagttaaaatgctgttctgataagagacacttgctgcatagcaggtttggattctggtgtcttctacatggaagaatctcgaggactcaattatgatggatcaatttaccctgattgctcctcaacttagccaggttgctgaaggatttgcccctgaaatagagccttgagaagacctgctatctatgtactctggtgacgaccatgctaacttcaagtttggaagaaaacttaggaaaaaaggacttcaaatgaaagtagtcaataaagttgttaacaccttttatttatttatttttaattttattttatttttaaactttacaatattgtattagttttgccaaatatcgaaatgaatccgccacaggtatacatgtgttccccatcctgaaccctcctccctcctccctccccataccatccctctgggtcatcccagtgcaccagccccaagcatccagtatcgtgcattgaacctggactggcaactcgtttcatacatgatattatacatgtttcaatggctactgtttttaaaagtcatctgtgacggttcattctatccactgtgagccctcagctgtgaatgagagcatagcttcctgcccgcggtctaatcagacatcgggagggcaatcacgcccccctagtgtcagagttttaggttgcatgttgcgttagatgaggaaggcacctccaaaggcaagaaatctaatcatttaatagaatttgaatccacggacagcattgctttcagcagcttggtggtctatcccaatggggggcttcatagagaaagaggcagaggggaacaggggaagggtctgactctgtcatcggatcaatacaagactcttcaaccattagatagagtggatctttgtccttaaagagtacagattgcaatcccaccttctgatgtttcgatgttttgatatattaatattccagtattttgctggcataatgctaccattatggtaatttaaaaaatctgaaacgcatcttgagatacatttagagagttaagacactgagggaattttcaaatggtaaagtttactcatctgcaaagtgttgttttatgcctgtataacattcaagaagagaaaaaaaatcaactgacagagaatctcttgcaagaatgagtctctattatcagactttagaaacttcatttctcatattatcccaggagaaggaaatggcaacctactccagtattcctgcctggaaaaccccatggacagagaagcctcataggctacagtcaatggggttgcaaagagtcagacactacttagcaactcaaaaacaacaacacagacttctgtttgactttgctgtgtgaatatgtaaacaaacaaacaaaaaacatttaaatgtaaaaacactcatatattgtgtttcagtgaaaacacaaaatatttgggcccctgtgcttgagaaaacaccgggaggaagagtccctttagggctttgactccaggtacccatgtaggaaacaactgagctctcaaactaaccaatagctttaagcagtagccatgccagtctgaattttcctcatgcttctggaattcggaaatgacagacacaggataactatgcggccaccactaatacatgacgagctcagtatcaagccaaaaaagacggaggcctttgtggatgcttttggatggttagctttgactatgagagacacgcctgtctttaactggcacttccagc

SEQ ID NO: 32340 - DNA, 840 bp, Bovine  19866881165040
  misc_feature (1)..(1): n is a, c, g, or t
nctgttttagtaattggtgaaaaataaaacaactttgtgtatatgctacaataaattgagaatgctcaataagcaagttataaatggaatgcccatcatgaagaaaggggggaagaggagtaaaaataatgaattttgaattttgatataaaaagcatttcactgaggttttgagaattttctctgtctccaagagatgaaggaagaacatcatgtgaccataagattatagagtaagtctgcctcaccagctcacaataaagtttatgtctaactacacacaagtgtctacttttgttaaggcctgaatggcgaactctaacttgtcacaagcgaggattaagtacgtagaccaatttggttggttgctgctgttgttcagtcatgttcaactctttgcaggccaggtttccctgtcgctcaccatctcccggagtttgctcaaacttatgtctactgagtcgttgatggtcagttaattcatagcaaattcctcaaacagcctctatttaaaagtggcctgaggaggggaggtggggaaacaagcatttcttgacattttaacacataggaagatgtttagaggttatctgtcctaaatagcagcatttgctgacatggaaacttggtccaaagcacaaagttcacagcaacccagtgggagggtgacccctgcaagaggcctccctctttttgctgagccttcactgcctctggctatttgcaagatgcccttaacatcacagacccgtcctccatgctttctgcctgagtatggggctaaagaggaatccactgggcaaagctgcttccaaaattagttctattaaatttacaaca

SEQ ID NO: 32341 - DNA, 696 bp, Bovine  19866881201210
  misc_feature (1)..(1): n is a, c, g, or t
nttcgaattctgaaagggcacatgatccaaatgaggataaattacctcttccaggcagaaatattctcattttcatttagatatgttggagtttgtgttttttccctctttctgttgttacagcttgagcaatgttctatcatgtgaaacagaattggctctgtgcaagcatctggaagaatattaaagccacatttcagcctggtatggcatgttgcttactttgagggtggggctggggggaattgtagttcatggttttaataatcaaatactccgagatgaatatcaaatctgatctagaaagaacatcaaattatgctctcccattctcctttccccctttccatccctccccattgagcttaaagattttcaagtaactttttcctgagtttctaccaaagtttctatatgaaatgctaacacacctgaaagagagtccttgcctccacaggacagtcacatggagtgtccaactacacatcaagtatctatcacatgaaggagagccatagcaagggctttaatggagaaatgaaatgtgatgaaatccagtgtaggtaaagtttacatcagcctgagggtatcagagaagatatcacagagaaagagacatctgagcttgggttaaacagtaagcaagaatgtgactagtagaaaaaatattaggtaagaatttcaagcttccaagta

SEQ ID NO: 32342 - DNA, 851 bp, Bovine  19866881254276
  misc_feature (1)..(1): n is a, c, g, or t
nctctgggcacacgagcaaggccagccattttttgtgacagcatctattgtatgaagttattatgtgtggaaacttgtaatcatgtgagcacagcactggaccagttctagagattaatagctgtgattatgagaggccctgggattaatttttgtgatgaatattactctgtaatgggattttctgcatctcaaagaataagatttgctaatggaattaaaagcacaaacaagggaaatgcttattagtttatgagcctgaatttgcatttaaacaatgaataggctaattacaactctgatctgttcaagtacaaggctttcttattcccttctcaaccagcattatctttcttccttgggagtaatgagactgtatttcttttgaaatactctcagattcaccagataaacatttgtcctcatatagggaaaacttgcaggactttataatttaaaaaattttattattactttccaaagcagaaataaattcacagaccttaagggaaaagataggggagggataagttaggagtttgggattaacagatatacactactattataaaacagataaacaacaaggacctactgtacagcccagggaactatattcaatatcttataaagacctgtaatgaaacagaatctgagaaagaatatatacatgtgtacgtgtgtgttagttgctcagttgtgtccaactctttgcaaccctatggactgtagcccgctaggtttctctttccttgggattctccaggcaagaatactggagtggtttgccatttccttctccaatatatatatgtgtgtgtgtatgcatatatatatatatgacagggctt

SEQ ID NO: 32343 - DNA, 1022 bp, Bovine  19866881396787
  misc_feature (1)..(1): n is a, c, g, or t
ntgtttaggaaatgaactttcaatttgcaaaatgtgaggattagtctagatgaattccaggtttcctttcagctctatgtttctctcaaactagctgacaattttgctcagggttggttgggaaaagctcttctattctttccatatgctgagagaagacaggattaaggaagcagaatggcccacggtgggcactgactcctggacaggtaacagaaatgttctgtacaatccctgccaggtttagataagacgacgcagccagaggaggcaccatgtgccagacttggcaaaaagcactgtcgtgtagcaaggagcagtcacagggcagcgtgttacatgtgaatgtgattgtgcttgggaagtggtcattccaaaactgtagcagcaaaggtgataatcagagaaagctagttaagttgcctataaaagtaggtgctggaccagattcctgggtgtagtgtgattaaaatgactgtgtatttgtcttcctgtatgtaaaatgtaatgccttttttgaacaagttttccaagggatagtcatttgtttacctcttttcaaagaaccagtcttccctttaagtatgttattttaagtggcagccaggttttgccacttgatgtagttaaaatgggcagaagctttgcatttgttcctgcaaattgctgaggacctgcctgtaccctagactgctataggcttctggcaaaacctgttttgtattgtgatatgaggtgacccagtatcaaaaccttatcccctctgtaggtaaagaagatgatattagaaactgaggagatctgggccactgaattatatcatttacaattagcttgagggtagcccagctgcctggccttcaggttgtcagttaatataagaaagttgcatctgctggataatgaacccctgtgacaatgatcatctcctgggtatccatcattgaaaaataaatcctttcagcatggatcagatgctgctggtgtttaactttcatgggctggaccattttctggtccta

SEQ ID NO: 32344 - DNA, 4092 bp, Bovine  19866881521455
  misc_feature (1)..(1): n is a, c, g, or t
ngatttgcacttgttgactagcgaggaagcctgccatctgcttggctcatgaaatcattcagaaagcaaaatgaggtttgtgttacatttgcctcttacagtcatcagtaacctaagatgtttactgagattggggttccttgggtctgatctgccaggctctgattcactctttagttttctcttttgtggagacttcacagcaaacctactggtgccaaaatgatacgtgatacgtttcacatctgtatggagtagtgacatgggatgtgcattccagttactaagaagggtagggaagaaggaacttgaaaacaccatatcttgtttacttaaaaaaacaaatagcatactttccttccagccatgatgttgtaatagggactggatgctatcttcaacataaaaaacaaaacaaaacaaaacccagaaaatcagataaaatatgtgaaacaaagactcccatgaattagccaagggcagtgcaggactgtgatatttgagaaaaaaacagtcaaatcaataaaatgaactccacaatcggctcaatgtaccacccaaaggcagtttccagtttgcagagcccagagatccggctgagtagagaagatagaaatcggaattttgagagagaaagtgcctagaatttgtggaagagaagcccagagaagagagtgtgacccggagaattcctgagatgggcagatgggtcctctccagtggttggctgagtcttgacctgcagaagtctgagaaaaaactccccgaggctggggaaagcccattgacagcaacaagtcaaatatttcccagagctcatgctgggctagaaatagttcatggtcccatcagccagagtggggaagccttgtaagacctgggcattgagtagagggcaaagaagggtgttagcactagactaaaactttgaaaacaagtttcgggaattccttggcagtccaatggttaagattttgcatatccactgccaggtttgatctctggtttggaaactaagatcctgcaagccacatggcatggccaaaaaaaaaaaatagtaataataataaataaaatgaagtttaaaaaaacaaatttcaccaagatgagactgttcctaaaataatttaattgcatgctggaaccgagtccaatacttcttaaatccagtacccaaacattcaaaaatcacaatatccagcatgcaatccaacttggcaagtgtgctggtttcccagggatgctgtaactaaggaacacaaactaggtggcttacagcaacagaaatggattctgtcacagtcttagaggctagaaggatgaaaccaagggctctgcaggactgtcctccctctaggactctgggtagagccctcttcttgccatttctgagcttctggtggtggttgtcaacccctggcactccttggcttttaagtgtagaatcccagcttctgcctctgtcatgtgatgctctccttgtgtgtttctgccctgtcctcttttaaggacaccagtcatattggattaagggtccacccatgtccagtatgaccttatcttaaataattacacccacaaccagcctatttctaaataagatcacactctaaagtacgaggtgtaatgtgctaagcctcttcagtcctgtctgactcttagtgaccctatagaccacaggctgccaggctcctctgtccatgtgaactcttcaggcaagaatattggagtggattgccatgccctcctccaagggattttcccaacccagggaagatccaacccatgtctcttatgtctcctgctttggcaagtgggttctttaccactagtgccacctgggaagctcaccagaggttaggacttcaacttatcttattgggaacaaaattcagccccaaataccagacattcaaagcagtaggaaaataagacctataaccagaagaaaaattcatgagtagacacagagtagaaagtgttgtggtaacggaattagcagacacaggtggtggccccagtggtaaagaactagcctgccaatgcaggagacatgggttcagtctctggatggggaagatcccccggaggaggaaatgtcaacgcactccagtattcttgcctgggaaatcccatggacagatgaacctggcaagatgcaatccatggggttgcagagaattggatatgactgaagcaactgagcatgcagatgctatcacaactataataaaaatgcaccatatgctttattttggatagttttattgctatgcgtttttgggttttttttttggttattttttagataattccactaatctctataatagcataaagaacagagataaatactagaaatcataaagtaactcctaaaaaagatctctatgaaagtgagtgatggatattttcagaactgcttcttcatctctaaaatgggaataatacttcccagataaggtgcaataatcaaataaaatttttataacttacctggtacataatcaactcataataaatagcagcaattcttgttactaaagcctgaggcaatgattaaagcaattataggtcaaacgattacagacctatgatggatgaggctgaacacagtcagtgtaattataatgggcttgattcattgctcttggtaagaactttactaatttggacaagttgggatagggaaaaagtcaaatctgactgatgagccatcttaattacagaatatttttgaagaaatggcttttgattacttttaactgtatgcagtaattagaaccaggctacaaagttttgcctagtatatatccttaagggactggttttaatgattacataaaaatgatttttcattagcataacaaggctttcagctgttgtaaatgagtttattttcataagccatttttctttagcagtagagtaagttctattggaatttgtccatcaatgaccatgtggcaattccctcatggttttgggtatcagtcacaaggctccagctgagggttctagccttggctgttggcacatctacatcctggggagcattcctgtgactgcacagcctccagtgacaccacttctttcctgtggtcctctcacctgtgatggtggctgcttcctgaaatgagtaatctctgggtcatttctgcctgctactttttgctctttcagtgttccaataaccatataaccaagtccttgaattaaattccctctgttttattttttaaaattttaaattggaggataattgctttacaatattgttcatttctgctatacaacaaagtgagtcagtcttgagtatacatatatcccctctctcttgcgcctccaccctcccccatcccactcctctagatcatcacagagcattgagctgagcttcctgtgttatacagcagcttcccaggagctatctattttacacatggtggtatatatattggagaaggcaatggcaacccattccagtactcttgcctggaaaatcccatggacggagaagcctggtaggctgcactccatggggtcgctagagtcggacatgactgagcaacttcactttcacttttcactttcatgcactggagaaggaaatggcaacccactccagtgttcttgcctggagaatcccagggatggtggagcctggtgggctgccatctatggggtcgcacagagtcggacacggctgaagtaacttagcagcagcagtatatatatatgtctgtgctactctctcagttcatcccacctttatcttcccctgggggcttccctggtggctcagatggtaaagaatctacctgcaatacaggagactcagatttgatccctgggttgggaagatcccctggagaagggaacagctacccactccagtattcttgcctggagaattccatgggcagaggagcgtggtgggctatagtccatggggttgtaaagaatctgacatgactgagtggctttcactcactcactcccctttccgctctgtgtacacacgtctgtcttctgctcctgcccagtagggaaatcccctctgttttaaataccggccaactatcccttcca

SEQ ID NO: 32345 - DNA, 1074 bp, Bovine  19866881532499
  misc_feature (1)..(1): n is a, c, g, or t
natttcaacttgatttaaaaacaatgtaagtagctttcacataaggaccctgaaaaagggagaaagggggaaataactgtcccatatcatttccattaactaaaatattttagtttaattataaaagaacaatgaagttttactgtttatttacaaacagggctacatgaattcaggagaaaggggaatttaaaagaatgggctcagagtcacatatttagggaaaagagttagatctgtaaaacatttcttttcacgcttaattctactttaagaaaacattataactacattaacccactaactggcactcacacaatttttagtagaattactgacaccttttctggtttccatttaacttcaaatcctaatcacagaaaagaaaccttactccttccctatcctcccaagcctttccccctagaaactcacttgatgatcatgtaaacaaagacaaacttaatataatctatttatgaatagtatttcaaaaatgagaactatattatagtcacatgcttttacaattggaaagactgcacaacaaatactgaaaatgttagttgtacattatcacagctcagaggaagagagaagacatgctgaagaggcagaggacacggctttaaggaaaacacaagccgagaacaggcatccagggcctttcctgcagtcagagacttctaaagccacagaacatttcacatcaagaaggataaatgaggacatgacctctcagttcctgtccttcaaagcaaaagcaagccaatcctatgacaattcattctttgaagttttactattggttatagatgataggtgtttcgaaactacaaaatctcagcctgaatatttagttcctacaaccttattcactccataagcattcataaaatattacctttttacatttttaaacttgtatacactttcatatttcttttttgtaagtcattcttatttcaatattagcagaaagagcagaagttatgtcacaggtcagtgaattcacacaactcacctgcacacccacagttttaattggtagcaggaaggcattcagtgagtgca

SEQ ID NO: 32346 - DNA, 663 bp, Bovine  19866881884153
  misc_feature (1)..(1): n is a, c, g, or t
ncacagagtcggacatgactgaagcgacttagcaggagcagcaggagaagcgacttagcaggagcagcaggagaagcgacttagcacagcatagcacaagtgagaatagtacacaccaagccctcactgtgagctaaataaaatcattgctttattgccactaataaattttagattaattatccagcagaaatagtaaacatcattaaaggtttatatccttattataaacttttaacaaaatataaactacttagaacagggtttagcatatattagcatttaataagcattaatatttattctccaggttagatactattgcagcactaagtttcaaacttctgcgtatggttcccttttaaatttttgaaaaactaagcatcaacttaaatattttaaatatgcaacctttatcatcttaaatttaaatagtcacaaaagatgccacatccagcatattataagtattgttgtttttaaaataacattgttaacatcactatcttaaatgcacccaatggaacttatatcccacagctatttgatatctatcatcatccatttaaaaaattcatgagcatgctctttagcagttggaaattttacattctccctttttctctctgaacttgtttttccagtcttttcctcagccagaat

SEQ ID NO: 32347 - DNA, 1195 bp, Bovine  19866882038479
  misc_feature (1)..(1): n is a, c, g, or t
ngagatcagtaaatcatcaaggaagcatcatttcaaagaactgttggctaaagggtggcttctttctgtcctgtgaaacaaagcaaaattaaatatgggtaatactctgtttgttttagaattcagatgtttaaaaatgtgtaacaattgcttccaactgagggtatgtcaggattttgctgtagggcaagtccaaatcggtttatttgaaaagcatgtgtgatctataggacatgttctatgtcattctctccaatgatgaataaacagctaatgttaattaagactaatgtctaaaacccttgtttctgccattttcagtattagtttaataggcactgaatggaaacctccaaggtctttctctactcttcgctgaaatttttgttgtacactgtgtttgcagtttaagtttttggttgcactgtgttgtctagcagctaaggattgttggcaatcatctgttaagcgcatacccagggtgtgcaggaagagctactgctgctgctaagtcacttcaatcatgtccaactctgtgcgaccccatagatggcagcccaccagggtctgccgtccctgggattctccaggcaagaacactggagtgggttgccatttccttctccaatgcaggaaagtgaaaagtgaaagtgaagtcactcagttgtgtcccacttgaagcgactccatggactgcagcctaccaggctcctccgtccatggggttttccaggcaagagtactggagtgggttgccattgccttctccgtgcaggaagagcacgacgttattattgaggctataggtactttgtatacaccttcgtctctggagtgccttaactcctgccttgaaaaatgaactcatggtagcatttcattttgtttggtgggactggaggcaaaaattctagcaatttttcatcatagtcctgacagcgttttctaagcctttacataaaggcgagtccctcaaataggcctcaaataggtgatgaataggccacaggcatgtactgtgctggtttgtttgaattgatgtatgatctctactcttttaatccatttaactccaaatttgcagcgactgcataagctttaatctagtgagttgagtccattgtaaatataaactgagagcaggttttcagtgccaccccctagattaatagacattcagaggctaaagtctcta

SEQ ID NO: 32348 - DNA, 1263 bp, Bovine  19866880363375
  misc_feature (1)..(1): n is a, c, g, or t
ntgttttccatggattaagttaaaataaaatgtgctaatagtatctgtggctggtctgtatacaattaattaatttgacgttgttaggaatcagattttacaggccacaaacaccatatatttgagagaaagatgttcatgtttctttttttttttattttattttatttttaaactttacataattgtattagttttgccaaatatcaaaatgaatccaccacaggcatacatgtgttccccatcctgaaccctcctccctcctccctccccacaccatccctctgggtcgtcccagtgcaccagccccaagcatctagtatcgcgcatcgaacctggactggcaactcgtttcttacatgatattctacatgtttcaatgtcactctcccaaatcttcccaccctctccctctcccacagagtccataagactgttctatacatcagtgtctcttttgctgtctcgtacaccaggttattgttaccatctttctaaattccatatatatgcgttagtatactgtatttatgtttttccttctggcttacttcactctgtataatttctgattttcaaccagttgatcagtctcttggcttaaaaaaaaatttttccccccaggaaagggacagcaattgaattgtattgtgttggtggtgttctagtttttacaaaatcaagctagtatgcaggaatagtaactttctttcagctgaaagtctggtatagattttaacatttggacattggagccccttcaaatcccatctggctgttaatcagtgaaggatgaaggatttacaccaagaacctcaattccaaggtgtcattaagttctatagggtcaataattcctgaaagtgaatttaaacaacaaagaccaataattctatagacattgctagcctgcttctttggagaaaaaaaagaggttgagaggaggaagggcaggggcttatgtatgagagatcagaaaaatggttagaaaagaagaaacagtccccaccctccatgaattctagactttcctttgagctcagaaggtgcccacttttctgtggtaaaaaatgctttcaaatatgtggttgtattttgggatcagtcccaggtagacaggtttcttcctttccaatgggtctggtcctgagattagttaacacccctttatgatgtcattcagctccctagaaaggagttggggcagagaaatgaacacccagtgtagtgagagagcggacacattgcatgcctcagttacat

SEQ ID NO: 32349 - DNA, 2178 bp, Bovine  19866880374412
  misc_feature (1)..(1): n is a, c, g, or t
ntattaacagaatgtatcaagttgcttgtgaggcttcattcacagtaatcaggaaaagaagtcaagtagacacatttatcatggtgacctcggagtctgtaggtgaggtgctccaaagggagaagatacctttgattaagttaagacaaactataatggatgagagttctgctcaagtccaataaatcaccagagccttcccaggctagcagggataggaatcattggtaaattaaaacttgctgcaatggctatgctgatgcctttagtgtgggctctgcctggacaactctgcgaaggaaagctggaaaaggaagtctaaatagtcttgagaggatctctgtgattgatgactataaaatgtattacccagtggactttttcagggctatactttaataaacctctgtcccttttaagtgtgggatatggtgaaaggtcactgggctcaattttagcaatcaaactggcaggctgaatggaagtggtgttgggaccatttgtgtatgtgggatcagtctctcctctgagggtctgagagtcagaaggtgtcattggaaataagaaagtgtgagtctttttgttttggatggtctctgtgcctataaatttttgaacttttttccctgggattctgaggccatgaataaaatatgagtatgttctatttctttttttacttaatgagagattgcctcggatggtaggccagtccctgcacagagaaagccacacatggatttattaactcttcggaaatgtttgttcggtgctgagtaatgaggaggtttgccagggcagcaagataaaaggcttccccactttgtgtttatcctctgggtaatgaaaaaacaaattggtgattttgtatttttcctgttggaaattcgtaaggtcaccggaggaaaacagagaaggttaactggcatgaacatttgcctgtaagcatggtgtcaggaaagaaaggtcacaaatggatgaaatacccccacaccacaaccagtgccactgcaaatgcagagccctaggacaagaaatttcattcaatgaaagcagaattttgggaatagcactgactggtatacaaagaatccttcattttcagcatgcatgcactgggggggaaaaaaaaaaaccttttgtaaaccagtaggataatatcttcctttcaaaagtttttcactttttgccatgttccattatctcccactctgttggcgtttttttccttcctgcctttgtgtcctgttcctctactccttttgcttttatatctctcactgcggagaaaagctacgtgctgacggtcaaagggaggagaagctggtaaaactgaagctgataatctccgcagagttcaggacattcagacctgccttaagcttcatctgataacttttcttaacgtggagcaagataagtcctttgtttcctttgtgagactcatgaggaaccagagaaatgcgattgctggcatgtttgcagagaatctcagttgaatattttgctgcaaagttacatctgtcattccctttggatgaatatatcagtttggctaaggattctgttaagttagaaggcaaaggccatggtcatttcttaccagctattttattctagtcctttaggaatccctagtctgtttcatgacaatctagatgaggagaaaatgggaagaagaaaactcttctggctgactgttccccagaatataaaataatccccatccttgatggggacctgtcaccaggataggaaaactgaaggaagaatgagagaaagaaagacaatggaagatggaagagggaaaactggcaggaggaatggaaagatgaggggaataaaggaccagtcttaaaaaattaggaaaattacagaaaagagaaagtaactaggaaaaactgaactagaaagtgaagtaggtataagctagggtagacaaaggtcttgggaagtaagttcatccagaaaacaataatgttggatttcagttactccattagtttcttctgtccttcccaagtggaaaattgcagggttctgactggaaaaataacacctcttcattctctacaggaaggacaagaagactgggaggtgctcagaggaaaaggtctgtgcatgtgttgactctcagctttaaagctttaagaacacgatacggtcacagaatcatca

SEQ ID NO: 32350 - DNA, 2076 bp, Bovine  19866880491210
  misc_feature (1)..(1): n is a, c, g, or t
naattttctgtaacctgtgtatggtaaatggcgtgctgagtagaaatggatgaagaaactagataatgcccagagaagaaacaagtcaaaagaagtgacaggtgaccttaagtatttaggggattgattcaaaggataggcaacagactgactttacattgttctgaatatgggactagatgggagattggaattgatacgtatgcactactctatatatagataactaataagaacctgctgtatagcacagggaactctactcaagattctgtaatgaccaactggaaaaagaatctaaaaaagaatgaatatatgtataactgattcactttgctatacagcagaaactaaccaacattgtaaatccacttcaattaaaaaaaaaatgggaatagaagcaggagtgatagctttttaaaaaggagatttcagctcaagacagggaattttcgaggtagatgaacctaaagcctattttacagagtgaagtaaatcagaaaaacaaatatcatatattaacatgtacgtgtgtgtatatatatatatatgaaacctagaaagatggtatggatgaacaactggacagcaatagagaaacagacacagtggacagacttgtggagacagtgggggaagaagagggtgggatgaattgggagagtagcattgaagcataaaaattaccatacgtaaaatagatagctagtggatattggctgaatgacacaaggagctccaacctggcgcgctgggaaacctctgtacactttgtactacacaacaaaatgaatcatctagacatatgcacgtgcgttttggtgtacatgtgtcaagtcgtttcagtcctgtctgactctttgcaaccttatggactgtagcctgccgggctcgtctgtccatgggattctccaggcaagaatactggagtggatgccatgccctcctccagggaatctctctgacccagggatcaaacccacgtcttgtctcttatgcctcctggattggcaggcaggttctttaccactagcaccacatagaaagcccctacttatacatatattccctctcttgaacttccttcctgttcaggccaacacagtacattaaatagagttccatacattatacagtatgttatcagtccattctgaaggagatcagccctgggatttctttggaaggaatgatgctaaagctgaaactccagtactttggctacctcatacgaagagttgactcattggaaaagactctgatgctgggagggattgggggcagggacgacagaggatgagatggctggatggcatcactgactcgatggacgtgagtctgagtgaactctgggagttggtgatggacagggaggcctggcgtgctgcgattcatggggtcgcaaagagtcagacacgactgagtgactgaactgaactgaactttatacatatatgctatacttcaaaaaaagccccggagccagtatatttccaatgagagtatatctgtctttatggtttcgtacaattttgcaactctagaagtatctctttacctggtaagttttatagggaaagaaaaagaaactttttctatttatcaaccatattcaagaaatgttttcctggtctgtaatttcacttttgttttttaaaatggcaaccccttggagattcgcctgtctaaatccattttcttgtcaggattggagatgacaggttattctaatatctaaatattaatttctatggcatatctatgtatttcatgggctaatcttctgtgaattttctggatttcgattagcttgtcctaaactcctggcaagctaaatttctctaacagttttcaattcgttgcattaaatgcctgttcagccttggaagatatattgattttttttttctcagcaaagtgacaaataccattttcatgactataatagagattgattacattttatggcacacagagagaatgctgatcttagtgagacaacattggggcttacaaaaatgaaaaaatcatttgaattaataatgaagttaatgaattcattggttgtagatgaag

SEQ ID NO: 32351 - DNA, 707 bp, Bovine  19866880524109
  misc_feature (1)..(1): n is a, c, g, or t
naggaggaagggaaggaaagagcacacagtctctctttaagaagacatagggtagatggcacaccctgcttcctctcaccacccattgtccttggccacaccctttacaaaagaggccgaaacaggaagtcattattctaagcagccatggggccatctatcacggagtgattatgttagagcaggagaaaaggagaatggattttaaaggagaatcagcaaactcagccacactattcctgaataaaacaattacttttatgtgttatttcccaccttgggataactattctggtatactgtacattttccaaatgttactttttctatcagaaggagaataaaaaagcaaaacagttttcaactatttctagtattcaagagatattgggcattgtatttggtgctttcacatttgttatctcctttaattctcacaacaaggtattgtcctcattcggggaaattaagattcacagcactgatatgagaaatgggagtatttaaagcttaagcctctcctaattttctcccctatgaaacgtatttagctaagttcttttcctccttagaatctaatcaatgaccccctattcaactctctccatgaccaaaacctttttctgaagcaccagtaaataagtcaggattctgctgtgcatctgtagaaaggtaattaccaacatttgaaatgagaaatagaaatt

SEQ ID NO: 32352 - DNA, 1955 bp, Bovine  19866880597717
  misc_feature (1)..(1): n is a, c, g, or t
natctgttttaaatatttacattgccttaaaatgttgaaatacttaacttggggatcagttgctttcccataaaatgttgtaactgtgtattatatttccaactaaaaatatagaggaggatttgtaaaatatttaggttgaagaaaccatagcacaaacctaatttataaaatgttataaataataatgaagcagttttctcattagaagctgtttcctcaaataaaggcatacaaagtagtttatttctgtagtccttttgaaaaaaaaaaatcagttcatcagcatatctgaaatccatacactgaactggcagaaaatcaaaatattaatttatgtgggagaggaaaacccctaaagattttcatttaaatatctatatcttggactcattttaggttctgatttaaaatcaggggttcaatatttcacggccgattataaggcagaatccagagaattagatgagacattttctgactcgtattatctccttgatgaaccaaaaccttactttcagattcattttccgtatgatttccctgttggatacgtcctggatgctgcggtgagaagccagcaggaaaaccccagggaagaggtcagaaacgatgctatcagagacagaaatgtcaagggacaaggactgaaaattggaaacaatgagagagggagagggagggagggagagagggagaggaaaaaaagagggcgcgagactgagagaggatttgtatgcaagggagcaccatgtaagaaataatacatggagtactgccaccaacatgatcgttttggttcctcttatttaaaccctctttaagccttcacttgtaattaataagaactgctatttaaaaaaatttcagaaggacttctgtttagtgttgaaatataaaagaaaaaatattggcctttcatcatctccaaaaagaaaaagaaaaaaaaaaatcccacacgatttatgtacatactttgtaatcaaagccccttttatgtctcttggtgctgatcataaacagaagccaaatctgatcgccccaaataataaaacagtggagaaaaagataatgcacccttaccatttaaacacttggacctcatcattaaaagtggtccaagtaagtgctatgaaattaatcctaagaatgtaggacactgaaatttgtatagtaggggctggttttcagtatagaagcaactactgagccatcagtaatagtacactttttatggttgttttctcaaaagaggtgctggcctacagagctaccatgctggccaccaactctccctaacccattctcttgggactaatgctgttttctatgtttgtttgtttgtttgttttggtaaaagtggaaaaaacacaaattatatatatcagtgctagtattcaattgagaaggttacttagcagatagtagagttctgatgaaagtgacaacttatcctgagaggaagaaattagctgtaaatttggtgaagaaggcagctgaatttttatccagaaaggccaattgacatatacaacctgaagcataatagcaaacatgtgatggagagccagctgaaacttaataagtttccccactgaagtgcatttgggaggttgttgggggcgggggttcaaatagagataaacagcaatccaagacgggggaagcatccttagaggcaatcattttttaaacaaaaaacataaaggcttatgtatacaactggtatttacatgaattcctcccactaatgcctgggactttggaagacacaccaagagataggaggtaagcacctgcctgtgcagatattgtcaacaaagaggatttggaattctgatctattatgtaaaagcctataactggtgacttttacctggggatgtggggaagacgggcatctagctgacctctaaatgctagtgtgttcagggcttaatcctagcctccttctt

SEQ ID NO: 32353 - DNA, 1486 bp, Bovine  19866880614831
  misc_feature (1)..(1): n is a, c, g, or t
ngtggccttttgctacaaattcttgcttcctaatggtgatgcagaaagcgaggaaaacggtgtttggaaaaggttttgtttcgccttctaacagatgtatggagctgcccttctcaaatgaaaaaacaagcaattcccccacaaataccaccacctgttgttataaataaatccaagctgtaaaatggaacacactcttaatggcaaaatcattacaggcatcctacccccctcttgccaacccttcattatagcctcttaacaacttgtttctcagtcatgtacctttttaagctttcgaccggccatcaggccccatccctaaccaagaaagatggcctgtggatttgtggctaaaaataaaaagttaccaacctcagggagaatgatcacacatccctttgcacagtttaagcggctagaaactggctacgtgccactccatatttagggttctcttaaaatcttaatccagacatccagtggcgtatttcacagctaatgaacctaaccttcaagtaggagcataaaatcctaattaaatcaggacaacgtgaggttattggcaggctgtttataattcggcagagtcttgtttctatgagtagttataggaaaattataaagcattagaaccagaatgttgtatcctttaattactgtctccaaactcctttagtctacagactgtgtcactctgtctataaacattgattgtttagcaggcccaggatattatacttactaaaatattgtgtttctcacctgaaactcagcttcttgcctccaatctcctgggagaagtttcatatgaattatttcttctgatgaaagaggtcttgaggttataaatttgggggaaaagctttgaaaacaaaaaggttcagagattttctgtgtacaggaaattcaaatagggaaaggaagagaaaatattagagatgaatgctaacttatttttttcttccaaggaaaggttggagggagggggaatgttcctgcaaagattgcaaaactccatttcataaaagatttattagcaatgacagagggagattgctgagtggaaccctgataaatgccttgccttttttcactgctttaaaattatgggttctgtccataaagtactgattaattcatattcattcaatgacatactctctttttctcccccaagcaaagattgtaagcattttacttcaacaaataaagaactctgggtgggatgcatactaattcatttagctctggaattcgcactacaatttatgcagctaatcacagcaaagcaggagagattcttttcttttcctgtgacaagtcctgcctacctttcagcattttttacccccaaaggtattattaatctctaaacttcaaaaaattgaagacttatctcagaccctttaaaacagagtggcatcatacgtagcaactcccaaagaggagaagttgctttgcctttcgaaaagattgactgtag

SEQ ID NO: 32354 - DNA, 1651 bp, Bovine  19866880679137
  misc_feature (1)..(1): n is a, c, g, or t
ntcatagcagagtctaagagtcatactccaaaaccctcccttaatgtctctgtcagttttctctatggaatttgggaaagaccttatgcccttgtttttttctcacatcattgtccctggccctgatcttcatttggttgctattttacaaaacatgctgatgaggcatgagacactatcctttgttggagatggtgatttgcttttctttctcctctctgcaggtccaagttcttcctttccttcaagctccaaatcagtttttaccttccgtatgcagtcttccttgtctttctttggctgaattcctgtagtacttaggatctatattcgaaaacttgattaccatcactactgtcttttccccttctagtaatagtgttagttgtgcaaactacgtctttaaagagcctttctgttttttgatggatataaggacatttgtgtctttcctttactgcctgcaggacccagattagttctgaaaatacaggagggactgaacacattttttgtcactgattgatttattgagacttcagaatgtcatggatgttaaaccaaacacgggcaagtaattttgcaattctaaataatatgaaataattcaatggggacttggagttgggggtggaaaggtagattttgagagaagtcaggaggaaaaaaaaagtatttggcttgaactatgatgaatggccaggagaaatatcaataacctcagatatgcagatgatataacccttatggcagaaagcaaagaggaactgaagagcttcttgatgaaagtgaaagaggagagtgaaaagctgggttaaaactcaacatttaaaaaaggaagatcatggcatccagtcatcacttcatggcaaacagatggggaaacaatggaaacaatgagagactttattttcttgggctccaaaatcactgcagatggtgactgcagccatgaaattaaaagacacttgctccttggaagaaaagctgtaacaaacctagacagcatattaaaaagcagagacgttactttactgacaaagggctgtctagtcaaagctatggtttttccagtagtcatgtatgggtgtaagagttggaccaaaaagaaggctgagtgcctaagaattgatgcttttgaactgtggtgttggagatgactcttgagagtcccttggaccacaaggagatcaaaccagtgaattgtaaaggaaatcagtcctgaatattcatttgaaggactgatgctgaagctgaaactccaatagtttggccaactgatgcgaagaactgactcattggaaaagacactgatgctgggcaagattgaaggcaggaggagaaggtgacaacagaagatgagatggttggatggcatcaccgactcaatggacatgagtgtgagcaggctccaggagttggtgatggacagggaggcctggcatgctgcagtccatggggttgcagagttggacacgactgagcgactgaactgaactgaactgatgatgaatggataaaggcagccctgtgtggaagagatgatgggttctctacaaacaatgctagagtcctagttttgggttttcattctatcactaccggttgtgtaacgtggagaaaaccgtgtaacctctctggacccctgttt

SEQ ID NO: 32355 - DNA, 2046 bp, Bovine  19866880682760
  misc_feature (1)..(1): n is a, c, g, or t
ngtgtggattgattatatccttatctggaggcttggttggggaaagctctgtttccacacaccctcagattgttcagttcagttcagtttagtcgctcagttgtgtccgactctttgtgaccccgtgaatcgcagcacgccaggcctccctgtccatcaccaactctcagagttcattcaaactcatgtccatcgagtcggtgatgccatccatccatctcatcctccgtcatccccttttcctcctgccccccaaatcccctccagcatcagattgttagcagaattcatttccttgcagctgtagaactaaaatccccattggcttgctggctgtcactggggactgctctcagctcttagaggtggccctcaggtccttcaccagttgggattaaagccatggcttgcagatggagtcctgtgaagcactgcttccaggggcttctcccctgatcttcacacccaaaactctggttgtataaacctctgattctctctattaaaatgtttctatttgtgtaccttagagttgcttctgttttcttgcccaaactctgatacagttgttttgcaagtaataaggaaagagggctgtcaagtagacaatcaacattgttggccatgtttctgatataagcacaccacatacaccattgaagacttgattagttgacagtgagtaggcaaatcagattaaaagtgttttgaatgtctcaaaattatgtaacatcatttaaggtgcagtgatcaatccatcagtaaaacaggggtagaagataaggattatattttataagaatgaaatatctgaccagaatcagcaaaagtttcagagtttggctttagaaataaagttaagacaatggagtaagagtttgattaaattcacagctggaatcaggtatatcacattaatattaatagcaaaaaagtcaggaaagaaaatacttccaaaggggaaagtaggacatttgaagttttggggggaatttctacttttgaaagaaatggttctcagttggtgaaaaagtcagtagacctctctacatagctgaggagggtagccagtcctgctgcttttgatgaattatttgaagactcatccacttagaaaaaaatctgtgtgcatttaaaataaatcattaatgataaaattgattggagcttgtgaaaaaccaaacaaacaggtattggcagttccttttgaaatatttgttctgaagttcttaaggaattgtgccaagttgggtttttagtcccgtgtaactgaacttactctagccagtttcaataggaacataacttattaaagtctgattgatagctcagagaaactctgagggggtcagagttagacttggtagcctcacaaaggtcaaagtcaaagtgaagtcgctcagtcgtgtccgactctttgcggccccatggactgcagcctcccaggcttctccatccatgggattttccaggcaagagtactggagtgggttgccattttcttttccaggggatcttcctgactcagggattgaacccaggtctcccaaattgcaggtggacgctttaccctctaagccaccagtggtagcctcacagccagaaacaaaagactacacggaagactgcttcacagcatcagccactgaagaccctgctggagcagccacactgggacatctgcagccttcacgctggccacctccccctctcccagaataatcctgtacactacctgttgcctcctattgttctgcaagttgaatttacatatgggtgtatctgatcagcaaagcctatgtcacacgtcggcaagcctagctgcaagagagggccaagaaagtgagtttctgatttctgcctttgagagtggtgctcataatgtggataaaaagccaaacctgcgaaaaatgtaaaatagatgctgggctgccctgaagagggcatatgccaagtggaaagaggacagacagggctaagagccgtggactttggaatcagatggaccttagtccaagtggagttgcacagcttcccctaagttca

SEQ ID NO: 32356 - DNA, 1288 bp, Bovine  19866880754225
  misc_feature (1)..(1): n is a, c, g, or t
ncagtatgtagtccactttgtcacacccccagagaatgtataaatgacaaagctttttctatttgaaggcagacttcaacgaatttctgagacaggaaattaaaggtttgacttaagactgccaacagaagaagaaactctattcctacaattcctacaactctattcctataaaagctgtattcctacaatgcaattattctaaataaatttataattatcccttcttaaaggtttatctttatcatctcttactaaccagaatgcaagtgtgaattcaggcaattacaaagatagctgttgagacaaagtaatgatggtctcctggttaaaatcctattcaaatgatgaactttctgagaactcattttactacaaaaactcaagaaaattaagccaacaagtgtaggtttcctccacttatgctgccttacacaatgatgaatctagaagggaaggcaagctgatttctgtctaaatatttgtcttcttttagagctgacttagaataaattaagtttttctgcctaaaagcgccaagatagaagcaaaatagaaacaatgttacaaatcttgattatttagtctctccttccctatataattacatgatcactttcagacttcaatattttgccttactgtccttctcatacccctggatcaatttctaacttaggataatttaactaatacctctactctattcctgcttcaatgctattcaatgatactcaaaaaacttacactactgggcaggttgatgccactgcaaagggataactttagagctcctttgcttacacttattcatctctctgtcctagtcctccaggcaggctgtgatgtatcttttctactcttcctctcttgtcaactgtcagctgactaccttgcttcctaccttctaaagaatgaaagagccaaagaggtagaagcctcttccttttaccatctgacaattgtattaagcttcttccttcctctctgggcggagagaggttctttttccaagatcccttttccgggtggactgtatccttgtccatctccaccaggagttgctccatcaggtaatctgcttctgttctgtttctctttcattacaaacatcactcccaacaaaatgttctcaaatcacttactttttcaagagccttcctttgatcccagcagtactggtagctaccattctatttccctcctttccttcaataccaaatgcgtagaaaatgtaggtggcctgcctttacgactcactttctcaagttatatttatattccaccc

SEQ ID NO: 32357 - DNA, 1237 bp, Bovine  19866880795370
  misc_feature (1)..(1): n is a, c, g, or t
ntctctggcaggggcaccatgctctgactagcaaagtgttaacagaatctcaggtcacagatgtggtgtcagatagcagagctttgatagaagggagaattatgtatgaagatatacaaatgcattcaactcatatttaccctcattagtgttaggaggaaattacccctgcatcttttggatctggaatgccttgtataaacaaccaaaaaactcccactttttatagctgataacttatgtggacctgttcagatctgtattatgatggcttagcaattcctgagcatgtatcagtggagggaaggaccatgctgagtgggagggggaggcgagcttggcatgcatatcggccaaagaccatttgtaaagtgcataatccacagtgcatagttgagagctgggttttgtaatggatagttctctggttgagctagagaaaggaagttagcacagggctcttaaaggtccctgcactgcctgctcctccacaccccaaccttctgtgccacgctgctgtgcttagccgcccagtcatgtcctactctttgcgaccctatggactatagcccaccagggtcctctgtgcatgggattttccaggcaagaataccttcttctagagtttcccaaaaggagggaaatcaagtaagtaggaagaaatagaaaatgacaacaggagaatgaaagtcaagagactgtttgggtttctatttttatttttggaaggagagaaaaataaattacctaagatgaatcaaggagaaaaacattaaaaaataaaagagatgagtgatgaagagaggaaggaaatctctttggtagataaaacagatttgccaaatatattacattcattaagatttttctctgcttacaacgtgtgcttttcagaggcttttcttagcattaacggacgctctgggagagaagaaagttggcagagagaagcctagcaaatatataaataagctttggagctttcagaagtttcatttcccataatagaacgttctccagcctgggcaaactttttcttacttaaacaaatgctttgaaagacaaagatttcatattgtcagtggaacattcagactaataattgcctctgttctttctgccttgaagtctcaacagccagcagatttatgattcacttttggcaataagctccttcaaataaatatcactttcccaggctgcaaattgggtttctaaatacacagagatcaactcc

SEQ ID NO: 32358 - DNA, 1933 bp, Bovine  19866880795686
  misc_feature (1)..(1): n is a, c, g, or t
nattacaatgactcattcacagatatttaaattcaaaaccagagtgaatttttttttactttgtttatgaaaattgaaacaagctagggcattggtacacaggccaattgatcatctgtctgttcttagctttttgtctaacagtgatcaaccaatgatttcatcagaaaatgagcagtttggttagaccaatcaacaaagcctaaaatatactctgaggacacaggtctcaggtatttcttttcaaagcaatatagagtaataatacttcaatatgactacaaggaacttcaatattaaactctggccttgcttgggaacctacctccaagcagtcctctccctatttctttgagattcatattggacatattccagctcattttccagagccatgtccagcagccagagatggggagcatattgtaagactgcatcttttttctctgagtgtgaatttacactttaggatcactttgtcctcctggaagatgaaattgatgatgataacctttattgagcacttactgtatgccaggcacagaactaagaaatttttattattaatgtttaatcttgatgacaaccctatgatacagatattattgttgccatttccatttaacagataaggagaaatagaaacttaaaagcctcagccttctctgagatcatacccttattaaatgagataatcagaaccacaacccagatttggctgagtccagaatatatgctcataaccactataaaaagtgaaagtaaaaaagtaaaagtgaagtcactcagtcgtgtccaactcttagcgaccccatggactgcagcccaccaggctcctccatccatgggattttccaggcaagagtactggagtggggtgccattgccttctctgttaacagcggctaggcatattatatttacttagagctggtatacttgtgacagccttagtgccctcggactcggcgtgcttggccagctccccaggtagcagcaagcgcacggtggtctggatctccctggatgtgatagtcgagcgcttgttgtaatgcaccaggcgcgatgtcttgccagtgatgcgctcgaaaatgtcgttgaggaaggagttcatgattcccaaggccttggacgagatgccggtgtccggatggacttgcttcagcaccttgtacacatacacagagtagctctccttgcggctgcgcttgcgcttcttgctgtccttcttctgggccttggtcacagcttttttagagccctttttaggggcaggagcagacttagccggttcaggcatgtctataataacaacacccaacaacacagaaaggtcttgaaatgcctgctggtaaatagaatctcgtcttttataggcggtctatgcaaataaggtggttacgaatattcatacctgatttgacaaggcattcgtgacgagattatgtaaacttacctccaccagatctcttttcttattggttagacacaaaacagaaggttttaaccaatcctatctcgcatgcggcaattccacccagcactataactgccatcttgttgctgcttatagatcactttttttctgcttttcctgtggcggttctgattttgctcaacgcttgtcatgtctgggcgagggaagcaaggaggaaaagcccgagcaaaagcgaagacccgctcttcgcgggccggacttcagttccccgtgggccgagttcaccggctgcttcgcaagggtaactactccgagcggggtcggtgccggggcccccggtgtacctggcggcggtgttggagtacctgaccgccgagattctagagctggcaggcaatgcggcccgggacaacaagaagacccgtattatcccgcgtcacctacagctggccatccgcaacgacgaggagctcaacaagctgctgggtcgtgtga

SEQ ID NO: 32359 - DNA, 2064 bp, Bovine  19866880811237
  misc_feature (1)..(1): n is a, c, g, or t
ntagagataataaagctagctggaagaaatgactgtttacctgcaaataaacaacaatcagactgacaacaggccttgtcatccacaaaaacaggttccagaaatcaaaggagaaacatactcagtgttctaagtaaaataactgtcaaccttgaatcatctgcccagtgaaactaacattcaaaagagtgagaataaaataaaggcattttcagacatacaaagaataaaggagttcgctacttacagactactctgcccaccactgaaagaaccactaaaagctaaacctgaccaaaaagcaaagatagaattacaacagaatataagaaacagtggtttaaaaatagaacttggttttcactttcatatctaaataaatatagactgtataaaataataataaagtaactaatttgaggatgatctaaaaccacagtggagctaaaataagagactaacaataataatggaagataggatgggttcagaggaaaactaaagcattctaaggttcttgctttttttttttttttcaggaaaatgaaggggggaaattaacccaatagcacaagagagaaaggattatgccatagttgtgtttttatgagtgggaaaaagataattaagattttcttttcataaagtttcaagcaataagatttaatccttctcaaatgagattaatataaatcactttaaaggtgtttttcaaatactctttcctttaattagaagtaactaccatttttctagaaattcagacaatgactttgatccagaactgagaaaagttacctgtttgtgacccagttcatgcagaattaatgttgacattcagttcccaagattaatatttgtttctttgagtttctatgcgctctaaaatccccatcaaagtagataaattatctccgtaattccacatactttacaaattaaaaataaaaatattttccatgagaactgaaagtcctaaaaactcctcagaaatagtatcttttatattctcctaaaaaacttctcaagtatcccttcattcttcctgggagaaaaatccatagacaattgatgttaaccataatttatgaataaataattatcaggctccatgctgccttataacaaaggaatcaacctggaaatcaacctcagagtctacattcacttaaggggaaaaagtccatctataaaatgatattttaaggatttattgcactaactagccactgtcgcctcaaagaatcatttttacttgaacacaagtgctaaaaacttaaccgcttttttatttagtgcttttgagagactaaattgcaactcacaaagacagttattaaggtctgaatggaaaattatttagattaaatatcatgttcacattcaagaatcattgtaattggtccattaaacagaagcattgtaatggggtctatatttttatttgctccattacttaaaactaaatagcagttattatgtatattacagtggttaaagattctaccatttacattgttgatgttgaaatttagctttgtatcaactcattggcaatttcttctatttgtttattaaacaatagatgataggttagctgaattctctgcctttatatcaagttttttaaaataaagaatacaatcaacaaggtatttatataagtcaaaatataatggttattagcaataacaaacatgtccaaaatctcaacaaaaacaagggtttatttcttctttgtactatatatccattgctgcttggccatggatctgctccatgtcaatttcactgtaggaccggaaaactccctgaggcaacatagatcttcatagtggagagaaaaaacaaaaaaacaaggcaaactatgagacggttacataagcttctattagaagtgcctcacatcacctctattcttattttattggccagagcaagtcacatgaccaagcctcccttaacaagaaaaaaactgtgtaatcctcccaaagaatgacaccacaggaagggcatcaaaatatatggtaagcagtcatacaatacatcacagtgaccatgcca

SEQ ID NO: 32360 - DNA, 945 bp, Bovine  19866880862897
  misc_feature (1)..(1): n is a, c, g, or t
ntaacgagtcctgtttgggcactgagagttaagatgagagggatttacttgtcaatttcttttcattaacttaattttagtaaaattaaggctttctaggcattttcataaagttgaccttatatttattcacctaaaaacagagaaggtagaataaagactgaataaaacagtaatatttctatacagagtgcccagacctctggtgtttgttgtgtccttgctcataaagtataattgtcagtaattttaccagttctcccttcacttctggaagcaaggcaaagaggaattaaaacagaaaaggaaacactgtgataaagggtattcaatttgaatttctgctggcctcactctaaatccaaagataaacacagaaaaatagatagctcctaataatatcaaaagacgatctagaaactctattcgcctaggtattggtttaattttgatcccaatgttgatatttctgactataatattacagtaggccatggtggttatgctctatgtctatatggatatattgcctcgccaaggaaaggaaatcccacagggcatcagtggggttccaattaagtaataataaggattgctgaatctcaacaataaggggagattgcctctgtatcacagaaggacagataggggcccaccattcagtctacagatttaaagccgatgctgccttttccctcccttcagcagtgatggaaggatgaactgcgtgcagcggatcatttcagaacaatctattcttgtttgtttatattattttgagtttgtttgcaataaaggtgatagtgggactcggagggtccttgtgcaaaacagaaagggtttcatgaaagaactctgaactgggatcacatgcatattccagagacctcagagggagaaagggatcttgaaattatatttctgtctaaggctttactgcctttc

SEQ ID NO: 32361 - DNA, 1444 bp, Bovine  19866880884479
  misc_feature (1)..(1): n is a, c, g, or t
ncaatagccccaaaaaaataaataaataaataaaaaataaagtctacttctatcaacataaaaataaataaataaattagatttcaaccaattggaactttgtctgtaaatgaggtcataataaataaaatactctagattctcttggaggtgaagcagcagtttcatcatcttttatcagaggcagtcttctataagccttcttgatgagttttgtgaaaacaaaatccatgtggactggaatttctcaaacttagtttcaagttaaaattaaaggtaaacatttactgagagttaatgtcttgcaaaaaaaattaaaaaaaaaacctttcagagtctttcacgattcaagaaaaattggcatgctttctgaaattcaaactttcatgcattctcctccccaagccacggtgatgcagcttgcctgaaaagaactgacttaggaataatatttaagcaatcaaattggtaaccttttcaatgctggcaaatcagtttagcaaatcctgtggcaggtgtcatgtgtgacggttgaggcgtctaggtgggacatcagctaatggtcatatctgtcactgacccatcattccagtgggagagaaactagagtcactgttccacagctctacagacacactccactgaagttaagcccgccatatcaattatattttttaaaaagttatagcttattttatcttatctactcaccaataaaaatattgtaaaaagatgtaaaaaacagaacaaaactacctgttgtaaaagggactttgcggggttgagaaggtagaataataatgttatgattaatgaaggactgatatatatatataaaatctagtagtgccagttgttccaaagtcacaatctatgaacttaaacactgttgacagaaatgttcccgcaagagcttaattttggcacgctgcatttaccatgtataagagacaaagcatttgtctccatattggcttcattctcacagaaggtccctagagagcttcctaccttctagcaatgtttcaaaatttgaatggtggcaggtccagacactgtgaaatctattcagtattttggtctccaccaaatcttatgagtgttttgattgtatgctgccgtatacgctgacactgattctcatcttggaattgctcagacctgagagaacttcttcccaagaagccttctactttttaatgtaatgattaaatctaaagtcagtttgaattcctgtggggtgtcttttgcaggatgaagctgccttgcaaatttaaggtgaattacctctcttagccatgaaagcagttcaaggcaatgtaaaagaggaacagcattttatccagccattctccccatatttaccaggtgagatcaattatttcatccccataggggcaaagtgaggaaaggagctgaaagagtcctccccctcatcatggaa

SEQ ID NO: 32362 - DNA, 1592 bp, Bovine  19866880900084
  misc_feature (1)..(1): n is a, c, g, or t
naacagccgatcgttctcccaccagactgacttcacttgagggtcatccttattccccacacctagcattttgcctaacccattgcacagaccttattcactgatgacaaaaggaatgaactacttaagaaatctaaacatatattcgttatttgtatataatgtgcagacttgatccagagctgtcgttttgatactgtactcatcataaaacacgttcttctagtcctgttgtctatctttcatgtgtgttttaaggcaagcaaagagcttagcaatttctctcccttcccccaccacagttcacttttgcatgaatgatttgaaatgcccatgtttaaaatcatcactgtgtcagaatgaagttgaaatttcgccacaattttcagtgaaaagcaaaacagaagccaaaacataccttcctcaacccaaccgccttttgctttttgatcagtttgaagggctttgttctctctaatacaagtgttttctgttcatgcatagcaaagacataatctaatctccaaggtttatttgccaaaagaattgctagatgtgggaaggagctagggtttgaatttttattaatttgggatgcacgtgcacctgagaattggtgtgcgtgtctctcagaggagtcttttcaaaataaaagcataactaaggggaagttcatagacattttccaacctgtgaacttacgaagtttggttagccaaacactcacattgtgaagactgtgaatggaatagaagcaaacccagtttcaaggtaaatcttcatgctttgaaatgctcaatgccttccttttagagagaacaacagatgctttcagctattttataaattttgagaataccatggggtgtgagctctctactctctcttgtgattggccaattcctctctccttcagctatgtctattctgtggtctagtttaacaaacaaaatgctgcactgctttcaaagaagggacaaaacatgctactgtattttccaatactctaatatcaaggcaagtaaccacagggatcatgccctagaatgttctgcaaatgagatgaaacaataccttccacattcattaaaaaaatcttctcctgcttctggttaacagtaaaaccaacatctcttattctttttggtggctgtatgatttacacaagtctgaagccaaaaaagcattctacaagaaaagaaaggcatacaccaaccatgtttcccaggggatcaagcacattaaaatcaagaggcattctcactgtaggatttaattgaactatttttcagtagctggtatttagtttgctttatttatatttaatgcaactgtaagtgggaagactgtgagttgggtctctgggctaatcatgctgaagtgttcaggatgaaaagggtggggcggggtgggggtggctttctatagtggagttctgtggtcaggtcagcactgcgttgttgagtttctgaggttgaggatggactgtgtcagtgtacacttttacagataagggaaagaaaattacacctggtggcaacaagaagagtcaagagtaatttgcagtgagcgagcaaaaggaaatcctgtag

SEQ ID NO: 32363 - DNA, 1124 bp, Bovine  19866880951246
  misc_feature (1)..(1): n is a, c, g, or t
nttatgaatcaaagcctgggtatggatgttgtcctattcaatcgcactgaataagaaatcatgctctatgtgttttggggtttgggctctgggcttatttaaactgcacagatgttgtaggttcctaaattaacagtggtctccagggagatggtcatcaggctgcatgcatatactgaaaaaggcatggctagaatctcgagccacaccattcagaaagcacttttgctactgtttcctcttctctaataaaatgatctttcctgtttctaaattctgttagcacctatgggggctggacccttttagaattctctagttgctctaggtatgtgtatatccattccaactactttaatgtccctcgagcggaagagcattcacattcaagaaatcatagcactcaggtgtgccctgcaacatgggaagtgtcttctctatattataaattctccaatcaatctttttatgatcaatccaattttatagataagcaagctcaagattcaaataatttgccccacctataattagaggagcattaaatggcttccctggtacctaagacagtaaaaaattcgcctgcaatgtgggagacctaggtttgatccctgggttggggaagatcccctggagaagggcatggcaacccactccagtattcttgcctggagaatccccatggtcagaggagcctgtcaggctacagtccacggggtcgcaaagagttggacacgactgaagtgactgagcacgcaagcatgcacatctaccctgcaggacttttcagaacctttaatatctaatgtgacttaccatattaaatccatgtgcaaataatatactaatatacatctccacgatgctggagggagggtgaaccaggcctcggtttctcaaactcttttaacctagaaacccattttgcaatgtgaaaatcagcctctggtgatgacaggaataatccaccttcagaagaggctccatgccgcctagaggatttgactgctgctgctgagtcgctcagtcatgtccggctctctgccaccccatggactgcagcccgccaggctcctctgtccatgggattctccatgcaagaatactggagtgggttgccatgc

SEQ ID NO: 32364 - DNA, 1149 bp, Bovine  19866880977339
  misc_feature (1)..(1): n is a, c, g, or t
nagaaacttagacgcatctttgcattgggaaatttctatcaattattttttgcagggctctcttttcttattctaaacaggcttggtaaattatggtgaatgagaaagaagagaaatctggtctttgactccaggttctataacttgctagctgtgtgatctcaatcaagcatcttaggtgctcaaatcctctattttcttctctgtgaagtgggggtaatagtaactgcattgcagagttgttgggaatttataaataatatatatgcagctcttgcagcagaaaatctggagagttgttcaataaaatgcagccattcctgcttttataccgagtagatatttacctggtgatatggaaaacaattaactccaattgattctaatattttgaaccagaacaacagaatgtctccttcataaggagctggacaaagaaatggctgagaaataatgtcttcatacacataactgctagcaattttagtagatgttgaagaatcactaatgcaacctgcaaggcaaataggtatgtaaaagatcaaaataacaaatgcattctttcactttctcaagcttaaaatgcctcgggtaaaaagaaatttgtagttttccactaagcctttttattcattccttattttttttaaagtcatgccataaacacaacagttcctaaactataagttagagtaatttttaaagtggtaggccaaattacatgcatgtcacctagtagcatttttctgaaagcactaatattgctctaaatagggtcaaaatagccagtttctgaaaaagcagaaaataaatgttgcaagcatttttattatcacattcgatagtcttctggctggagactttcaaactgggattattctgggtgataaaagtcagtgaaagcaaataaacatccctctatagacggcttctctttccttttattccttaggagcagcaaatatgcataagacactgaaaatcttcactgcaggcttttatcacagtgaaaatcactgggtactctgcctaatgaaaatcgttgcacccaactagaggaaatcaacagtcaaaactctaaccttgaattttagaacccttggacccttagaagtgcatttccctatactgacgtataacaccatagga

SEQ ID NO: 32365 - DNA, 1958 bp, Bovine  19866881024069
  misc_feature (1)..(1): n is a, c, g, or t
naggcgaaatattccccccacccattactcacacacttgtcactcaaaggggactgagcacatattcaccgtatttggcaacatttcactctgagactgaaaacaaacatgataaatttatcctctaaagaaaattttggtgatgtgtataggccaccgaaaatgagaatgttatgactttagtgctgtgataatatatggtagtaattatattaacaagggaaattacatcccttttcagcaatttaagctcataccacccacatgaaaagtgggcagaagcaaaaatgctgaaatggcactagtcatatagagggagcaatatttgctgaatttagaacctattttaatcacttttttaatctattgagctcctactatgtgccaagcaccatgtgagcacagtggggaattaatgcaatatagcctctgatcgtaagatgctcaccaagtaataagggattttagctatgtacataaatcattgtaatgccaggtgggaagtgagagatgacaaaagaggggtacagatagagttctacagggtttaaaaagaggaagctatcacttctagataaagctctgatgaagatctggcttgcccagaaagcaatcagacacccaggaggtaaggagtaagcagcaccccacagttttccagtatcgagataaactgcagccaattaacactggaaattctgccaatgacctggcctcagaaaacatccaccagcagcctccataatcagataaccatgaaagcaaaccccatatcctatggctccagaaatccttctaaaaactcttctgccaagaacttataaatgtgtggattaatgaaatataaatagagattaaaagcatgagtaaatctctataattcattttgaaattttattgggatcaaatttgagatactcattctgtttatctctaccaatctgattggcttttgttccctttctcccatgtacaagaaggtatagaggtttcgaagagaaatagcacacaaccagatcgtgaggtgtcttggaatctcatatgggagaggaagagttacaaaataactgtaaaaatgatctgctgtttcatcaacatgatctggtggaaaaaataattttgaatcagatagacttacgttgaattcctagtttgtagcctactagctctgtgacctaaaaaagaagtattgactctttctctaggttaacattcatttatctataactgttcaaatcacagggctgtggtgagggttaaataatacaatattgtgaaaacattttgtctaatgcctacaaacatctaatgaatctgtagaataacatgcatcagaaagctgctgtgtgtcagaaggtttttctttttaacgtttaaagacaagaatctcaattactatggtctacacctgaaactaacagaatattgtaaatccactatatgccaataaaatttttaattaaaaataaataataggctccagtttcatccaccttatagaactgattcaaatgtattctattaatggctgagtaatactccattgcggagaaggcaatggcaccccactccagtactcttgcctggaatatcccatggatggaggagcctggtaggctgtagtccatgggttcactgagggtcggacatgactgagcgacttcactttcccttttcactttcatgcattggagaagaaaatggcaacccactccagtgttcttgcctggagaataccagggatgggggagcctggtgggctgccgtctatggggtcgcacagagtcagacacgactgaagcgacttagcagcagcagtagcagcagcagcaatactccattgtgtatatgtaccacagctttttttatccattcatctgctgatggacattctagggttgcctattatacagagtgaagtaagccagaaagaaaaacaccaatacagtatactaacg

SEQ ID NO: 32366 - DNA, 1121 bp, Bovine  19866881171735
  misc_feature (1)..(1): n is a, c, g, or t
nctgttcttgacatatattagatgcacaacaactattagtgctcattattattaaaggagaaaccttgaaatgtccaatgtatcaattaattttggtaaaaaatgaacttgagtctcacatattatatgtgacaattcctaaggtcagacaccatggcatagtctacactctcattgaatcacacagtccaaccctggtaactgagtcaacttgatccccttttggctctattccaggcactggtactaattttgtctccaaataagacaaataggatgggctgtctgtgaacagggtgtcttatggagtcagtcatgattcattctgtttctaccagcggctgagtcccccatttggcttctcaagttttcagttgcaaagatcaaccttctcagtagctaaacacagaatcttatgtgtcagccctcaatggctaggtttcctgtccctcggtgctggtcaccagctccctagctgctgatccctggctttaccagtgctcactgccaatctgatcagaacccagctttttcaaagctgagtctcaggcaaatctatttcccagatcttgcatcctcagtagatcctggattaaaaggcttaggaatcccacatattctttcccttggacttagctccccacggtggattttctaaacctctctatgtgaaaaccctggatatgctgctatctgtggtccctgtcattttttgacctagactccaggtagtaaagcagggtggtttatgagcatagtgttgaagttacccaaaggagagttcgaaccccaggtctgccacttactaaggttttgagtaattttttattctttttgaaccaaattataaaatggagataaaaatacatacttctgagagttgctctaagaggggtaggttaaacttggttccatagctggcacagataagcattccacagtcttatttttgatggaaagccgcactccccctctactgcaacttgatgtctgatcattttctatttatttaaactagatccttaataaaactacctggaaattactagaaagtctaggcagctgctcacaccaaattaccttttcctggcctctcaatcaaaattgtccaaaatcaaatt

SEQ ID NO: 32367 - DNA, 1588 bp, Bovine  19866881176310
  misc_feature (1)..(1): n is a, c, g, or t
nctcgtataacatgtttgacatgtggaatatctccttaaacaacacagtgagtaaactgcaaatctcctggacacacacatagcatgaaatagccactattgtaagaagttaatgcttattcttctcagcaagtatcataacactgtagggtagccactgtcactgaatgttagcagcaggtgcccgtctgtgtacccatccatcattccatcccagcagctggattgctcatcatttttcttcctgtggtggccctgatctgcagaaagctgcttctgctgctaagtcacttcagtcgtgtctgactctgtgtgaccccatagacagaagcccaccaggctcccccatccctgggattctccaggaaaaatccagaatttacctgtggttacagtatgcttcagtcaggttttatatgtacacacacacacacatatattactcaaataatattcaatatactacttagagtgggcctcttctgcttctgtttcctctcaactataacataacacgcaataagcaataagtctgcgcaataagtaaccatgcactccagagcgaccaggatcgtacagaaggaagaagtgataatttaattgttttcttttccttcaaataaacacattgaatttctttcataaaaatttgagaaattgagactctgctagttctattgtttatctctgttgaataaagttaaaagagatcttttccaagttggttgagttttatccatgttccctatcaattggtctgtttcaacatgcatttctagtgtttggcatactaaaaaattacccccatcacttctacatctactatttggtccttattctgcccaagctttctttttaagaataaaagtaaatgaaaatatttctcttggtgaagcgtcattttcttaatgctattttcatttttttttttgcttgtaatccaagttagtgataatttagtcatttattatgatgatagcctcaatatttgagatgcctatcagagtgaaatgaaagtgcctctgtagaattcaatagaccagagaagaaaataatcaaagtactgtttattcattcacttatcaacaaacatttattgaacatttagttgccttggtatcctctctttttttctgctttttcattctctttcttcctctctcctacaaaattgacatcatatttcagaaactgaaaattcagagatgaataaaatatagctcccatccttaaggacttagagacagtaacaatacaacacagtgcaactgttctgttacgaaaaggagcaagaggtgccgtgggcatatcagaagggagaggccacttgtgcctgggagcatcacggaaggcttcgcaaaagaggtgacactttaatagaggtttgagtaggagttcaccaggagaacagggttgggggtgtattagctttctatctttaagtaacaaattaccacaacctcagtggcataaacatttactatctcacagtttttgtgggtcaggagtctgggcatggattatttgggttctctgttcaaggtcagggcttccttgaggttttgtaggtaaagaatctgcatgccag

SEQ ID NO: 32368 - DNA, 868 bp, Bovine  19866881231899
  misc_feature (1)..(1): n is a, c, g, or t
nttcactagcttggacttacaccccccaagtgagaaataaagcttttattttgctttacagactctttgatattcttcgtttcaatagtgtgtgtgtgtgtgtgtgtgtgtgttagtcacttagtcgtgtccaattctttgcaaccccatgtactatatagcccgccaggctcctctgcccatggaattttccaggcaagaatactggagtgggttgcatgcccttctccagggatctacctgacccagggatcaaatctgggtctcctgcattacagaagaattctttactctctgagccaccaaaagaaaccccactcttctctgatgtatatcccgccagaaagttactttctggtgaggagacaaatcactgctttcagaggggtggcttttctaaacatctacttttgtgaagttctgttgtagaatgtgtatcacatacagattctttacaaaagcctagtaaaggaagaaatttcctgaatcataatttttcacaaaaattgtagtgtctttaatttaggccagtgtttctaaatctctcaagattgtagataaatactcctcattttcaagatcaaatctgtctttggctaatgaaggcccagtcgtaattccaaaagattgttagaatgggcctggagctggccttttgtttcatattctggaatacgatttttgtatacaattcccaggcttcagggtagaacaagctctcagacactttattgggttttgattgagaatatttgcaggagcaatttccaggggaacacttaggtgatcagcctcaggagcctgcaatctcaggtcccaaggggacagaaatcaccagtggaaacatgactattactggggaaaatcg

SEQ ID NO: 32369 - DNA, 706 bp, Bovine  19866881250579
  misc_feature (1)..(1): n is a, c, g, or t
ntcctaaaggaaatcaccctgaatatttattggaaggactgatgctaaagctgaagctctaatactttagccacctgatgcaaagagacaactcattggaaaagaccctgatgctgggaaagactgaagacaaaaggggaagtcagaggatgagacggttagatagcatcatagactcaatggacatgaatctgagcaaactccaggagatttgtaggatggaggagcctgacatgctgcagtccatggcgtcacaaagagtcagacttagcgatggaacaacaacaacacatatcagcttcaacacatgactgaaaaaaaagtagatggagatctcactctctatttaccattttagaaatgacacatgtctctctctctctctctctctctctctctctcacaatttattcatgcatagttcactttacttacagtcaaattaggtcaaaattagtcacatggccttcctaactgctaaggtatctagaaggcaaaaataggatactgatgagcacatcaaagcccaatccttgggcatcctctttcttacctggcaaaaccattatatactttcctcaagcaaaaattattctctcaataaaagaaattctaccactagcttcaaaataattatttgctctcacttattatatatataatacacagatacaaagaaaaaagcaaaattattttctgagtaata

SEQ ID NO: 32370 - DNA, 1062 bp, Bovine  19866881278641
  misc_feature (1)..(1): n is a, c, g, or t
ncattagagagagtacagtgtagtcggcaagagcatagactctggtgtcaggctgccaggttctgtcctggctcttccattcactagttgtatgtcctggatcagattgctaacctatgggtttctcccattcctaacctgtgaaacagggatgcgatatttctacagttgtgtggcaggcactgagaataaggcagtaacaaaacagataacattcctgttgggatagactttccattctagcaaagaagacaaaacacacaaaaaataaatatatgatttttttgcatagtgatcagagcaaagaagaaaagccatacaaggtaaagagatagagagtgttggaagatgtactagtgtagggagcaatcaggtaaagcctttgtgaggaatgatgtttcagccaagaccttgtatatacctgggagacaaatgtccaaactgagggaacatcaggtgtaaggtcccaaagagagaaacttccccgagtgtttaaggagcggcaaggagaccagcagaaactggagtaaagtgaggaaggaggtggtgccaggagatgaagccaggaagtagacagagcacagatcattttggccataggccatggtacagacgtcagatggtcttctaagtgaaacaaattccctggagaggagttagaggtgactgagaagtattttgctggtgcagttagagttttgcataaagttgtcatttactgagggagaatcagaatggggagatcaagagtttataaccagacacattaaatttgaggtgcctattaaatttttaattggaaaagtgaaatagaaagtttaatatatatcttcgtagttcaaatgctgctgtgagtccataggaaatgagaattaaacattgaccattcagtttgataaaaaaaaaagaggtcactagtgacctggacaggaatatttcaatgttttaatatttcaatatttcaatgttaggacgaaagcctgacagcagggagttagagagagaatagaaagagtctgcttctggctatgatgattgagcttgtatcaaaccagcctcctg

SEQ ID NO: 32371 - DNA, 1451 bp, Bovine  19866881287806
  misc_feature (1)..(1): n is a, c, g, or t
natctctgacattccagcccactccgagcagcggggataggagcctgactgtgatgggtgttgatgtcaaatttccaactgctcatggatgccgtctgtgttttagagcatcaccctttccagatcatcattctgtctcataagcaaaggtatttacctattaagaactgtcgaaggctgagattccatgggctgtctggctgccagcaacaactcctttcagatagagctttgatggggcagtatttagcttctaatggcccttaaaagctgcaaggtgcaaatgtgaagcgatgaaatccaggccgcaatggccatttgcagaatgatcctggctgagctgcagagagatttggcagctgatgaggcatctccatcaaaaatgtgctcccagaaacgcatcctccgtgatacctgtttcatttaatggtgatcattctcaccctccacccccacttcccacaactgaagatgattactctgacagcaagctgtgtctcacccatcattttctgtcaattttcttgcctctggaaaggattctgtttgggttcttagattaattctctaggcaaaacacttgcctcctattcttgctattctgtttaaaatagatatcctgggagagttaacagcaaacacaacttagactatgatttaaacacaatacaccaattacaagtttcagtgggggagtaggaaaagattcaagggtaactttgctgaggaaacaatgtatactagacatggagcattacctggattctgcaatactcatcagggggctaagaggcaggacctcccatccaataatctggatggatctgtagccaacatccacagcattggctgtgcatccctgatgggtgtttacactcaggaatgagaagataataataaccacacacaagccacataaccattagcaagtggtttttaccaacccattaggatttgctcttctcttatgccactcaagaagccccagaatgacatttgaaatatttccttcgagtaaattaatgattttcagggatttcactgaccctgctctaaaggccttgctctgtggcttttctttctagcactgagcagattcaacatctataaagatgatgaatccttggtgcccaagacgtcatcttggctgagacggggaagcatcctgacctatgcaaaacatagtgagtgatgcaggcagatgtgacatttaaagggacgatggagaggcccaaaggcaacagagatggaattcagcttcatttcgaaaaggaaatcggtttcagttgcagagccctcatctcttcatcagaggaccttctaggagggcacccacatctcactcctcttcttcccaagacaatcaatttgggggggaagagccagctctgagaaactagaaagagggcttttgtcggtgatgcttgtcaaggatgaggtcgaattggacc

SEQ ID NO: 32372 - DNA, 1054 bp, Bovine  19866881326295
  misc_feature (1)..(1): n is a, c, g, or t
nattgtggttccagggaagaaagggtgccctgccccatccctagtccccgggggtggaagcctttggtggggtaagatctggcataagccctgttgtctcctctgaggtaggatgaacaggccagttggctctgttcttggtaacgactatatatagcaagctggcacagtttttagacagagatttctcacaagaccttggcaaacattccatgtttcctttgctgcaatatgtagaattgatatttctgacaaaattgctcacacatcttagtgtaacctgtttagtagttacactttgttattcttttttcccaagcaaaaggaagaaaatgattaattatatgattttggaggctggggaggggaatctgaccacaggccccctggaaaatcaaggcctgacaaattgtctttgctggcatctctcacagcaaaccttctatccagcgtcccacccatccttgaatcacaaccacatacccaccagtaatgctggaattgaaagaccccaactagctcagagcttccacctttccattcattctgcagcaccctaccaacttcatcttctaaaatacaaaggctaatatgtaaatattagcatccaagtgaaaggaaggtccttggcaaataatatacttttcccccctcactttgccttatatttgaaatatttaactaaatattttaaaataaattgataaatattaaactgagtctcatataatattgaggactaaagccactccctcacacataattaaatgattaagttgattttttttaaacttcatttaaaattaaaaaactttggagttccctcaaattccaaattcctttgcccaacactcaagattctaaagcttcacactctcctttcactgatttcatctctcaattctggcctttagaaatcatattattcttgtgtagttatcaaacaactaccattattgtcaatggctttatgaattttcttatttagttttaaaaactatcctatgagacggttgttacttttcccattttacagatgaagaaaaagatattt

SEQ ID NO: 32373 - DNA, 1663 bp, Bovine  19866881378030
  misc_feature (1)..(1): n is a, c, g, or t
naaaatggtgaggaattattcctcttcctataggatacccttttgtgatgtggctttgcagcaactcctgtcaagagatggtatcaatttctctacatccggaacctgggcttggggatatgatttgctttgccagtggaacattaacacctatgatgtgagtagaacatttcaaaacatagcacacaggaccctccctggctgctcttggtaaccctgggactactactaattacctgctggatgatgacatatggccagttacctttttttgctactagcaatagacaatcaaccacaagacacaccagtgaggctactttcagctgacacatgattgagcctgaccaacaacatgtgaactggagatgaaccatgtcagctgagacttaactcacattgcttttttggggagctttgcaaaagtcatctcattagcataagcccagttgcaagtggaaaggggcttgttacgaataacaagaccccatttcacctttatggctaagaggtgatttcaggaagaagactagagaccaaatatcgccaaagatgttcccattgctcttatagctcaagaaattgctagggttttgggaattgtgagccaggaaccatggatgaagattaaatatatatgagaaatgtattttgggcatctgagtgactaatatatctatactgtaaaccacaatattgcagactagtccccctacacccacttttctctttttctttattaataaacctccacacttcctccacttctccatatgtgagttttatctgggcacctgactgtccagctggagactaaatttcccagcttctcttgcagctaagctgtgatcaaacacagctttttttttcttctgatctttgacacagatcaaagtgtctgtgtcaaaacagacaaagttttgacctgtggattgtgaatgggagaaatgtgtggtaaaaaagctgctgctttccattctcctttctttcctttccttttcccctccccattttctcaggctgggaaatggagtcaccttagacccagagatggaagccacatgttaagggtggcagagataacccacaaactcagatcccagaatgactttgtaaattcgatctcttattcatcctgaaccgcttgcctatgactggtctgttatgtgagagaaaaatgcacttctatcttaagtatgccactgtattttgaggcctctaccctaactcatacattaatactgcagacataaacacataaacacacactacctctatagtacttagaactcaggagttcaataaatgctaaattcttgcatttattcaataacagtgactgagctcctattgtgtattaggcagaaagttgcatggataattacttttgggggagcagttaggagctaacaaatgagaagagaaagatagaaaaaaactaacaaaaaagggaaattaaaggtgaagagtaccataacagactactctgtcaggggtgctatacagagaaaatgaaaggatttggatatctcttaaaagtttgctgcagtagatgaaatacaaatcatgaaacgaaccatccattcaatgcacctgtacaatttctttcacagagtttggaggcctcctttcactttgtgtctgggtcactgaccttgagctg

SEQ ID NO: 32374 - DNA, 976 bp, Bovine  19866881411684
  misc_feature (1)..(1): n is a, c, g, or t
ntccctatctgaattttttaaattctgtaaaaactatgaatacatctcatatagtagttataatgaatgctgataccattataaaattgttaaaaggataattcagtacagtttctctgtttcctgaaattaccttatctattagggtaagattccaacttgggaggcacataaatattcgagaacaaaaccatctatttgtgaaatgtgaagatgaaaaacatgccaaactatctattctttatgaccatcaagctcctttactttacaatattattttcaattacatcctcaagtggcacttttattttataatttaaaatagcacactggataatatataaacctgagagtagctttactacatcatagtcagtgaaaataaattctgccccttgccactctagtgtacttatcttgcaaatctccgttaactacatggaggcattatgcatatgagaagtggcatttgttattttattaccacttggttggagctcatgcagacttcctctgcgtactggtttcagcacacactgtataagtggaatctttccaaatcacgtcctctctcggcttcagtgtgggctcgcctgttgctctccctgcgatttttccttggtttccaaataccctcctgctggcccctggtagagcaactccagagaacagcatcctcccatcagtttagtgaacagctgggtttccaaagcagaccttttggttgtgagtaactgtgtgaactccggtgactcacacatccataattatgtgcacgcaggggctctccatcctgcatttgctttttcacctcctgtagtgtttaagtcataaagagaagactattctccattttctaaacccgaaacaacctgcttggggcagccttcgcaagtccttttgcatgtttctgttttccttgttcctgctgatccctctggctttcaaccaaggtttaaccataaaactctcatca

SEQ ID NO: 32375 - DNA, 667 bp, Bovine  19866881861563
  misc_feature (1)..(1): n is a, c, g, or t
ntacaaaaaacatatgaatatatctccagttgagtaaaatattcacattaatactggaataaggcagaagaaccctggctgacatcccatctgttcttacgaattaaatttagaaatcatatgtaatatagacatttctgtctgaatatcataaagccctgacacatccaggctttcattagaaagccctacgatgtgacttgaataacaatctgtcttagctaattagtattttcagtttagcatattcacttccagacatattgctgtttgcacatggtaatttaggtaaacagataccatccgcagctgcatcaattaacactgctaatcaaaactgaattcaggtaattaggcacatttatgcaaaaaaatgtataattttggagaaaaactagattcttcagtattatgtcaataagtaaaaatccgcttttgcttaagaagatgaagaatgagaggatagacatccttattaatatatacatcatgcagacagcataaaaaaacctcaaactttaattggcctgtattttcagaaattggatcatatttttcataaatgttttcctcaatgtttccacatagtaaagttgattcacatctgcctaagggggttaatcatcattaaacaggactcaaatgggtaatgaatgctcaagtattt

SEQ ID NO: 32376 - DNA, 773 bp, Bovine  19866881935445
  misc_feature (1)..(1): n is a, c, g, or t
ntttttctattattggaaaattttgactggctaattttaaatcgcgggtttctttcctctacaaatatgcagtctctgcacacatacccagtggtagctgtgaaacagttggagaattccccatattcagtgacctcagagtcacacttcaagctgtgcagtgatctcttgctagtacaataaaacatataagttgtgactggctgcagagtcaggagtgggtattttagtgttttaataatctggggccattaattggggtggttgctatacttgtttctatttttgtctcccagttagaactgtcaagaaaggaatcaagcagatttctgcagatgcttttgtaaaactctcatttgcacaatcaaatgtccaagatgtggaccacactttaacagtgatacatgcctatcacatgctttcctgtaaatgactacccaagagcctgagcagagagcaaggatgaagcaggaagtaggagagcaagtcataaggccacagagtttggctttcacaaacaagtcctttctctaattgctccctcctgtcacagccaccacagcagcagaggcagcctctgaccccagctgctctggtctactccggtaacgaggagccacatatcagcaaacagaggagcaggaccttcatggacataaacgtcaaaatcatatactgtagcagaatcccatgaatggaggagcgtggtaggctgcagtccatggagttgtaaagagtcagacacgactgacagacttccctttcacttttca

SEQ ID NO: 32377 - DNA, 979 bp, Bovine  19866882163384
  misc_feature (1)..(1): n is a, c, g, or t
ntgggcttcaatagttgtagcaaataggatcggtagttgcagtgagtgtttgggttgacacctgtctcctccaccagctaggctgggagctataaggaccgggacagcaacatgtacaaagtggggtgggagcacagagaagaggactttgaagaaaatattaacaattaccatgtctaccttgctttccatgcctaccttgttcaaaacacttccatatgttatttaattttattcttgtcttcgaaagtagttatcactgtttccatttaacggaagtagaaaccaaggctcaagttcacttgtcactcaaaatcacttggccagttatagtgcagaaaagatttgaatacctctctggctgactccaaagcctgtgtctatctcaactataccgaagagtgaagaggagctggcattttgtttggatcattaaggatgagcaggcatttctaggtggacagaatatgcaaacatttttcttggcaccttgacttttgggtctttccgaaggaccataatttttattcattcactgacatcaaatatgtttacccagaattttctctggctggatgctagaaattcaaacactaagagataaggtccctgtcttccaggggttataatgccatcgcacatgttggctatgtacatatatggtacccataatcagatgggtagtaatagtaggttgctaaattacattccaggaaaatgatacaggtatccagtgagtccagaggagggagtgatcaccaagggttctgtggtcagaggcagcactgaggaatagtgggactcaaatgtacattgaaacaaagagggttttgggcggggcacttggattaggcacagcagtgtcatgtcttatgcaaaagttgcagttaaaagaggggcatataagcataaattcatggaaagttagatttttactcttacaacttctttaaatagacaacgaagtgtaggctcttat

SEQ ID NO: 32378 - DNA, 2625 bp, Bovine  19866881142176
  misc_feature (1)..(1): n is a, c, g, or t
natcatgaagcagttaaaaccccctaaaaacacagaactcggggctgtggttgtcacttttctactttttaccaagttcactaagaatcccattaattaaatgctaagcattttcacaccgctagagagaatattctatacagaaaatgctgcattctgagtggtatgatcagtgaagtcctgtaccaactgtcttgggaatttaaataatccctacaggctgatgaggttgttgtgggctaattcctgcactagaaaagtgccttccttgaatttctgacttctgagatctttcccaactttaaacaactaagaatgaaacctacaatataaacattaattctttgttttcctgttacctaatttacatgccttctcaattgaaaggtcttcattttccaaaaatacagctccaatatggtcgataatatagcaaaatataaacagtgacatttttatgacataaaatcaggagctgacatttgaaatttctaaacatggtacctggtttagctgtgtcaaaacaaattgtcatgaggcaaaaacctcagaatgtgaaaaaaatataggaactagtctttccatacagtgtaagtaactaagtatcatattcctgaacatgaaagaaaatgtaagagacttacttttcctatacatgatgataagagaaactaatttgttcagaaatacattaacaacatttatctgaaacaaaaatctcaagactcatgggagtttttcatgacttctctcagctaaagccactagatactttccaatggacatattccaaaggcttctaaattgtaggtctacagaagactgaccaccaagcctcagaggtctgtgaaggaagatttaatgattacccagagattttgattcattgatgtctttctcctcccttcttctacgaatatagaaggaggtcattaatatagtttcctaaagccacacagaaaaatggtaaaaatgtaacagccttttctgagaagtcattgagaacacagtagttggtaatgagaagctcaagataaacaactaatttcttttcagtcctcattgctataggataggagagagaacctttcttatagaaaataaaagcagacaaagaagtgagggtggtttgctaacatgatcgtccatcaaggggagcaaacagaaatctgtactaatgcagtatcagccactaaggagttcaagtttaatgtgtcctgcaatccttctcactatagataacaaaagcaagtaaaaccaaagaataattttcaatctgtgaaactaagaactttgtttttggacatcatcttgcaggtattttctttgatgaagatctctatcttctttgcttgcccttagcagaccttggtatgctgcttaaaataatatttgtggctttatctgccattcttttacccagacatgttgattttattaaagtaagttgggtctgcattctttctttactattattacaggtagacttgacagacataggacctttgttttaaaatgctctgctatggaggaaaccttatgaaataagttccattttacctgccgggcaattgcattctgaaggtgcttctctcgcgattcttattttagccatatgttcataggacttctggaggaaaagaagaggtattaacaatcatcagtagcattgcggagaaatggattctttagggactctctggctatatgcctgatttaccagcctgcataactaacgtttacatatgtatttggactctagtcaaaaggtaacagtacccaggccctaaaaaaaagaaaacgaccattgagatggtatcaaggctgtgggacttgcataacatctttcttcattcttcaactaccatcaccctccctctcagctcaggcatatgcagtcattgtacagaatcagtattaacacgctgcagttttaggtaagctaagagttttaaaacaaccaatattttacccataaatgtcaactacttatcatgctgtgctgccactactgccaaccaacctctctgttggaagagcaagtcccagaaaatcccctaaatggactctaaagcactcctggttttgatgaacataacacagattcctttcaactctcaactccaatggctctgcattcacaaacacccgtggcactgcatcctttaccaaaaataaataaacagggcgactatttttttcttttaaacatttaacatgaaaatattcaatgtgtgaagtaataaaatcacatgtagttatttcacttttaggagtgatttccaatcctatcgctatgttaatgacacaaatgaccctaaccttcctatactgtatgaaggatttaacagatgttatctctgcaagaaatattctccacaatattgggaaagatccacacacagcttcagaaactaaaaagagcttaaatgccaacctaggtgccattctagccacctttcccccttttagacttccatatatgtttagcatgcaaacattaagaagagtaagggaagatgatacagagagggtggtaagagaggatgtgcatatacaaatatatgctacagtaagcagagatggggcctaacacatatgtgtgcacaagccatactacatctg

SEQ ID NO: 32379 - DNA, 1186 bp, Bovine  19866880363680
  misc_feature (1)..(1): n is a, c, g, or t
natatatgagattatcagatcctaacgtctatttagttttattttataataattcactagatacaaaatcctctcacaacaaatgatttttccttcataagaaaatttcctgaaattgtaattgccttaagatattctcattatcacaggcaacttttctcttaggcttacaaatgagtaaatatgttactttaaacaaatgttaggttatcttccctccttctgcttcaaattcgtaatgtgccattttgaggtaattcaagcattttttcagctttcaccacttaatttgtatgaattttgaatcttggggcaaactgaggtcaaggaaaaaaagtccctgtggatattgctgtaaaagatcttttaatacttttaatattagatctacttgtagagtgtccatggtacaatttaataaattctggttttgttgcctttagtaaaaagtttcttatatcagtccataaggaattttttggataaattcctttcttggtcaaattatcccattaactgcactgtctactgctgagagactctgttgtgaaaatgagacttaagtaactttaagtgtctaaaattgatctctttcccagcatatagatttactgctgccaagctataaaagaacctttatctcatatcttgtgcccaaagggaatcttttaggctcaactttccaaattggctcagagatgctctataagatactttccttgctctcatgtgttttcactgtctgattttatagacttaagtttttcgacatttccaacttccagcttactttctccctcccctcaaatctccatttccctttgttccatgcccccaaatcctcaggcaactcaaatcacccccaacttttacctagttccccaagaccacactcaatgtagggaaagaatggcttgtagaaaccatacatgcagttatttaaggaaagaagactgtaatttcagtataatgccattaaaaatgatcaataatagtactcaaacacagactctatgctcctggtatggcttatgtgtgcttgtattttttctttaattttaaaaaccatttttacatggaataaaatgataattaaatgtatagtttaggagatgaacattcttcttttaaagaaggaaaatcaaacaaaagacttcttcattaaacattgtggataggttagtcg

SEQ ID NO: 32380 - DNA, 1437 bp, Bovine  19866880545831
  misc_feature (1)..(1): n is a, c, g, or t
ntatgctatcagcaaaacctgagattgtgaaaagtcatctcccccctgtcctccctgttttttttttgtctctgggtatcagattatgattgctgagaaaaagtatgttcctgtaaaagaaagtttaagatagatagcagttgctattacattttatttttaatctcaatatatttaatgagtataaatgttttagcacatggtacttttgaatttatagccaaatgaatcaacagaaaacatatcatcttattagatagtctgcttagcatggttatatcactgaaagttattcagtgccccaggagcattcagacttaacctggtataatagctatcactatgtattaatattaaaatggctttaaaatattttactcaaaaataatcttttccaaatatttaattccttgtgactagctaaatactttttataagctgaagtgcttctatccaacacatataagttggaagtgacatttaaatgctcatatgttaaaaagcaacagtcacacagagtacttatttcatttttttttaaaggcaacacactaagatatttttttctgagaacaaatatttgcttacataaatacaaccacataagtggtttgcttgttgaaagagaattgattatttgcttgtatgacatggttcctaacaaaaataaaaaaccacataactactagcaaatacataaaaataagtagtcctaaaaggagaaaaaagaatctatagagttatgtgaacataaaaataagtcttttaaaacttgcaaatataatacaatgaaaaggtataggtgactactgagtacaataaaaacattagtatctatatgttttgctacaaaataatttattttttataatactttattaaaatgttgatgtcctaaatatattgaaacactgttttcaatactgacttttaaaacactattatatccaaaatttattgaattacatgtacatattctggacaactctaacatctcgttcataaagtcaaatcttttttttatctattgggaagaaaaggcagtcttctgaaattctcttattatatatttatggatcatctttatattttttaagtaaagatggatctggagcctgtagacagaaaatacgtgttctgtacatctgtgaagcagctaagatgtaggtaattttcaaagttgagaacagcaaccaaactaataataatagtaaaacaaaagtaaaatataagtaaatttgacaacagctatagttttatcaaaacttccccaagagaacaaattcaggggtcattaccaaaaggaaatatggaatcacaataaataacatccttccacctgaaagagagccacagcccttggtgcataacacggtcaccgtctatacaattcatccgagattcagtttcaatatttttcatcacatttcagccaag

SEQ ID NO: 32381 - DNA, 2339 bp, Bovine  19866880572120
  misc_feature (1)..(1): n is a, c, g, or t
ntggtgattgcagcctgaaattaaaagacacttgctccttggaagaaaaactgtgaccaacctagacagcatattaaaaagcagagacattactttgctgacaaagttttgtctagccaaagctatatggtttttccagtagtcatgtatggatgtgagagttagaccttaaagaaagctgagtgccaaagaatttatgcttttgagctgtggtgttgcagaagactcttgagagtctcttggactgcaaggacatcaaaccagtcaatcctacaggaaatcagtcctgaatattcattggaaggactgatgtagaagctgaaactccaatacttgggccacctgatatgaagaactgactctttggaaaagaccctgatgctgggaaagattgaaggcaggagaagaggatgacagaggatgagatggttagatggcatcaccaacctgatggacatgagtttgagcaaactctgggagctggtgaaggaccggaaaagccgggggtgctgcagtccatgggcttgcaaagagtcagacataactgagcgattgaacaatgacaacagaaatcctgttaattctgacaactgacctcttaattctattagatttgtgttctgtacaatttgacaataatgaaaaaacatcgtagtgaacaccaggataaaattctaagtggtacaaaaccctgtacattgtatgatgctatgaatctgctgtgatgaaatgagggaaatagcacctttaatttgcacagaagacattttcatatacacaaaggattttgggaaaataggcgcttgatgttaagatattgacaaatgaattcaccagacattggcttttgaagctgggacatattagtttagggctgtacagccttggtatatcccagagtaagtcaatgtggtagcctcagatgtggactcagaccaaactgtagctcactctctcaatttactgtctctctccccactgccctctcccacactcttgctatcttttgcttaactctgaaccttagcattattgcaataatatagtttgcttgtaccaataactttcttgtcaagagacatctgttctgttatgaacagtctcttagtaaagcatcaatcatgtcttacttgtaaagcaaaacacatttttggggtccctagatagcaaaatactgctgaaaaaacaaactgtgcagaaatattaactgtggcacattaatatatgcattctgagctctttttgtttgtctaccattggtgccatgtgattctgacagtatgagctgctgacctcttgtctctggaaccacagaggactcatcaatgtcctccctagaagcttgtaatgggctgattgccatggagattcacacaataataggatgctatattttaggtgctttggtccaaaatgctacaagcacaactgataaaatgttgcagttgttctgagtgactttcgaagcttgaacccatagtgtcaagctacctgtgaacttcgagtcagtcatctgggttgctttgcttcatggacataagacatatgcatggtggacctgagcttctgattaacattctgatggctttgtattttgctgttgggctcactgcttgcatttataagacgagattctctgctttggggccagattattactttctaagcgcccatcaacttcacgtgtaacagcttatattggatgtgttgttctttgcgtacatcaaggcttgaagtgaggtataagagagaaattattatagtttgggtaaatatttctgtaccagaagccaaccttggatgttgttagggctaaaagtaatgtgtcaatcagtgttcagttagggaaaaaaatcatgttatgtatttcaagtgggagggactaggtacaaaggacttaggactggtggagcaaagggagggagagaaggagccaagggagtaaaaaggaaggagtgatgtgcaaagatcaggatcctgccagtgctcttagctcagccgccagaacttgcacctgcagcttcctggagcttccagagccgcaggcaccactcgggggctgcggggacagcccatccccaccgccccgacagcaaaaatccccagctgccagcagcatccactgcagtgggaaccagagcaggaaacttctctgtccctcctgctttctgatctcttgaccatgctttccaatgacagaactcaacagggagctgaatgaccagggaagggagtgtggggagcatagtctgcagaaccccggaagccaacacagacattggggggcggggtggaactagagacaaggggtgaataacagcaccagggcccaacagagt

SEQ ID NO: 32382 - DNA, 927 bp, Bovine  19866880580881
  misc_feature (1)..(1): n is a, c, g, or t
ncagaaggtgagcccatgttatacccaaggagaaaaggaaaatcctgccaaaagttccagtgaacctcatttagcagttgcactcatcatatcttactcctcctttgggcccaaaggatcaaaagtttcattttcacctcattttagggagctggtttggattgaagtcacatacaaaatgaaccgtctccaacatctatcatcaggaagtaactcaagctcaagataaaggtcactggtggggcaacaggcttgtgttgcttattctggcttctctctcctgtcttggagatcatctggaagagccaccatgacttattctttataagctttacaagttggaatgagagctcttgcatgttgatgagcccttgataaagtacacaagtgtaatataaagcaaaatggactctgctcatgatggatttgaacagtcattccacagaggtatccttgagccaagcccacaacattttggctcctacttactcatggaaacttctaactgattgcttaaaatcacttgccaattattgctctgaagaacaatcccttgaagtagaacttatgagggtccatgcatctcaaatgctaaaatttatttgaactctattgtgtctaggattttacccactgaatttatttggaagcttcatgagatatttattaggagattatatttggagaggtattagtataacatgtgaaattctaaataatcatcttttaaaatgatcatttgattacaccatttgaaagtcattaaaacacaatattcataagagggatatttttcagatgtagaatgtttaattattttaagtgaattataaaaaatatctaatgatagttaaattgattttaaagttactcagtgaaaatccttaatataagaagcagtttatgtaggtattaaactatgcaatt

SEQ ID NO: 32383 - DNA, 1189 bp, Bovine  19866880630858
  misc_feature (1)..(1): n is a, c, g, or t
nctttcagtgctttctctaaaaaaagctccttggtattatatctttgtgtgatttttttttttttttttttttaacattgccatagaaagttgaaaatgtttgcatggtttactctctgagtttgttctcctgagcatgcttagtgccaccgagtggtaattatttaaatttttttctaggtccacattttaataattattggggtaataataatcaatattgttggtgtgcttttctatttacaagcactcacgtatatttgactgtatgtgattctcaataatataatgaggtaggtagtgcaaatgttagctctttgaagataaagaaactgacccagaagtttattggattgcttccaggttattacatagccagcaaggaagggcactgacccttgaactcagatctctttctctgagcatgtccgtccttctatacctcagatgacaagactagtcaaaattcacttctgtaatttttaatacagtttttgttaccctggacgccctttctattagaagagttccttttctaaatgaaagtgactgattttcaagttgccaacaatttatatagtaatatgtcactcattctctgcataaattaattctcacattaaaagtaaaagaatccaaacgtatgtaaaaataatttagagattgattatataatcatatttaatcatgtttttttctacagtggacaaataaatatcctcaaaggaagcaactgcagatcaatcatccctaaaagctagaccaaacactgcaggaacagtgtcagcagtaaccaaaaagggctaatgttttctaagcatcgtttacaccagtggctgatgtttgtcatgagaaacacatctccatttacttacattgcctggaacagcttggcttgtaagggcatgtgttctgtggaggccagaggtacagtgtcatgaatactagactgggtttggctcgcagctttttcattaaacttttcagggtctccgtttctttatctgtaaaatgacaagagttggactagttaacttaaatagtgatttttttataccatacacatcagtaaaattcgttgtatttctttggccgattgaacagaaaagcaccttagtaatgagagggcagatgtaataaggtgactgagatgaattaacatataattcatattgatctgactttattt

SEQ ID NO: 32384 - DNA, 3724 bp, Bovine  19866880653326
  misc_feature (1)..(1): n is a, c, g, or t
nataagcttactcttattgggaactggctacacaattatgtctactaataaattatttttaatttttttgaacacacctggtgattccaggccatcagagggtgatttagagtgagtcctgggtccagtcttgcctttctgtttaataactgtatgaccacagacaacttctccattttattactaacaaagaattaaaaagagtttctacttcattatattgctgtgaaaattaaatgagaaaatgtgtaatgtaattcatacagtagctgaaatatagtaaatgctcaataaacattagctcttatcatcaggggcttccctggtagctcagctggtaaaaaatcttcctgcaatgcaggagaccccggtttgagagggataggatacccactaggagataggataggataggaagggataggctacccactccagtattcttgggcttccctggtggcttagctggtaaagactccacctgcaatgtgggagacctggatttgatccctggattggaaagattcccttggaaaagggaactggctacccactccagtaatctagcctagagaattccatatttttgtcggctctttggaaggggaatgtgtacttatttgtaagagttcatctaatttagtcatgcattggctatattgaaacaattttttttcagtttaatttcctttgaacacaattgttctacaagctcaaacatgtacattaaatttttcttgacatttcattacttttacattccttgggctaacagcaggtttttaatctcagacagatttttgtgccttgatcatcttaaaatatttactgaaattagtattcaaagaaattaatgtaacgacactaaaatgctttagatagaggttttcatttcacacagtacgggggatgaactgactggaccattttcaacctaaggtaaatttggagtcacattgattcattttggagctcccttaacagcttccttgataacaaatttatgcttagtgtttaaagttaatcagaagcaatatcatttttccaaaagtacttaattttttctacagttcttactgttcagtatcttaggtctcataggatacaaacaaaaacaaaaaacaactccattaacttactccatttcagccaagtactctctattccttgcggacgagacatctcattttaacttccgtattctacttctctgctatcttcatactagaatcgtttaatgtcataaaagatgtcatttttatgtactttccttgcaattggtaaacaaacccaccattcttgtcactgttcccagaagaatcattcacaagtctgttcttttacttccaaggaaacatgaatcatcccgtgaagtactgtcactgacactttaatctttgctactggagaagttgatcctttcgccttagattattccctccatgtgttcttccatcttccagttaattccccaattaatcctcagtgggaaatcattgctatcgctttatatttctagagtactttattttaatctctagttatgctcctaatgcatatgatttggtattataatgggcttgattcaagtttacctggctctcagtatagggacattgctagaattataacatttcttatagcccttgcacacaatttgagtataataggaacttattgaatgttaatcgaattgattgttgtctttgaaacatctattactgattcagccactaaaatttcttggtcatctactatgtgccaaccacactgaggtaaaattgtgccctgtatatctagtactttaacaatagtgtattatgttgctctttcttgaatctcatcctccttttgcagaaggtaaaattaaataatgaatgaacttgactttcatacaagcctctattcaattgttcgtataaaatttactagacaataaacttaggagcctgaacattttgtatacatttatactgactgtaaactttttttagccaaaggacttccctggtggctcaggcggtaaagtgcctgcctacagtgcgggagacctgggttcaatccctgggtcaggaagatcctctggagaaggaaatggcaccccactccagtactcttgcctggaaaatcccatggacggaggagcgtagtaggctacagtccatggggttgcagagtcggacacgactgagcgacttcacttcactttatttcatactgactgtaacatttttgtagctaaagggcacccagttactgattacccaattttaacctttgaatcttccatatttagtatgattaaaatttgttaataatttttgaataatatggttaagcaaggagagtttgaaatacatttttttcatcttgtctactgtttattctacttaaaagcatgttagaaacttgaacaaatagtgcaaaacttgggtgcaggtcaagaaacttcccttcaaaatgacagaaaccagtgtcataacacaatgggtgcacacagctcccactgataaggttctgctacacaaaaatgctatgtattcatatatctatagccaaaatgttggttttccctcatgaaaacactttctccaaaatttcactgtttctgaaaaacaattaacctgtcaagtttaaattttttcgttcataatttggactgtatcctgccattgatatttattttaatctcctattgatttctgtgggaattcttcttgtagaattaaggcaggatatagtctcaaaggagtttctgcaaagaagtttcccactttcatctctttgtgttgggtttttattaagtttaggtcatgacgttgtatgcctaaaaataggcctacaggctaaagctatgataaagtcttctatttttgtgtcaggctgaaaggtcagtgagaagtctcacagggaagaacaacattataaacgatttctaacgtgttttggtccagtttctaaacaattgaaagctattcatattaaaatcttttttactttgtatatccccaaaagtctatctcccatgagatttgtctttaaactatcctttcaaaccatgtttaaaacattttaaaacactagatataatattatattaggtagtcatttaaaattacagttatggtgactatagaattatggatcttgggaaatcctttggaatgattttaagtttgaaaaaagaaaaagtagaaaattatatatatatataaatatttatagcaatgtaaaaatacacataaataaagatggatagcaaacagaaatttaaaatttgtgttgtaattggtggattttgtgtcttatcaaatttcctaatgctctgtattttatatgttaatattaaaattcaagtgcaaacaaataatataacttagcttttaaaaattaatttctttattttaattggaggctaattactttacaatattgtggtggtttttgccatacattgacatgaatcagccacaggtgtatatgtgtcctccatcccgaacccccctgccacctccctccccatcccatccctctgagttgttccagtgcaccggctttgaagatcctgtttcatgcatcaaacttggactggtggtctattttacatatggtaatatacatgtatcaatgctatcctctcaagtcatctcaccctcgctctctcccacaaattccaaaagtctgttctttctgtgtctcttttgctatctcgcatataggatca

SEQ ID NO: 32385 - DNA, 814 bp, Bovine  19866880664292
  misc_feature (1)..(1): n is a, c, g, or t
naataatcccccatgagaaaagaaaaggaaataaccaaaggcagtgacagcagaagtacaaaaagggaatgcaatcaaaagatagtccagagtcagaacccaccatgtcaccagcagtaaaatatacacggcccaatttctcggcatccatcactgtattaagggcaccacacacttttatctctttaaatcttcataacagtcccatgaggcatgttctgttcctcatacgtgctttacagattcaggaaatgaggattagagaagtgaagtagcttgctcgagatcacagagctgtgaaacgggagaggtgggactgaactcagcacgacaaatgcgtatgataaataccctccagcctgcctagatgagcaagacaaatgaggaaaatgtggaaatgaaagatgaccatcttgtttatgacctgcattacttgaaaaatgtgaattccattgactgaagaaagaatgggcttcccacgtagcactagtggtaaagaacctgcctgccaatgcaggtagacttaaaggacacaggttcaatccctgggttgggaagatcccctggaggagggcatggcaacccactccagtattcttgcctggaaaatcccatggacagaggagcctggcaggctgcagcccatagggtcacacagagtcaggcacagaagttgttgcttcttgactagaaatatccttgccatgggatacacagaagaaaccacaacagatgtcagtggctgcagcagtcttagtgctgaagggcagctgaggcaagaattagggttatagagagaattggagctttccta

SEQ ID NO: 32386 - DNA, 1063 bp, Bovine  19866880679003
  misc_feature (1)..(1): n is a, c, g, or t
ngttttttggagccttgatgtggttgttactgcttagaagaattctcatatcaggagggacgattgaaagccaatgctgagggatggccaacattcagtcgttgatagtcccatctgtttctctctttggttttgtaacttcatgcccttctccaacctgaagaatccactcaggtttttttttataggaaaagggagaatttgaatttgaattcaattaagcaagtgtggcgaagcacctactatgcagtgcctatcaagaaggttcacaaaccaaggagagcaagacatgaaactgctgaaggcactgtttctgtctttgacatttgacctaatataattatctgttttattttcagagtagtataaatgggagcatgtgatgattgttttcaaacataaaaggaagtttcttactggtattttctgaagaagaaaaaaaaaaggttttgtttcgttacaggaattccagacatcttttggcaccaaatcaccaactagaatcatataaactgtaaggacaatgtaccttaagtaatgtacaacccaagtttttagtagaaatttacagagcatttttatggtgcttcacgaagggggcaggttatcagcatatgtgaggaagccagccgtgagctgcaaagtaaaaccacatgcactaagcattccagagtgagctaatcgacaacaactgcttcaaagtcctccccaaacaatatctaagcaactttgaaaagtcacacagatcggatgtcctcctgacctcgttcctaaacatatgcttcaagtgtattttctcatgagaagttgtatgtttaagacagataaccaaaaagcagaaagtaggttttgaggaatgtaaattatttgatggcagaaacagaaggcatctgctttcgagccaacatttgaataaaaagttatttaaatgttggtattgccattaagcagcttcactgaagatgggaatgaaaaaagaattgctaaatccatgggtttcccgtggacatcttggagttagaaccaaagaaacagtgcatgttcattcatgctgacagaagaa

SEQ ID NO: 32387 - DNA, 1615 bp, Bovine  19866880680411
  misc_feature (1)..(1): n is a, c, g, or t
nttgagatttcctgtgcactgcttccaaacctcagtcagaggcacacatactgtatttcatccaggcaaggctgttgaagcgaaactgacttctgacagtgtttccatctgggattctgatgataggatttgattaggaactgggcctgtagtatcaggatctggcatctacatgttcgtaagtccagaagtcaaaacacttggtgctgcccatggattgtctacagaggcaactgtaaatgttttgagttgaaagaaatggttgtctcactaatcataggcgtggtgcttccctgaagttcttaaaagttgttctttttacctcccctctgaaggtagcttagtacagtgtctgtaaccctagagttggacataatgcacaatttcattcaacttactactttcacagattaagaaactgagactcagattttggtgatttgctcaaggacaaagcagaaaatcaggattaaaaacctggctcacaattcccagtccagtcctctttctgttatgacattttttttttttttttttaaagcaatgggttgttggctatagaatgaagaaaaaagagcatgtgaaactttttttttgtttcaaaccatcaaactccacctattagtacatgtctataagttaacagatagctattctctgcctacaaaatagccaatatcttaaaaattcaaacacaaacagatagagcagtacttactttataacatatgtgccatggactttcctaagcagttctctgggtggactctatgcttctttaggatacaaacattgcatttattcacaactttttacagttcatctaaaaaatcagacacatcaacacactcttctactgcagtgaagggaaatactatttttatgttatactctgttctaaaggtaaaatcactaaaaagcatcctttgaaaagcctgctattgggagctcagaccttgggggatggcatagaattgcagatgaagtggagtcaagggagcttggttcagtgctttgccccagcatttcctgggaaggcgaatatagaaatttggttacttaaggagatgtgtaaaccttaacaaaataccaaaacaagtgcttcggtatgacctccctcacctgttgaatctgctgcttctctctccttcactgagtaaaattcctgctgagcagggtacccctggaggaagcctggactgtgtggtcagtgagtgatgttctcccttctctgaaagaagtgcacacagggctcaccactaatgctcacttctgctttgagcagtgtggaagtggagggcagagttgatttttagaaatcctaataatggaatctgtttcccccaagaagttagcaaatgtcaaaaggtcaaaacctccttctaaaaaaaaaaaaaatatgtggaagctaaatcttgtaactgctcaccaaaatactttgttccttgagtcttttaaacagagcatatacagtgttacagagaaggtgatagcaccccactccagtactcttgcctggaaaaccccatggacggaggagcctggtaggctgcagtccatggggtcatgaagagtcggacacgactgagcgactaactttcacttttcactttca

SEQ ID NO: 32388 - DNA, 850 bp, Bovine  19866880690855
  misc_feature (1)..(1): n is a, c, g, or t
nagttaaggtgtagccaaacatattagtgtttcaaacaatagattctttatactttaatacaataaaaatctttgtactatcgtcagattgtttaatgtgtgcacaacagtactttctactttaaatttaaactcatagagtgcaaagtttatgcactgtgttcagttttagctaataattctatgaatatacatatacctagtaaatactaattgatgatgataattataatttgatattttggacatgagtttcccaaaatagtttgatgtcatacagtgaattgttcttgaacaatggatgtttagcttgtatataatttcacatctaaataataataaaactcaccatggggattgatgctatactatcagtatatgcctttcattaagagtcacgggtttgagaagatgaaaagaatttacataaagatggcatttaaacatggatggaaattgaaaaaacttttttgattgcgtattcagtaaaactgtaataggaggaaatgacaaacatttccaactgagaggtcctcatttgttatcaactggaattctttaataagaatatttaatggtccattcccaccaacaagaatggacttcaaataaagctttaaacaataggttgtttaccccagcgtagcaacagttgtaaagcaacaattcctttttctacttctcttgcaggctatgtaagataaaggtatgctgctgctgctaagtcgcttcagtcgtgtccaactctgtgtgaccccatacacggcagcctactaggctcccctgtccctgggactctccaggcaagaacactggagtgggttgccatttccttctccaatgcagaaaa

SEQ ID NO: 32389 - DNA, 1418 bp, Bovine  19866880723334
  misc_feature (1)..(1): n is a, c, g, or t
nttcccagaatagtcagccgtgattttcctggttcttcagatccctgccttctgcagacccgccccgcccgccccttccaaagcggccggtgtgcgctgatgctgtcacaggtgggtcctagccctgtctcaggaactgtgagcacatactggctttctgcctgcagacacaagcccgcagggagcgagtcgcctcactttcacacaaacgcccgcctcccccagggccgcccctctcccaggagtgctttctcaccgtatagcagtcactaacttcctatctaaaatatgactgtccacgtgcttctgatttccttctcccaaacagctgctaggctttccctccccctgctggctcacatctggcagctttatggggcccagagacagaggagggaaatactgtatttcccctttcccatcttttgttttcattcagtgcttggcagcaggtgaaggaaaacagtaagggattggtgcgaacagtcttgctcagctccagggtggtgtgacttccttttctcttctcctgtttgcataaagatgctttcaacatcaccctgtttttctacactgtacttaaaaaaaaaaaatctgtaccttttgttggagtagatgggtttgaagaccaagcattttcacacccccgatagcaatggaaactgacattggtaaattagactcctacttgttaataaccatcagaaggcatataattgtgcattgctgttgtttagtccctaagttctgttaaactctttgtgaccctacggactatagcccaccaggctcctctggccatgagatttctaggcaagaatactggagagggttgtcatttccttcaccaggggatcttccccacccaaggatcaaacccacatctcttgcattggcagatggattatttaccactgagccactagggaagccctaattgtgcattagtgccatgcaaaatttctccatataggaatttactttaaaaatactgtttatatccagtgactgagctactaggaagctcttctcagaagtgttgatattaataaaaagattaaaaaatacctcagtatacaagacttaagaaactagctaaaaatttatgtaatccctaaaatggaatactacgtagcattaatataatgtgtggtaattttgagagatctttacaacgcattgttaaatgaaaaaaaatctataccttaaaattcccattgacataaatatacccctaaaagttcaagattaagtgctccaatacgtaagagcctactatgtgtcaggagatgctggttcattacctctcagcctggtaaccactgtccttggctatctatcatctttattctgcaaatgatgaaactaagagtcagggagggtgagtaactttcccagcatcacatgctagtaagtag

SEQ ID NO: 32390 - DNA, 1047 bp, Bovine  19866880739508
  misc_feature (1)..(1): n is a, c, g, or t
nactcatgccagtgtgtctgtaaaaacaaactcttccccagctcatgtggggccaacagagaatttgatgaaaacacatgccagtgcatatgtaaaaaaacctgcccaagaaatcagcccttaaaccctggaaaatgtgcctgtgaatgtacagaaaatccacagaaatgcttcttaaaaggaaagaagtttcagcatcaaacatgcaggtgagaaaccttcataaagagtattaatttatcttatattggggatagttttctcaattcaaagcaattttctcagccaaaatactggtttattagaatgggaccatttaagttctgtaagatgaattatgatattttgtaaacaatgctaaatttgggggagactgtttgctcctgaaaaagcaagatgagatccctggaaaccaaaatgagatccaagctcagactgcactaagtccttgtcccagaggctaagagagcagctcgcaacaggagttagatgacagatgcataggacagtcatttctggagcatcttcaacatacacccaggcagcacacacctacccccaccaaaaatgacagtgcagtcagatgtaattttggacaaatgttctaagtgcagaaaatgttgtgcgaagttcacaaaggacaggataataccatttactgtggaattgtatctagaaatgaaaatagtaaggctaagtatttaatgagaattagagaaatatattaacatattgttaaaggttactcaaggcattccttaaacctgatttggcttccttcatcacagaaaaaaaaaaaaaaagtctcctggactcagaccctttcagtgttcatccctgaccttcttcctctgatccaagaataagccagctctaggtgtttgacacagcctcccactttgcttcagcatcgctccaccaatcacaccccttctcttccacacctttaatgtcctcaactctgtagtcttctccctccaatttaaaaacgttctcaaatttctttattggcatcttactgcaatgtgaactttcttcagcaactat

SEQ ID NO: 32391 - DNA, 1434 bp, Bovine  19866880774455
  misc_feature (1)..(1): n is a, c, g, or t
natgccagccaatatatgttcttcatggaatatgactatcattaaatagattctagcattttcttcagtgagataatcagattacttatgaaatctttgcatttagaatatggcaatagaattggaacaacaaaagttttatatatatatatatgtcttctgaatagtaaccaaaatgttagatgttagatttaaaaaaaaaaaaagcaaaaaggtaaggctaaaattaaacaaaccttaattttagattccagtttgttacaaacaactttgaaggtcaaaatttgttctagatcattcactgatctgaaggaatttgaggaagttggagcggtttcagggttaacaaaggaattcaggcctttgggtttagttcagcacgtgaccccacagagcccctgcagaataactcagaatcgactggggctgagattctgaggccgacctggttcatggcagttcagactagtgtccccaaaccacgagagcatctgtggcatggcttgactgacaaggaaccgttcagcaccactctttccccctctactgcggacagcgttctgggctatgtggtaaatctcttcctgcgagaccctgaggtctggaatttgtactacaacacttctttgtgttgtgtctttctcatgtttgtgtcagttaggacagagcacaaatgtttagcaaaggattccaaactcttagcaatacttaagcaatactaaaagtatgtggaatgtaatcttagtttctcaattgcacacttatttctaaatataaaatccttctaagatttttttttctcaagggttcgattcctgtaatgaagactgtagtttagagtcacacacagctgcaatgaaggctgggcgctgccacgctgctgtgtgtagtgacaggcacgtcgtctggcagcgtgaactgtccaggtattagtttcctcacctgcaaagtggaattagtggtaataccctttgggttaatttaaaaacgtaaagtaaaataatgcattccagggcttagcagaatgcacctagtaattcctaataaattgtaggcatttttctttgttactaccaatcattctttgtctccaggtcttgtttccattcaaaacaatttaatatttttatcaaccttaaattctgacagtttttgtgctttctatttatctaaaatcaactttagtggaatataatttacatacaataaaatgtatctattttggtatacattttgacagatttatacacaccttggtaaccactacaaccattcagacacagaacatttttatggctccaatcacattccttgagacttttccaaataattttcccacttcagccccaagcaaaggcaaccattggctacccttctgtcactatagattatatttgcctttctagagattcacataaatggaattctacaata

SEQ ID NO: 32392 - DNA, 3426 bp, Bovine  19866880851865
  misc_feature (1)..(1): n is a, c, g, or t
ntttaggttgtttaagtaataataaaaatttttcttaatattattcaattggctgattgacttaataataaggaatttattttaaacatcgtgctaaatgctgtgtatttaaagaccagtaaaaaaataaaaactggtttcaaggagtttgctatattatttgttgtaaagtctttttcatatttagaatgattctgttaggatggatttccagatgtaaaaaatataagtatgaatacagtaaagtctcttgatttcttaaaaggatataccagttcacaattctttaaaaatatatgaaatttattttttcccatcattcaatccagatccttatatttaagaagtcaattaacatttagtgaacatttaatctatgctacatgtcaggtcctgcacaatgaaataagaatatagaaattaagaaataactgccttgcctaatcgagtggggagaacttgtatggaaactattacttagtgccatagctgagctatttagaaccatgggaaccagaggaagagatgattaattctatctgacaagttatggttcataaagcttatgatattttgagtttggtctttggggactgagagggggtttttctgagttggcatggggataggaatttcattaaagagtagataaagtgcatgaggtccaaattgtgaaagtttatggcatctttaaggcaactgtgaattgtctgttttaggccagagtccaggaggaagaaagagcaagatgataacaaaactaaaaggtgtcctggggccagatcctggctaaacttataaatatgctaaggtaactgaactgaaaaaaggagtttaggaaagagggttgatgtaatcagatgtgtacttagtaagttaatactaccttcattgttgaggatcgtcaggagagagtagaaggagtcacggattagtataaggcaccaagcgtgagcgatgaggataagagccatgtagaaattttaggaaaatcaggactactgagattgagataatttctgaggtaaatttcaagactcaggtaacaagtgactgcaagtgcattgagaaagaggagcctgggattctgtctctctcatttgaaaccccaaagggatacaggtatgcaacagtcttattaggaacagtgaagtgaagtgaagtgagtgaagtcgctcagtcgtgtccgactctttgcgaccccatggacagtagcctaccaggctccaccgaccatgggattttccaggcaagaatactggagtgggctgccatttccttctccaggggatcttcccaactcagggattgaacctgggtctcctgcattgcagacagacactttactgtctgagccaccagggaagccctctttgtgaccccatggactgtagcccaccaggcttctccatccatggaattttccaggcatgagtactggagtgggttgccatttccttctccaggggatcttccctacccagggattgaacccgggtctcccacatcgcaggcagatgctttaccatctgagccaccagggaatctaagggaatcttaggaacagtacaagagtacaacaacaaaaatcgtttttcatgagggggaataggaagtaagttcacatgtgggtctctggatgataatatctagcagagattatataagggaagttcagataaaaattatggtcctggaagatatgagagaacgagggagtctgacatacaaattttcatgccattaatgtaggggtgatatttgacgttattgggaaaaacaggaacgttcagtgaaagcatggaatgtgaaacaagaaataagcctgaagccaaaattttgagacctccacatcttcaaggggctgagtgaaggaagaaggggcaataagcttgtggggaaaattagcacaacagtctcagagtctctcagaggatggagactttcaacaatactctaaggcagttttcagtagtagctataaaaacaagcatagaattattttttgagtgcaacaaaaatctgaatgctgaatttaaccgggaaagttcccatggtggacatgatttgaaaggtctccttgttaaagatgggaggtacactaagtcaattgattgaaaggacaattctttcaggaacaccagctcatttcaaatcgccaaggcactgtgccctcaaatacgtctgcacagtctctgatacaacctgaacacactcccacccagtaagaaaggctacctgtcagtaaggacttgggggaagcttggtgttccaaggtgtttacctgtgttgtgtgatgaatgctctcactgtctgaatctatctccctttcagacgagtgtgagggcttccagcactcttgagattggtggctgctgacactccctggacagtcttctcaatcttcccaagttttccttgtgagaatttcttggtatggacttattgggataccatccttccttccacttactgactggaggagtggtgccagagagcaacacagattgtaactggtttaagtaaacctccatttctctggactataccctcagtactcttcagctcatcaggagctgacctcctctcttcttaaaaagatggggagcaagtagacacagaagagatcaacctggagagtagaaaatatcatggaatctgagactaccattgccaaaaatgtctttaatttcagatgtgagaaagggtaaaaactggcatcaaagaaattgatgagcagactcagtatggcatatggccagacgcctcaccacgccttcatcaagagaggcagtctggttgctctccctggcatccaggctggctgcaagcatttgtctggtcaaacgaatgtggtagatgtgaagccaggtcagaagatgacttgcggcttctactcagacctcttggggcactcatttctgaaccccatctgccttgaggatagggaaacctcaggggaaggcgatgatgcctttgccagcaaaagcccagccagcagttacaccaactgccagccatgttcagggctaccccggaagtggatccttcagttcctgctgagcagccttgtcgggtgatggtgcgtggaacaaagacacacaatcacccaggagccctgtcccaaatgtgcatcatgagcaaaacaagctaaattcttgatttaatttaccaaatatatgaatggtttgttacatggcagtatataacttggtccaaatatttccaattgcctaacaatctttccaaaaaattagaagctaacagctaaagttgtaacttttccaaagactaacaaatctaaagccataaagactcagcaatggaagatgtaagatatgaagtatattctattaataccattccttcttaacaactttccagttattctttatgaatttatatcctgaaggaggaaaaaaaaat

SEQ ID NO: 32393 - DNA, 3537 bp, Bovine  19866880866184
  misc_feature (1)..(1): n is a, c, g, or t
ntaggaacatagggatactgtctttaaagtaacttttttgaagcaacgattccatgcatcagagatgtgaaccatggtggagagggctattaacctatgtattcacaccattctcaggaatatgatacaaaagtgaaagtgaagtcactcagtcgtgtctgactctctgcgaccccatggactgtagcctgccaggctcctccgtccatgggattttccatgcaagaatactggggtgagtggccatttccttctcaaggggattttcccgatgcagggatcgaacccgggtctctcgtattgcaggcagactctttaccgtttgagctacgagggaatccctgatgtctaaataatctgcttaaatgaaaattgtagtgtcatatattgacaatagtcataatgaatttttaagaaaaaatgttgtgtttgtattttatagaatggtttgcagtcaaaccaacagtgggagaatctactctcgatcatcgtcctgccaaagcctctgggaacaagagcaattcagtcgtttcaaaggaaagacccgctcctgtgtgttgtaagttttttagaaggttttttctttttttttttttttaacttgttaaaattgatatttttcttttattttgttcatttaaaatttttaaaatagtaaaaaatgttggtctaggcattcagtctagaactgtgcaggaggttgacgtgctgtgtttttctgtaggtgctgcgagtgtgagtacatcgagggctaagaaacagtcaaaacaggggaaacccccaagccagggtgcccctactttcttctatatgagccatcccaatactgatttctgcttaaaaaagtgagtctgatacaggggaagcgcattggcagagctcaaaacttagttctctagcaggtggatgatgaatcagtcctaaggcagacacagacaacctgcacacctggactttccaatcacttgttttacaaaaagccacaagtttaaatcctgtgaattcagaaagcactgtataccacagtatgctgtagccacaccacaggctaaagtcagtctctgcctgacaattttgtatagcctgcaaatgaagaatggcttttacatcttcaaatggttggaaacacaccaaaagaaaaacggtacctcctgacacgagaaaatgcgatggaattccagtttccatgttggtaagtagagctgtactggggacacagccacgcctgtgcctttgtgccttgtctgtggctgcttctcatcgagagcagcaggctggtactggctacagagactgtctggcccacaacgtactcagcaaataaaaagatgagggcaatacaaccaatactttttaagacatgttgaggacatttgctaaaaaaaatattcactatgtatcagaaattcaaatttaacagtgtcccatttttatctgaaaacactactcaaagcttgaaatataatatttactgtcatgcccttgatgaaaactatcctgtggactctctacagagcaggctgactaaagtgtgaagacagatttcttgggcaagatggggtgaagagggatttcttgggcaggatggggtggaagttcctggcttatataagctctgggaaagcaatgtcaacagattctttgtgtttttttttttttaaatgacttctcagaacctttcatatgctaatatgcattatgaatattaaaagggaaaggtatagaatgaagtgttttcaaactctatctgatcacatggggcttccctggtggctcagcagtaaagaatctgcctgtaatgcaggagacgtgggttccatccctgagtccggaagatcccctgaagaaggaaatggcaacccactccagcattcttgccgggagaatcccatggacagaggagcctggtgggctacagtctgtggggtcacaaaggagttggacacgacttagcaacttaacaacaacaatttgatcatacatcactattatttagttttgttttgttatggcttgatagctcggtcggtaaagaatcttcctgcagtgcaggagaccccgggtttgatctctgggtcgggaagatcccctggagaaggaaatggcaacccactccagtatccttgcctggaaaatctcatggacagaggagcctggtgggctgcattccagggggtcacaaaatgttgggcacgactgagcgacttcactttcacgtttcacgcattggagaaggaaacggcaacccactccagtattcttgactgtagaatcccagggacccgggagcctggtgggctgccatccatgggatcgcacagagtcggacacgactgaagcgacttagcagcagcagcagagcaactaacacttatggcttggtagaacaactgttccccagagcacactttttaatattgagaccttaggccagccagtgcctcaaaatacatcaccacataatctaacagaagtgaattccaatgcttctatgaggaaaaaaaaaaaagagcagttcatagtttcccttttagattctgagaacacatcctccccttccgcctacctcgggctccttccatcagggatgtttgcagtaaacgttccagcagggtgggagctggaaccccgcgggctggggtggggaggggtgtggtgggcagggaggagattgcagtggcctctctctgttcacctgcctgcctccacccctgtaatagagctcaaagggccagactggagactggggatgaccaaagcaaaggtagaaatgagccaaagcaaggctttctgcctgtataacaaacagatgtcaggtgccacgcttaaaaaaaaaaaaaaaatgacagttgcctactgatatctgagttgctaaagagtattcttcatttctgttgtcttttcaggaaactttcaagactcagaggtgagtttttcgaaaaactgtatgctatcgttatttcagatcgggactcctagtagcatggcctcttgctgttccgtgtttaacaacggacgaactgctataaataactcgtcccccatcttgcgctctcatgaggcctgattccctcccatttccgcggtcttgtcttctctttttcaagatggccgccaggtgccctcatggggccgggcagcacaggatgggaagacatgagcttttctttctccttgactccagcctgttgtagatcctggggctctctcaaccgaggcacaacaggaattaatggtttgggtttgactttggtaattatatggatgagagccccttttcctgggctttacgtcatttctccccacatttgtgagatggatgccgttttcggtcatttctgataagagcagagtgattagtttggataagctaacagaactgggaaattaacaggagcagaggcaacaaccctccactgaaggaatttaaccctattttaccacctgagatggcacttggcactgaatggtactgaaatcacaggctgttcatctggaaaagtttctcaatatattgatgccgggggtaaaaattaa

SEQ ID NO: 32394 - DNA, 1305 bp, Bovine  19866880869980
  misc_feature (1)..(1): n is a, c, g, or t
nctaacgctttttacagataaaataaggcaattatagcattataaaatgttcagtttttactcacattaagagacacagggagtcattgcaaaacaccaaattaattccattgtatccttgccaataaagcaaagatatttagatcataaatttgtcgtgcacgttcctttgggggaaaaatctaaatagctacatcacaaacactgaaagccctatcccagcatctctaagtgtgtttgtgtgtatgcttgtgcatgaaagagagagaaactattacctaaacacacttaaaaaccactacatcttaactcaggcagggttggcaccacttaactggctttggtcatgtggttaaaatgactacttagctgtgtttaaaatcagagcttcctatgttggctgctcatgcagattccgcctagagaagcaaaaacaatgacccgatagctgagacaagacgttagggatgggtgttgatgaaaagatttccttgtattattttcattagatttcctgcttgcctcatcaatgcttcatacactgggtgccaaaaagtagagattacttttatggagcatcttgtgaaattatttcctgtaaaatttgatgatcttcgccttagtgatataacagagcatggtcttttctgcaattagagacaaatgagccgggatgtgcgtaatcacaaaatgccctagggacactcgcttgaggcaagcttagataagctcatgtccatctgtggtcattgccttccaagttcaagcatgatgccacccaccactgtgttgatagtcctgctatcagtgttccaaaagatagtcatctttgctccgctatgtgaaaaggatatatatctactttttattagtagcccctatcatcaagttctgtgtgtttctcctttggcctaatcctgacacccaagcggccccatttcactctatcttgaggtttctcaatgacagcatttttgacattttgagctcgataactctttgttaaagaaaactgctgctgctgctgctgctactaagtcacttcagtcatgtccaactctgtgtgatcccaaagacagcagcccaccaggctcctccatccctgggattctccaggcaagaacactggagcgggttgccatttccttctccaatgcatgcatgcaaagtcccttcagtcgtgtacgactctgtgtgagtcccagagacggcaggccaccaggctcctctgtccacaggattctctaggcaagaatactggagagggttgccatttccttctccaaaaaaaagcgaggccaaaga

SEQ ID NO: 32395 - DNA, 1800 bp, Bovine  19866880870886
  misc_feature (1)..(1): n is a, c, g, or t
ntcatttttaaattcattttctctatcttattttaaaaccaaaatcccagttcaatgacaaggtcacctagctgaaaatactcaacttcattttggttctttaggattaattttatcagctgatattggttttgagctttcgggagctattgtatgttattttctctttatcacccaacttttcactcagtaggagcaaatccagattctggtctagattattttagtatttagctactgtttagggaaagtccttgtcatgtaccccaagtgtctgagaatgccatctgatttagaaggcacacctaaaaccaaggaacaaatgaccgatttccccctcagctcactgtgactaagagggagtgtttcatcttcacaataagaggaaatctcatttctttggaaaaaaaattttcagtgttatctctactcacattgcctaagaagaaattataatagcagattattttgttttaaaagaaaggatgatatgacgttataaaaaaattgtctcttaaaaaaaaaaaaaagatctctgagtcagcattaagggcagatttatttgaaatggcaatgcaatcagagaagcttgaaaagttctcagcaatgtgtccatggagtgtttataaagtccatttcaagtctcatcttcatgccctactgcagagttaaaatttgtgactaattacattcactatctgaattcggtttcttttttaaaattcaaagcagtttgattacttttgtctttcttaagactcagaagaaaaagcatgttcatatgctcaatgttttataataggacattttcttgtaacgaactgaactaataggcttaagaaactattataatagagaagcaatttctcagttaggtgacttttatgtgaaaatgataatacataacaatttcctttaaatgattttttttcttcccagaatggatcacagacagacatcagttattggcatattcatgcatacatatatatttttgcctgattggctatagtgaaatttgtcaaatatatttattgttacattttgagaaagcaatgtaagataggaagagagaaattatgtagacaagcaaagatagagtcaatcctcaaaagagtaatatgatgaaaaagctaacataatggtagcttaacatgtaaactatgacctagagaaaaataatgggaaacacaagcaaattcactggttagttgggttagaaataataacgcatatagttgtgttacatgaataacatgactgaaatagtcactttcaacaagttgtgctaatattgccaaagtgggaaggacaaaacaccctttaaattttttactttgttttttagccaatattatctggaattgctcatagaatatttattataaattaagcacttgtaatatgaatgatagggccattatgcacaattattctttttcctagaggaaattttgtttatggcatcaaacatagataaatcacaccatagtacagtcagcagtctttatcagcactctgagaaccaggaaatgaagcaactcaacacagtttgggctttaggatattattcatattgaaaagcatgtttggttggaaagaaaactgaggtagcactacttcttatttattataataacatgatgcaatgtcttcaccctacaggtctattagattgctggggaggactcacaattcaaggtgcaaacaggaagaagcacatccattgccatctgtagataaacctgagtcgggagtcatctattgtgcatcaaaggagaacaattatctgcaggacat

SEQ ID NO: 32396 - DNA, 749 bp, Bovine  19866880882741
  misc_feature (1)..(1): n is a, c, g, or t
ntctgcagagctggcatagagagcttggggtggctgtaagaaacgtgaaagtatttgtttattaaaatcaaaatggatttttctgtgttgtaagacacatgaaatcaaaccacaaaaaaaaagacagtgctttgcaataaattagggcagtataaccattgtgcgtttgtacatgctcagttttgtctgactctttgccaccccatggactgtggctcaccaagttcctctgtccatggaatttccaggcaagaacactggagtgggttgccatttcctcctccaggggatcttcacaacccagggaccgaacccggcaatgtaagtgtacactttaccactacaccacctgggaaacccattaacctagggatatttatataagcatatgtgtattgcttttatttgtaagactttattataattgagatataatccatgcatgttctttaaaatattttactcttcgggcttatgaaattattgttgtttataaagcctcaaaaacaaggctttttgctttttgaaggagatataaatctcctgctttatgaaggacatataaatcaaaagctccaagaagtgttatgcactaaaaggggaattaaaaaaactttttttcctcaaattagattaactatttaagccaaaacaaatttttctctagtgtctagaccaggctttagaatttctgttttagaataaaaatacttcagattatgtttctataacacactattatagcacat

SEQ ID NO: 32397 - DNA, 1005 bp, Bovine  19866880906442
  misc_feature (1)..(1): n is a, c, g, or t
natgtgttttttctccatttcatgtccttaatttcccaaacttgtttgtgatctgtcaaagcagtgacttgaaaggattgtctgactcctagggttttaccataacaaaatttctgtttctcctaggatcttgctctgaagagcacataagtctaaaaccttgcattgagtttcaagggctttaaataatagggttgtcttagcaaaagaggtgattttccttagggaagagtcttgtccaggagaggttggactcctgtgtctatccacttgtatcattttgtctgatttaagattttaacagttccctcaaagtgagattcatcatataaataagactttatttaccaatacatctgaagtgaccgagatgctaattgctattgaattatctaattaatttttattttaatgcaggctctgaaccaggttgtcctttgggacaagattgttctgagaggtgataatccgaagctgctgttaaaagatatgaaaacaaagtattttttctttgatgacggaaatggtctcaagtgagcaaccctttgtcattttttacatgcgatgctatgtgaaggggagagaaagacatgatgtgtttttaaagaaaaatgttacaggctaaaaagaaaagttgatagagaagaaaagtatttacttagctctgaactggaagattgagcagaaacagtgctgtgcaagccggagcctaagcgctcggctctcttgccctctgggaactgaatagtcagactgggagggcctggggcttctgctctcagcagtgcagtgtcctgggctgctgatcctgaggtgggactgttatccccagagggctcctgtagggctgtcagaggaactgccagggaacctgaaagaggaagcagcctgttggtccaggatttgatactgaggttcctggttttggttcacttaacctctctgaacctcagcttctttttgtacaaaataaagaagatctttgggtccgcttggctcaagtct

SEQ ID NO: 32398 - DNA, 2784 bp, Bovine  19866881013248
  misc_feature (1)..(1): n is a, c, g, or t
naattttaaaatgcacacatacactgcctttctattttaacatgggaaatttaaatcagcagaatagaaaagtgtaactgtttgcacattacattctgtcaaggataaaactattatcatttcttagtttcagaattggacttactatagcagggacaaggtggactccatcgtttctttatcactgacaccctataactgcaaataaaaacatacatctgaaatgaagatgtttcatcacacacacacacacacacacacgtattagtagaacaggaaaatattctataaacagtagtggaattcacaagaatctatgctgaacaatcatgctgctaagtcactttagtcgtgtccgactctgtgtgaccccatagacggcagcccagtaggctccctcatccctgggattctccaggcaagaacactggagtggttgccatttccttctccaggattgctgaacgatcatagtagggcataaatttatcatcgctaatcaacttgaagcataaaaaaataaagttagtaatttcatgatgaatatgtttatcatattttcattattacccttttgatgtcattaaaggaaactcatggtgaaaatgttaacatttaggatatgtatcctatataagtagttggcatgaaagacttctcatctatttttaattcttcttgactgtgaacacattggaaaaatgttctacttttgaaagaaggagaaagatttgaaaatatttccttgaacacgaagtgtataaatgatacatatttcagaaactgggaatcacaactcaatagttaaaaagcaatatagagcagtaggaccaatagttaatagttttataaatatctacaatattttataatttaaattttcttatatggttatctatgtaatatttatagacatatctaaatcttatatatctatatactacaacacatattttataggtatagatatatctataatatttttaatcattggtctaattactttgaaattttcagctattgaattgagattttcattttatttatatacaacgctatattttatacccaattttatatacaagcttatatttatataagcctttcacttgcctttttatgaaatatactacttaagttcctacatgtatgcatggttatacaatatttatttatttatgcaatcccagtggcctttaattttctgatgtctagggtgtcaatgttatctgcagtcaagcaaaggtgtctaggttaggactggatgaatatacacagcacactggtccacaggggcctgggattccacaaatgcctcattcccagtccacgtgatctgtcttgaaaatctactgggttccagtgggtacaccattttagtttctccaaaagaccttaaaagtatagtccctgttggtaagatttcacaaggtttagtgtggagttcgttcataagagcactggcttcagactgatcttcagaaaagttgtttgttgtaggcaattattcttatttttaaaatgaaggaggagggaaagtgggaggagagtgagagacggtaaatcagaatggggaaatcagtgatttatcttactgagctctgagttctcatttgatgagtgaaggaccttaatcaggtcatgatttattgcttcacttctgttattttattaatatgtccagagctatatatcaattcctaatctgttagaatataggatggattttactacctggtaagtaatttgacctatatggagaattatttacataggatacagttacaataattaatacaatatttagaagtattttttccaaatgtgttaaataaattttattataaaaaataccccatcactaagtatcttccacaagttagttaccttatcctttattttaaaggatattttaaaatatattctattaatatctgtcagcaagtatgaaaagcagcaaatcaatcaaattagactgaaggaaaatagccccaaagagctgtataatcaaaactgaaagggatccccattttttatcccagataaattatatgcagggacttgagctccaagaatgcattcctaagaaaaaacaaaagagttctgatatagacatttagtacaaaatcacacttaaaattaccagtgatcttgatatccagagttgaagagaatgtatatcttttaaagaagttggccttcttatttatgtgacactaaatggctcagattcaaaattgccggcagctcctcattccaaggagcatttggcaactcacaagtctgacagtttccaagtgcactgtgttataatggatcttttcagcccaattcgaagcaaattttcccacataaacttaaatttctgctcttcaccctgatctcattttcagagagcaactgtctgagctgaaattaatatatccactttctaaaagacattcactgtgttatatacgtgaaagttgctgagaagagatcataaacattcttaccaccaaaaaaaaaaaaaagtaattatatgaggggattaatgttttaactaatgctgtggtaacagtgtagtaacagatatgtgcatcttatcatcatattatatatctgaaacttacacaatgttatatctcaataatatctcactaaagctgtgtgttgggggagacattcacacatgataaaatgtaatcttccacagaaatcaatcatgggagggtgcatgctcagtcgctcaggcatgtccaactttgattgactatatggactgtagtggccaggctcctctgt

SEQ ID NO: 32399 - DNA, 1486 bp, Bovine  19866881054396
  misc_feature (1)..(1): n is a, c, g, or t
nagaggactcctacactccctcaggccaaattatttgcttcctccctgatactaatatatttttaccgtggcagagcttttcagatatttatatctctgtaccttctataaataagccagtgcacagccacccaatggaacttcccgcaatgacagcatggtgtctatgctgtaccaagtgatggccactagccagtcccatgtggctactgagaagttgaaatgcagccagtgttgcccactttattttaatttgttaatatttaaatctgaacagctacatagggctagtggctagcatattgaatagtgatgatctagtacacagcaaagaacagaacaataactcctcaaaaagttcactgaatgaaataattatccatgaaaaacatattgggcaaagaaaaaacacttgtatagccccatttctggttttctttttcaccatatacagactcacattggtttactatattaataaacatgttcagtaaaatattgctttactctcaagtctatcccatatttatcttgcataataatatgtatatatgaaccacattgattttatcttttactgtaaaagtttttaaaggatgttaataattctgatgtgcaaatatttaatttataattgtgcctggtctgcaatccttttttaatctatatctttcactgataaatctcaagcgactagctcagggcctagaagggattcaataaatacttgtccaatgaatgaatgaatcatgcacactggggcatccttgtgaagtgtgatgatctaatttacaagttaccttcaaatattatgcaatttttatgaacacaatgtaataattaaggaaataggtacattaaattttgtagacattaagcatctattcatcttaattttgaagatttttttccattggaagtttggaaaaaaatctctattgtttccattttccaaacaaaaacagtctttgtcttctgaaacgtcctcaacctcctcaaaatgattgactacagaaaccacaacattcaaaatgtcagtttctaagggaaagccggatgggagtgagagtgttctaatcggttacttcttaaagggtaaaacggagattgaaagctccgtccaaagtttaagctcctggaacccagtcctttcccagtgggacccgggatgcgcgtccaccaatccagggtagcaggaccccaagctggagcacccgtgaggccgggcgttcgccctgaggccccgcccacactaggccccgccccagcagaggccccgcccctaacggtgctgccatagaaacccagaaaggccattggctgccgccggccctagaggagggcttttgacacagccggcggcagcccgccctaagacacggtcagttttgccatgtcaagcagctcccaatggagagaagcctaagaagtgtctggtctatcctcatcccccgaagagctcccgcctgtctcggtcggttctgcg

SEQ ID NO: 32400 - DNA, 454 bp, Bovine  19866881077099
  misc_feature (1)..(1): n is a, c, g, or t
naattattaaaagatattattactcagcaagaaaatcaactattatatcccactccaatttgaaatgagtatgccaagtttcataggtgactcatgacataaaccttagtaaccttttcaatacaaggaaacaagctgccaacccagcacatggccacacacgcatatacagagaaatccaagatctcaggaatacacctcttcaaacaaacttttcaacagttaaaagtgtcagtgattgctaatttaccttttccaactgtgcccagttatccaacttgacttttaaagaagttccatttttaaaggatgacaatttaaggtcccaggggtaataggtagtaaatatttctgctatcaggaagccatttgaaaaatccctgttccatagcgataaggaaataaattaagtgcagttacttatacaatttgtatttagtgttaattcagttca

SEQ ID NO: 32401 - DNA, 809 bp, Bovine  19866881122842
  misc_feature (1)..(1): n is a, c, g, or t
ngaatgtcttggtcaacatctacaccccaggactatcaggatttccaggcattcgtggtgacctgccaacacaaagtacaggtgagtttgcgtctcctgaagacctgtccccccacctccaacacacagctgcccacccccgccccgccccaggcttctccctgcagcctcattcactatgcctgtggctgaaggagctttctccccttgtcccttcaccgggtcacagtcacctttgctggctgcctcgtgtgtaggggaaggaaggcaggactccagctggggtttggcgccgtattccaggagcagctctgtgcagctggtgctgccctgtgagcacgcgttgaataagggggtcacgccatctatggtgatcgcgtttacctaaaccaaaccagagctctgagaatgagagtcacagaaccactcgccattcctgtcaggcatttaaaacaggtatgtgcgtagaaacagatattaactgagaaggtgtgtgcagcaaacgtgacagcaaacatattaactgagaaggtgtgtgcagcaaacgtgagctatttaagctcacacacacatccgtaagcagagcttgaaaatgctaagggataaatagaaacatgatgtggtggataatccacaggagtgggcatgcaactagtggaattctgagaaaaaaaaatactctagaatcaaatacacagaaatgagttaaataattaggtactttatagttagggaaaaaatgtacaaatgtaatagtgatgaagccactttgctggctggcagcatgaaattggaaatcttatttctga

SEQ ID NO: 32402 - DNA, 1519 bp, Bovine  19866881172119
  misc_feature (1)..(1): n is a, c, g, or t
naaattcagcccagtctaaaactagactttctctccttgctcaagcaagcacagacatattccccggatttttcctaatatgaatttgaaaattgctccaattctttgggtgggaaaattacatcctgtggctttgtaatctccctttctctgtcccagtgtgaagagactaattaagttgtagatttaggtatcagggtggtgatgaaatgtaattccttccactgaaatgtaattccttccaagcaatgagattctgagtctttaaacaaggcaggaacaaactctctgatatggaaagataattggagttagatccctttcctttacttagaagtcatactagataatccagttccactgccagaagttccattattactagctgtagccctaactgtctcacaagattctgctaaggttataaagtcaactggtgtggaaacccacaatctgaagaaatatatagcacatttgctattcagctattttagttctgctcttgataagaaattatctagcagtcctgggaagccccttggatttagtctatatcttgagagttttaaaaactggctaatcactttctgtttttaatctttaatcttttaattgtccatagaatcagctatcaaacccataacataaatgctatttcttggcaatggcaactcagcccctcacctccttgcctttgatggatacttctgattgtatctggtttagctgtttgccactgcatgccataagcaaacacgtttccataccttaatactatctggatgccacactgccttcaagctcagatgactaaataacccatttcagatacctttccatcctctggggcttctgactgcaaccactcctgatcaatttctaagtccacgaaaatatttgtatttagggggaaaaaaagaaaccactccaacgctagtgcaaatagtttaggatctcacacaaaaggaaatccataaggagtacaggcttcagaatcacttaatcccctgaagcaggaatgtcagccaggtcttggattatttgtttcttctctctcctttgcagagttctggattcctcctaaagctatctcacttgaggttctgggaagtatcagtacaggttctgcaagaaaaagagtgactttctttggctccacgttgtgaataagatcttgggtggaagcctctagcagactttcctcctgtcgttttgccatgtgagtaagttaaatcccttaatgtacattcatcattgtgagttctgcttgtaaaaaatcttttctatttgaaacaactcactggagtaggaatttctcttttccctctgggctctttattttttgttataaccatgcagccaggttagggtatgttctattaagacacataccgcataatgttttcaatgtgataattcctaatgttcaaaagataataaataaatgtggaatgagtgacaaagactgctgtttgagaaatcttccctgtagcacccagagatgccaggatatgggcca

SEQ ID NO: 32403 - DNA, 1969 bp, Bovine  19866881197561
  misc_feature (1)..(1): n is a, c, g, or t
ncaatacttctttttttgtgttacgtggtagctcagggccagatctgaatcctatcgctatactgtgcactaaattaattttacctcttacattatcagattttctattcaaattttacttgtaacatgataatacctatttgtcttccctgacaatatttatgtttgtaaaccacttttaattagacttttaatttttcttatgggttactgggaactctttaagggtattagctgttacatgttagcagatgatatgataatgttataattctattttttatctttaaaaaaaatttaataaaaaaatctttattttttttaggtaccctgtgctgcatgtgatatcctagttctctgatcagggatggaaaccatgttcccgacgcgtgctgcaattcatggggttgcaaagagtcagacatgactgagcgactgaactgaaatgactgaactgaacattggaaatgcaaagtcttaaccactggactgccagggaagtccaatcatgttagaattttagaccaattactattagtccatggggtcacaaagaatcggacacaactgagcgactgaactgaactaaactgttaggacaacaagagaaataggttagggataaaggaactagagaaaagaagactgaagagaaaatgacaacaaaatccagtgaattagaaaatgaattcagagaagtaagtgctggtagacagagaggagaagacagaagttagaaatgttcatgggatagcagtcaaatggtttggttgccagttggatgtgtttattcaagataaaggaaatgaaagaaggcaactctagtgtctgccttggaaaatctagtggttggcagatcagggacatagagggatcagtgtgggaagaacatttggagcttgagatgatctggaacaagtcagtaaacacattcattgggaagctggatatacagaatgggaatggggagaggcatcctggagatagagtcaccatcctatgattaaggatcaaagttatgatagtggatgaggttgtccagggagaccaagtagaattagaattagtggaggactgtgttttgggggaaattgatatttaagggattggcagacagagctgacttcatgatataaattaaaaataaaaagaccaaagaaggaaagtctagacaaaatcaagtttcaagaagaaaagggctcttaaatatatcacccagtagacaaaagttcaagtaggaggaaaggtgaatggggtctattgcatgattagaagactgtgcgtaacttggaccagagtggttccatggattggtgacaaaaaagactgattacatgaacgtgaagataaattaggtactcagtgcatttatttacagaaccacttgaagacaattacaaacctagaccgagatcaacataaaaaagaaaacttttgaccgctataacatgaaatcgatacaaaattctcctaataagatatgatttaagatcctttaaaagtataatcttaaggtacctattactcaaatactgcatacagtgggccaaaggagaaacatcataaccactttagtttcaagaagacattaatgtcactaagtttctctcataaaaattctgagtaaatctgaattaacttagagttgaaggaaaattccttaacactgaaagaataattcaatcccaaagcccaataattcaatatcatatttaatagcaaatataacctggttttataatattaaatcacagaaataaagtaatacatattaacagaaagaaagctgaatataattccactttctggaaacacaactattttctcaaataaagaagactgagcgtttactttccatggaggcttcatttggttaccatttgatgttggtgtagatagttctgttcatgtttttctggccagggcagaaagacttaatatcgtctcttctattatcatgccagcttca

SEQ ID NO: 32404 - DNA, 1571 bp, Bovine  19866881222929
  misc_feature (1)..(1): n is a, c, g, or t
ntcaaatgagtcagttctttgcatcagttggccaaagttttggaacttcagctatatttttcaagttaataagataaaacataacacattctatgctgtatctcattaatttgaaaaaatacagcagtttcatggttaacttttattaagtaatgttcatagttaaaatttattattttattgagttttattaggcctctcatgtccatactgtgaacatactcatatggacacattatatttatcaatatatgcaattaacacccaatagaatccacaagtttgataattttaaaacttagaatcagcgagaataatgaaaaaattcattttcatcactaaacagctgtttaactgagcaaatctttactctcagtaggtggcagatatgatagtgatctaagcttgagccagtcagtcataggtgaaccattagtaatctacaggctgtcatagatggttccttgaagtttattctaagtctaacacactgtgaatccaatttaataggattccccgaaagaaagtatctcaaccagtctttttttttttttttttgcagccagtcgaatataagaaatgcctcatttcttccataatttgcttgagtgatcaaattatgaattaattgaaaacagatgactatttctggctttcccagaatcaaatgtatcgactttcctttgtctggttaagttctgcttagttcttgctaagccataattaataagctatgactcaaattttcccagacatgttaatcgcatggcagatgtttgctgcctaaagggatactgtcttgtaaaggatagctgtaaatagaagagttaattaagcctaaaatccacttgttagattgacatgaaagtgtggacttaatactattgtacaatctagcaggacttgtgctttgaccatattttattaagtaaagcttaaaaaccttcattcaaaaaggcaaattattttttattataaacttatttgttttaattggaggctaattacaatattgtattggttttgccatacatcaacatgaatccaccacgggtatacacatgttccccatccttaacccccctcccaccttcctccccgtatcatccctctgggtcatcccagtgcaccagccccaagcatcctgtatcctgtatcgaacctggactggcgattcgtttcttatatgatattatacatgtttcaacgcaattctcccaaatcatcccaccctctccctcttcttttctttccctttgaggtacattttgattatagagcacgtttgcacttattttctttcatgctttccggaatattaacccatgaaatgaaaagacacttactccttggaaagaaagttatgaccaacctagatagcatattcaaaagcagagacattactttgccaacaaggtccatctagttaaggctatggtttttccagtagtcatgtttggatgtgagagttggactgtgaagaaagctgagcaccaaagaagtgatgcttttgaactgtggtgttggagaagattcttgagagtctcttggactgcaaggagatccaacca

SEQ ID NO: 32405 - DNA, 1024 bp, Bovine  19866881234491
  misc_feature (1)..(1): n is a, c, g, or t
ntagctgttgagaatgagcaagtcttctgttcttaaaaacttgaacaaaattggaaactcagaaacattattgacatttttatttgatttaagataatttctttcacagtcacttaagctttcatttacacttaaaagctgaggaagctgttcccaagtaaatcctgcaaagctctgatacagaagtatttcagttcagttcaactaggatttcctgattccacggctggagagtccagaaaattataggaggattatgaacctactctcaaaggttaatgtaaatggaaagacatagcatatacatgcatggttccttcacacaggtttatgtgttgagaaccctgtgtggtgctggaacataaactaatgtaatggtatgcttgaattcctgttcaatggacaggaatttatttaaatcttggggaaatcttaatagaaaaagaattagagttatgagtattgaaactataaagcataaagtaagatgttctactattcaaaattgtaaaagattagatatcaaaatcaaaacaaagtcaaggaaatggcacagtggctcaaaaattcaggaacatgccactaaaatgaatttgcaaatatcaacagataagaggaaaacaaggagatccaaccagtccattctgaaggagatcagccctgggatttctttggagggaatgatgctgaagctgaaactccagtactttggccacctcatgcgaagagttgactcattggaaaagactctgatgctgggagggattgggggcatgaggagaagggaacgacagaggatgagatggctggatggcatcactgactcgatggacgtgagtccgggtaaactccgggagttggtgatggacagggaggcctggcgtgctgcgattcatggggttgcaaagagtcggacacgactgagcgactgaactgaactgaactgaatgggcaccacaaaatcatatgttactgatattgagatgggccaatctgcaaaaaaggataagagtataatgatttg

SEQ ID NO: 32406 - DNA, 1850 bp, Bovine  19866881310820
  misc_feature (1)..(1): n is a, c, g, or t
nttagaaacatacagatttctgttttggatttgtgtggtatcagaatgtaagttatgttggatagaatggattttaactcatggatgtgttagagagggcatttcacaatgaaagaaaacaacatttttaccctctaacttttctgaactactttgggaactttgagagctgtcgttatggaagaaattctgatgtttagtttctgaagcaatgattctatcgggggcctccatttctgcagagagtgtgcctggaaggagtatatgctttggagagatgccacggggacagagcagacgcactgagacagagaagggggctgtctgcccgcaggggactacatccccctgttttgtgtgctgtccttcttgctgggcatgatgtcgcttcagacgacctgtcagacactgtaatttctcttactccactgagcacaggagttcattgccaatgcctagacgctgcactgtgccaatctgtatatagggccaggtaaatatggagaactgtgggtctacagggacggagaatgacttttactccttgtctttaacatgtcagtattatttgaatctcattgttttaacattttagaaaaatgactctgtttttaaatgaatctctttcttcctctcccttccttcctgatacatacctgtatccagagggctagttttcaagctggttgacataactacagttgtagtcatggcacagacaattgaccttcatacatttactttgtccctaagttaagctcataaaacctcattccttctctggtatgataataactaactaatcatgcttattatgtatcaagacatctttgagtaattttatgctaaataattattttaccatataacaattaggtaagagctgatattattctgtttttacaggtgaagaaactgagataaaaggttaagtacaagatcacaaaactggtaagggacagagccaggatacaacctcaaagaaccactcaactctgctttgaacagacttctggctatgcaggtatcatatcaacacacgggatgacttctaatctccttgatcccaaggtgcgtgtgtgctaagttgcttcagttgtgaccaactctctgtgacccaacatactatagcctgctaggctcctctgttcatgatattctccaggtaagaatactggagtgggttgccatggccccctcaaggggatcttcctgatccaggggtcaaacctgcgtctcttacgtctcccgcattggcaggagggttctttaccactaacaccacctgggaagcccaaggtaggatttttaaaatgtaagctatggctcagatgatacctacagtagtttccatctcctccctaagaatattcatgttttcaccacagttatttacataattgacaacacatattttggcaatttaaaatattttatgcaattacaaaataatcattctttttcttgtaacttgaactgtgtctcaatctgacatctacaagtgcagttaattatctgtactcagaatgtctgctcagacctgttgataccattaaaatattttaaacacaagtagttacaagttctttaaagaattttatataattacttaaaaattccaagaatgagtttacggggtcatttaatgctcatgcactttccaagacatttgattccctgctccaggaaagaaggatctgttccatttcatacccccatcatttcccttcactttcctgcagctatatttgatagttattatttgtattttgtttacaggataattaaaaaaaatacatttaaacctctaaattttatttcaattatttaagtcatgtctcccatttccc

SEQ ID NO: 32407 - DNA, 1611 bp, Bovine  19866881404256
  misc_feature (1)..(1): n is a, c, g, or t
naggagttgcaccggtgactggttggcaggatttggtccgaccacatcaagaaggatccagagaaatctcctggcaagtgacctctttcatgaggccattttcaggttgggaaaattggtcaaaatttataacagatgaaattatgagatcagagttatggtgagcatggaatacaccattattagaggtaatataaaaatgtcactatgaattcatttctcagccatcaacacattttatcttttcatggatttatttagcaaagagaacatcatccagttctctttttattatctttagggtcagcaatttttctggtttacagtgctgccagtataataaagagcacttcctttcacacttaaaaaagatgcgccaattagaacaataaattatatggtcactcaaatcatcatccttaattgtcaaatccaaagccttcaattggaattttaaagtgtgcctgtgttcacgcatgtgtgaaagtgaaagtgtatgtgtgtgcttgtgtatatgtgagtgtgtatgtgtgtgtgcatgtgcaaagtccacatcgttcataaaactatgtttgaatgtaacatctttgagaatatttctgagttccattggagctatgttctattacttgccaagacttttctggctccctaaaagtttttttttaatcaaaccaggagtgcagatggtcagttctctgcttagtgacaggggagttaaagcttgtttctacatgactacaatctgctgaaatttaactatgacaggaagcttacccaaaatattgcattaacaaaacattacggattctgaaactctccaaagattacagattctgaaactctccaaagagtacagatgaactaggggagaatcctgttttatttatatttaatttctgtggtatcgctgttctactcctgtacaggtcagattttgtaatatggtgaggaaacataaaaaaatgatcactttcagctgactccaaaatacttatctcaaagatagaaatatgctgatttgatttgtatttaatcaagaaagtgggcttcctgtttagaggtataattagaattttctttagatattacctaaatattttttcataatacaaagtttacctatattgtctgctgctgctgctgctgctaagtcgcttcagtcgtgtccgactctgtgcgaccccatagatggcagcccaccaggcttccgccgtccctgggattctccaggcaagaacactggagtgggttgccatttccttctccaatgcaggaaagtgaaaagtaaaagtgaagtcactcagttgtgtctgactcttcgtgaccccatggactgcagcctaccaagctcctctgtccatgggattttccaggcaagagtactggagtggggtgccattaccttctccgacctatattgtcttagaagttggtaaatgtgattagatggggtttggagtagaaagtaatggagtaaagtaattagctctgaaatttctcaaacccactatttccttttaattaataagaaaaatatatctaaataaaattaaaatcccataatacataataacacttattatacattatgtaaaaataaaataaaaa

SEQ ID NO: 32408 - DNA, 1605 bp, Bovine  19866881412468
  misc_feature (1)..(1): n is a, c, g, or t
nttttataacttagaggaaagatgaagatattttaaatattctgaagaaattaagaaagatactaattgaaaaactattgaaaaatgttccctttcttaaacagtttcaaatacttttagtttatcatattctcctctcatactcaactatggagtgaaaagttatgtacgagagaaaaattatttacaactcatttattgcataacctaaagaaatttaggcctccaaactttagtctttcttaataacagaagtagctaattgaccattatttacaaccaaaacctaattatttggaagatgtgacaatagtatttttttcagaattatattttgatatttttctaagagattttgtaatctaaacaaaacttttataatgatacaaagttataaatacaatttagcatatgaatcatcgtgttagttatgctaaatcattatggctaattctcctctgaaaactttccaggaagagtttgatctttccttcttagaagatgatcctgtatttagagaatttaagggccctctagttgagtaacaaaaactgaacagctgatgttttgatggcagttgaactaaatattttgtagctatttcataaaaaagaaactctagggatttccaactagtaagtgaaggataagtaaaatatgaaaccttttggtctaagaggtcagaaattatatctcaagttgtctaaagctatgattgcttctcagatatgaaaactgtggatatgggaagacattataatagatttctaaaaactcatggttgtttggtagaaatatttgaacttcttcttgagtatatagttactcttataacaaaagggtataagctttgtatatttcttaatgatttatgtcctattaaaagttttaaaatataatattattttacacgcattttgagaaaaggtgaaactgaataggggtaaattttcagggtgtattatgaacaaaatattcaaaatcctagattcctaacctctgactaattaagctatgctgccttggtgaatcaatttagaaagtaaggagaaaaacttcgttttaaattactcactaggtgtgtattgtggggaaagtgtcttgattgctttaagtctcaattttcttaagtatacaatggatatattaaggtaccagtagataaactaatttgttgataagatagcagttattttaatcagcagaatcataggcaataccttaaatgcattcttaaaattaaaaagtgcttatttctatgaatatcaattcacctatagtgatgtttcagaaccttgggggaatatgggaattcattgggagctttagaaatcaccggtgcctgggactcaaaccagagatttgtgttcagttgtccttattattatgtggacatcaggagttttagagattgacttaaacgattaattattagaatttatccttgcatagttttgaataagagtatgtatttacttttaaacttgatttgtaaatatcagatttaaacagcttaaagtataactagatacagcagtacatctatatttatttatatacacatataattaaatatatttaatattttattaactaaaaatgcat

SEQ ID NO: 32409 - DNA, 1015 bp, Bovine  19866881525819
  misc_feature (1)..(1): n is a, c, g, or t
ntggaaaaaaaaaaaaatactgcatgcttaatggcaaccctgaaaccaaatttctgaaatctcaagcacaaatattgtaccagatgattcctcatacattctatattctatatcaagcctcaactatgaaaggagtgctgaggaggctgggtgtcacgagattgtttttcaggcagcttcatggagtcattacctcgatgaattttccacactctaaaatttggtccatggccttgcaggcttggaaatctgatctgtcggcaaagctggagcaaagtcacatctccgaggtggacttacaactcaaagagcacagtgcaccaaagagtgatgtcaagatgcaaacatattaatttaccacgagaatcataaatgtcagatggactgaaaccctcccagggcaagccagcacattctctctctgtggacagagccagagggggagccaagtcataaccgtaaggttacttggtgatgaaaaagtggaacaaagggaataaacagtaaataaatcaaaaacaagacaggaattcagagtctagagctatgatttcccgactcaccctgacatttcacactagaagaggtgacccatcagacttgccaggcagctgaggacccagctctcagggtggcattacctgggaactacagacccacctgggtgggtaattagtccttcttctgattgacagacttttcctttaggtatgtcactgtctaattctgggagaccctaaggtaaccactactctctccgctggtggatttaaaggtaccatcaggttcattcatttcttatttttgtttattttttgttgtcattcttttctttccattcaggccactaccactaccagaaaatctagggcctcatctcctgatgacagggtctaactgatctaccaacttcaaccctgtcccctacccaactccaaagaccactactgtataaattgaccttaaattagcattttatatgttttccaaacttccctcataccagacactccca

SEQ ID NO: 32410 - DNA, 1499 bp, Bovine  19866881746683
  misc_feature (1)..(1): n is a, c, g, or t
natgtttatgaattaatccccccaaagtaaggcaccattcaggttaaaatagaaactagaaatggtatcagtatagtccctgggttgggaagatgccctggagaagggcatggcaacccactccagtatatataaaataagtcattaatgttctgcaagaaactagacactaactctacctttatttaaattatgttagcatctttggtttctatgttcaactgtttattggtatctatgtaattattttggagaaggcaatggcaacccactccagtgttcttgcctggagaatcccaggcctggtgggctgctgtctacggggtcgcacagagtcgggcacgacggaagcaacttagcagcagcagcaggtatttaattagctgcttgtttaatgaagccatttattactgcccaaatagccataatcaagggtataatgcaaataaagtatgaaaaggattaaaataaattcatcagccaaatatgagctcctcctgtacaatggagagatttattatttcaggtctggtattgaggttagcctgattgactttttggctctgaatcaacagtctattatctcattttgagataaaatctggtgagtgagagccatatcatttgttttgcaggcataatcaaggagaggtatattcatttacctaccatggcacctggcaaaacaaattactgcagcaagattcaacatactgtagtttttactcattaaacttcatactaattttctgcactgttccaggttttaaggagaactagagctttggattgttcatgttatttagacagaaagtggtttcttttacattatgacttaccccaacaaaccacagtgttttggaaaacacttatgaattgcaggagaaaaagaaaaaagaaaaagaaaaaaaacttctctttgtttctttcccaaaataatttttagaaggagatatacagataagaataattaaaatattacacagttttagaaaactcaaacatatgaccaaaatatggacatttaaatacagtaatcactagcaaatgattttaaaagttaatgccaatttatttttgcttctttggctccccgttcctacaaaatgaagtctgcatcctatccatggcttatctgcctgagtttcttgttaccaactcttcccaatatgttcacccccaaggcacgcaaaacagtctgaactctccatatcgtgtcatatcacttccacgatgggactggccccactgctcccactcaaaatctgagttaatttcattaagaagatgtttttcctaaagaagaaaagagtcaactgtggaggtgcaaggaattaggaagtagaaaggcatgtgatggaaggattaggaggcacttgcgttgcaatccaaaaaggaaaacttcaaagagtttaattttattttaacatattttatttcatgtggttttaactaatcagaagcatttgatacctagaaatatggtgttatataaacca

SEQ ID NO: 32411 - DNA, 702 bp, Bovine  19866881753151
  misc_feature (1)..(1): n is a, c, g, or t
ntctatagtaaatgcaacttttacactgtagggggatagggggttatttttatctctaaatctgcacttccaacattaagtctaacatcaaccatattgacgttttacgaaagtgcacactttttcttttaaaaaataattcccttacacagttcttttttggcactgtgctcattctcctccacggctttcatatttttattattaaaactaagagctctatggcagggcactttaaggaagtgcttctgttcagttttcttgccttctaccttaaatgtttcaaaattcccatatttaatttcttggaaatactcttttcctgctcaatagcagctttcctggctcccacaccaacttacaaacacctgctgaaccggaaaggtaagcaacccagggactactgagtttacccgggtgtttaacacacagtcctaagaatgagtctgcaggggcattttccagacgctctaaggtgaaggacacagtgcagcccttggccatgccatacatttccaggtcagagtccacattctggaaagcacccacagcttcaagttagtacttgcaaagacaatatcgttttttcaggacaccaacagacttgcaatggccactctactaaccttgactggtcagaataccccagctagcttttcgcttagaagaacattcttctacgctcgctagccttcttttcgg

SEQ ID NO: 32412 - DNA, 1348 bp, Bovine  19866881758757
  misc_feature (1)..(1): n is a, c, g, or t
nccagaagattaaaagactataaactattagaccccttataccagaagagcaagtggaagagacagcctgactgatcccaaagagagataagaagaccagggacacactcccagcaggacagaagagttgggggtgggagggaggcaatgataagactgcagggggagaggaaacccccaggagactccataaatgcaaacatctttctcaatatcttcacttgttcaatccaaagcccaagctgacacatccaagtgaatttcatatctgatttgcctgctttctagcttgatattatatttcgcttacaacatcttatcaaaattatcttttcaatcaatctagagagctttgttttctaaagatttactcagtattttcctcagagacacatttccagacgacctgtttctcattagctggaataaatgggagtgtgtttacagcacagcaccagacttaaaagagttctttcctggggaagctggtcagggatcagcagctctgtcacctaaaggaactaatttcagtgttccgctataacataaaacagagtattggttcattaacatagtcttcaaaaagcaaactgcaaaactcttcatgatatacagttttgctttgaacacaattttaagcagttctaacatacaaaaatctatttatgccaaacagacataatatgtagtgacgataaaatatttaacctgtgttcagcaaacagtgatggcccactgagggcaacatggagactatgaagataagttaagacattcttaaattgtttacactgtggtaactaatccaactttctgtataaataaaatcttcagaaatcaatctttgataccatgggcatgctgagaaaaaaatgtcagtttagtcaattacaaataatagggatttttcagtggaagtcaacaatattatcagaagatgtaattaagaatatttacaaatatattgatgtaagagaatatttgcacatatttttatcattgtaaactatttctcaaatgtcttagccagcaaaaccaataatcataagcaagacaaaacccacttacatgaagtcactctattatctgacatatcttcttctcatggagctaatttcactgccacggtggtccaggcttactaagaccattagtacagtgagaatgagaaactcagaccaaagataatgtagataatttacacataagtaattgcaagtgtggtatctgattaaagagccagtagaatactactcagaactgaatacatatattttgctctctttgggtttacacataactattaatataatattcctataatagcagtagtaagaataaaatgtta

SEQ ID NO: 32413 - DNA, 1442 bp, Bovine  19866880482231
  misc_feature (1)..(1): n is a, c, g, or t
ntaatcaaaagatggctacaatgaatcaggttgaacttattctagatcttgggaaatatgtaagatttagataaacagaaggtgaatgaaaatcacagtagaacaatatccagagccaagggtttaaggtatcaaagggcaagggtcttgggggatgccaaagcttctgcaggtagctgaagtcatcagatcacaatcaaaagcaactgcacaaaaattcagcaagaaataaccagaggcactgtggcagatattctgattgtttgcaaagtgaagaggagcagatcaaccagatgggactacaaaaacccagacatagggtagatcttttcaaaaataggcatcaagctactcagtaaattgaaaagcagatcctatggtggtgacaggttttgaaaagaatgggtggaaagaaacataagccacagttttgcttttcaaagccatacttgtacagatggaaaataccttcaaatatgaaagatgagagagcgggacacaaaaccgagaacttcatgttgcaatttgagttttctctgtgtttttacacgtcaagtcttaaatggaatagcttttattatttcaaatattatcctctgatatttgattgcatatttaacatctctaatgtgctaaaacttaaaaagttcactttgtataataaatcagtaataatattcatgagaaaacagtattgtttaaggtgactgacatttgaaaaatgtacatctactctgcttatttacaaaatgtttgtagttattgttactttatatcacttataacttttcttgtggcttagatatgacttttttctttgaagttcttcactaattttgttatccctttcatgtatggttgaattttaaaacaggttatggctgattttgttggcacggcaattagatatatggcaatggcactccacttcagtactttggcctggaaaatcccatggacggaggagcctggtgggcgccacagtccatgaggtcactagagtcggacatgactgagtgacttcactttcacttttcactttcatttcatggagaaggaaatggcaacccactccagtgttcttacctggagaatcccagggacaggggagtctggtgggctgccatctctggggtcacacagagtcggacacgactgaagtgacttagcagcagcagcagcatgcctactttatgttattgataagttaccatgaagtctattgagaatttcaaagattcaatagattctgtcacaagagataagaatgaatgattaagtatatagattgatgaagaaataaattattgtagtacataaatgtttttatgaattaataatctaatgctaatgaaatataagtaaatggtaattttttgccagtcattttcttctctccaaataggaaactataaaaatatatgaaactataagtttattat

SEQ ID NO: 32414 - DNA, 1308 bp, Bovine  19866880555607
  misc_feature (1)..(1): n is a, c, g, or t
ntgcttattgcctttttttgtttgtctgacttccaagaaacatgtgctggatgataattatgctttggggcatatcttctaagaagcaaatttgacaatctatttcatgatgggttctgttaaagaaacaaaaacactgatggagacaaacctgcaaaatgagttcatctaatttcattggatagactgcatgttttcataagttcatgtaactaaagatatgtttttagtccaacacagatttcaaatcaatggtcagttttgtttttgttttctttttcctactatgtgttatgtgaaagttttagcataaaatttttatgtaaactgaaagcaggcaaacaatcctctctctcttctcaactagagaacagtcacatgatctatgcactgccaatcatttagagattatccatgacaacagtggtatttcgatggacaatgggaactcagaaacaactgaattcagcaacaagcaacaaatactaagtatctggtggggttattgtgatgcaagctgactaagaaacactcttctactagaatgtgtttgatttttgctctttggttccttctaaagtctgttatcacaaacgtattattccttctgacataaattaatttttagctcaataaagttaacttcagtaatttatttacagtttacagttgagatttctgaaaaattaagggccatataaaaatgctttcttttatattttgatatcattacctccctgtctaaagcacatgcaataggtgtgaggaatttgtttagatttattcttcaattgtaaaatatgttttcagtgtgtccttgtcaatgctgttttggttgaaaagaatagaaaacaatttgagttagctgtttgtaaacagatccgcaaaataaaggattatctttgagtggaaggaaacacatttattccactaaaatgagatagtaggaagtaacagtgattgtagatatggttatttttgaaaggaaaaggcagatagctaaggatgttgacgatgctctggccctttatttcatagggaattctcgattgataagagagagcattcatgctctagccctctgcgtctctgctttgaatgtcagagacatgaaatgtgaaacatgtcaagaatacctgcttttacagtaataatggaatgtgtgactttgctattgttggtggtaacatgacaaacttgattatctccctttttctcttgagtcatcaatttctctcctcctgaatcattctaatcaggaaataaacatgaaagactataacttttttatatatatatatatatata

SEQ ID NO: 32415 - DNA, 1077 bp, Bovine  19866880572286
  misc_feature (1)..(1): n is a, c, g, or t
ntaataaaagtaaccttttatgttgtactgttatctgcagtaagagaatcataaccacagatgcagaaggtggtcgtatgttgttcttttggaacttacactggactgacctttgatcttgctctactgtgtaactttgagcaagcaatgttacctctctgaggatgaggtatttcacctgaaaaatgagaatttgatagccatcttacaggtaattgtgagcgttatttaataaacagagtaaaatgcctgataatcatattcaggaaattatggcactcaatacattgtgagagaaatttttaaaaatcagaagtttgcattagatcctcagagttttgaatgtacattgctcaatgatatttcataaaatattttaaagagaatattaaagaaattaaaaataatcaaatgagaaacactgaagaatcctgaaaataatcacacaacattttaaaaggatataacagtatattctttaatttcatagtgtatagtagtttgggcaggagttctagagaagggaggaatatagaaagaagtataaagcagggtgtaatgtagaatattgctctttataaatctatatttaagtattgggagaaaagtggccataaaatgttttaacagcagttaaatgctttaagtaacttgcattttagatattccataactatcaaaacaacttgaagattgcttctgtatttgagtgtagacagcttctacttgcctatcttctttccctccttccctcccactcccccttcctactttccttcctttcttcctataaatctgaatgtattggggagagtccatttcttttttcaaagtattaaatgcattcctagaaagagtcatctcacttttgtatagatggatttcagaaactaaataaaaacaaatttcaacaacatagccaaaaactatacttacccaagtgggagctgttgccaaggtctattgggtgatcacattccttactcttctgatttcaagtaccattatatttcagcagagggcattattttaaaccacaaaagaaatcttgcttacatttctttgagcttctcttta

SEQ ID NO: 32416 - DNA, 1926 bp, Bovine  19866880646456
  misc_feature (1)..(1): n is a, c, g, or t
ntgcttctctcgtcaaagttttcatgatctctcttaatatcacaaagcaatttgataaacaaaataaatcacaaatcctaggaaaaaataatagtcaatgttttaaattcatttatagaatttacattaaaaatgaagtctttagaaaatgctgcttagcatacagaaatggatcttttttaaaattattagtctctttgatttatggatcaagtcacatagctaggcttatgatttttgtacgtcaaatcatattataaaggcagctgctgatcaataagactaactctgctatcagagacccacgtttcccatacagtggacactaatattttaaaagtggcccaaaaaaaccaaaaccaacttgctttgttataataacagatgtggtaaatatgaaaatttgttcaagagatgtatgtagagagaagcagccttttcaggtagtgaatctcatgctacaacattaagattgattctcatgttcagattggatgttgaatgttgttgaccctggatgtatggtttagtaatctaagcaattctagtagtttcatctcttacaaaccagcttcagagacaaaatatgaaccagtttatcattagccgaggctggttcaatagtctactactatttctagctccagtaggaatgcagaggtggagaagagattcccaaaagaaagcaggggtagaaaggcaattgtttccaaaagagagatagggctgtgcctgagagagatagtccactgggcttcccccattgtgctagtgctaaagaatccacttgctaatgcaggagacataagagatgtaagtttgatccctgggttgggaagatcctctggaggagggcatggcaacccactccattattcttgcccagagaatctgtggacagaagagtctggcaggctacagttcatggggcaacaaacagttggacaagacaagcgacttagcatgcacacaccatagtccactacagtaatcttgagtatttctggtagtaactaatattttgccacttggtatgatcaggtaccaggagccaccttaatgtttaaagcattgctcctagatcatttggagtagtttctggacaaggaaaaaggaacactgggaggaaagagatagtactgattgtggggggaaaagtggtggtaataaaggtcaccttaccgcaagtcctagttgtgaccattactgagtcactttagagtgtagttttgaactattagtggtcagtggtgtgccatttaggggaaggagaacagaaagtcagaatggtggggggggttttccatggaaaacaccttgattccaacttcctgaagtgaacatatgaaagtgattagccaaagctcactggctgatgtaaactgtcgtttttttctttcagaaatgttcactgtcatttttttctttcagaaatgttctaaaaggaattagattgttttatttgctcattccatgcttggtagccttagggaccagaacaaagaatgaactatgacccttgtttcctgctattagctctaaatgcaccttaatatgacactatatattaatgttatattaagaattgtaacacaaaagtaagaaaattaggctaaagttcttttttttcttttaaaatcatatttcattagtgatacatccaccaaatggaacctattctttggaattgttatactccttcaaaagcttgcaaattagtgtaaactcgggacctgccgaacatcctttcagcattatgagattccagaaaatgtgaataggatgtttcagttgttaggtaattttccagattcccttttgtgtgtgtgtgcttagataattcaaatggcttcatttcaacacttcaggcttctcatgtacactgtattagagtgtgcaacatttctgaaggaattggcacagaca

SEQ ID NO: 32417 - DNA, 1704 bp, Bovine  19866880656566
  misc_feature (1)..(1): n is a, c, g, or t
nattgttaaataccatgggatgctgcatatttaagggagaaaaatacagctttagaaaaattttgtgaaatagaattaaaatcctaagagggaagtaatttctttgttttattcacggctatattctagacatataaaagcatgcctaagaccatttagtatatatctgtttaatgactatatgtaaaatgtattttgttaatacatgtgccttaatagttatatcaaaaaactcaccaccaaagtatcattctgaatttttatctacatcaaaaactatacccctgccacacattccttttccaggtgaataatcaattataatatgtaattgttacaaaagcaaccatttaaacatgagattaaaataaatatagtcttgcaagcaacaaagtctagataacataaacattaagttataatcatggttattttgatattataatattttaaataagagctattaaaaatgctactccaactcttatttccaatatttgaataatgattataaattatttcatgtaattgttttaatatgtttcttggattttaatacatcaatataggtccttcctgtgtagtgtattctttccttgcattaacacaaatatttagtttgacgaaatacagtctacccatcatattcacagattattcccccatgaatatggagggttgacagcactaggccattttatgaaaggatattgagcaagcacctaaagtcctttatccctccagtctgatagcaatctgaaattcagaatagatattcttaccatggaattatattaaactttggctagcaaaagcaacaacattttaatgacttgcatttatgaaactggtaaaactaactccattcattctgtcaagtacctaattgtagagtctataaaatatgaagataaccttgtttgactatataagaaattattccatttggacttcttcaaaacaaaacagataagcaaaaacaaaaaaatatatatataaataaaacctatcacaatattgagatctctcagaattactacttggaattattgttattattactgttgcttggcattcatggttggatgctgccttagctttgtgggcttgatttccttattctaaaatccaggcatcttctgtcaaagaacatttcttcatctcatctggggaagggaaacttgcatcattctttgttttcctctctctttgtaggtatgtgtcttgtccctcttttcagtggtttgtgatcacttctattctctagaaggggccccattcattcagcatactgtgttccttttgcaggctcctaaaatacactactgtttcaaaaaattcctatttaatgtttatcaacacaatataccttctataaatttctgtgttcatatgtagacatatcccaatatataagtatggtttatttcaaatgcccattctaagttggttatttatttatttatttatttattttaatacctaaatgtattttcactggaaaacaatattgaaaattgcatttacagaatcaacagaataccaaaaatcctcttaaacaatgtttttgactatgtggtgtcacacagttaccacaccgtttatgaagagaaatacatttatgtttgcaaaatgactgaacccatatttcccagattatagagatttggatgtaagaaattgataggtataacaaaataaata

SEQ ID NO: 32418 - DNA, 2433 bp, Bovine  19866880680539
  misc_feature (1)..(1): n is a, c, g, or t
nttctttaagagttccttacaattctctgaagaaaacacttgcatgaggtttaaaaatataaactgctaaagatgtatgttcttttgaatgctacaaagatagtaggcccacttaagtctgcttgatgtattctaataaactagagtaagataataaatgtgtaattttgcataaagtttcaaaggagaaaatgaatattagattggagatctagtcagtgctacaggcacaaactagaacagggaagaaaaagcacacaaggaattaagaaaccatctctacaagttattaattaatagatattcaaacgtgtggggacagatgcaaattgaaatttttctttttcctcaatgagtcgcccattgattccctaatgaacacctttatctaatggtgaacgtttgccatgtgggtcagaatatcttagacaattttgcaggatggtctgtttcttctataaacattttttcctacctttctggctatagatttttacaactgctgttcttagtcaaacacttgacattttaccacagaacattacattaccacacctcccacccacacaaatgtactcctttcaaatgtcttttaagaacctctatttccacaaaactcattactttggggaagcctttccatattagcactgaccagaggcaagaattctgtacttttctaattattatctaaaagtagttaaattttatatggacatctaaatctgcttttttgactgcttgtctgtctggctgtgaaagaagtgtttctttacttatgtaaataaatatatggtaaaaaacctagatatcacttatgtagtaataataatttctatcatctatttaaaaatttctgtcaatcactccaagtaattatgtctgtggacctcctttatttctcacatcaatactctaaaataagtactgccatttccattattttacaataagaaaggagagattcacaaaggtcaagtaacttgctcaagggcatacaggtattaaatgacagagcagagatttgagctaatacaatctggtctagagtctatgtgcttcagcatttgctatatggtcttccatttgctatatatatatactttggtcaaacaaggtcttcttttggatcggtttatagtcttattttattatgagcacccataattatcttgggttattttctgattttagaaatttatttttttttttactttaaaatgtaggcttttgtaagataaaaaccatgtgtctttattttatttactacacaacatccattataatatgtataaaatacccatgaacataatacacagtcacatacatacacatatatgtcacagtttgcacatttggatactttactatttataacatttttgtttaactttttcttcctgtgtcataaaattaagtaagcattccatatcattaaatgttattaaaagcagaaacataatttaaaagacttctttgcaaccaccaattcacatttcttcatttcactacaactgaaaaacacttcagtgcttatattcagtcattgttcatattctacccatggatcccctcatatattatttatttttgtatgcctataatccccttccaaaacgttattttcttttgcttctaatgacttaataccataaaatgttgaaagattttccataagatttagaagataccatcagcaagcagaaaggagacttggtctagtagattatatcctcatatagtgtagggtgcttaagtataaaaacccagtttgatcagattgaaacaacctttattcatagtctagattctagtctagaacagcctttcaggattaatttaaagcttgtgtgctgcctgaaatattgtcttgctcaatttatttccccttccctgtcctatgaatttatttccttcctggcttctcctgggaccattttctcaattaagcatttacagataaattctcagatttagggttggctttgagaaaaccttatgtaagacagaatatctttatatgtatatttttgcacataacttttataatattcttaatatatcttcttagatttggattgactgtgtcaaaaagtgtaaatattttattgctttggcatttgtactaatatccattttttccagttataaaagtgccaatatagcagcactttctacagttatttactgcaatatgtactatataattttagctcatttctaacatcaatagagaatttcttctatttcctactggccattgtcatggggttatgagaaggagtagatagacatcagtgttcatgttactattttatctgtaatttcaaatgttcatgatcagcattaaatttaatttaggtgggttctacatgtgttttgatggaaaattaatgttttagtttaaatcttacacgtgtctttacctggggt

SEQ ID NO: 32419 - DNA, 2971 bp, Bovine  19866880877729
  misc_feature (1)..(1): n is a, c, g, or t
ntcttttttttctgaaataaaaaaaaaaaatttatgctaatatcttttcccagcaacaaaatgcggatatatcaatgaggatatgaaatcactggcttatcaacaatattataaacctcactgggcttttaacatttttacttaaggttggattaaacagctctcatttccttcagtcgtttatcctgaaaacattctcagtatgatgccgtttctttctttattaatacaagttgaaagaagctgacaagtgaacaagaaatatgtaagcacactctattctaactgatttgttcaagaggatgattcatttaatttcataaaggatcagtgggccagaactgtagatgaccaggtcagtggagggaatgtaggggagaaagaggtctgtgagaaggatctatgtaacaagcaacaatatttagttttttagagctgaagttctgcttgagcaattctgatgttaccagcaacagtcatttaaagagctgctgatgcctcagagaaaacatttttaaagtgtcctatctagaaacaatgttccttgtactgtgtcatatatattaaaactccgtcccttgcttatattacagtacatcgtgcctgattaaaacctgtactactgtaatgtggcttcttgagagtgccgattaaatgtcgctcctgaaatatttcctcctgctgaatctctctgaatatgattgaaatattaatcacttggtaaacaaagctcatgaatggataggatacaattaaatgtttttaataaagtgaatttcatgcaattattttaagtgttatagagaaaatgcaaaatcatacaaacaggctacaaatattcttgatatctttatattgctttctttaatatttaactttgatgatggttcaatatgcaaattatgtcatatttctaagagattgtatggtatttttggatagtgtcactcactagccagtaggatccctggagtaggtgatatgtatcttgtaatagataagattaaaaaactgatatatactctggaaatcataatgatggtggtttagcctgtatagtgctgtatttagtgatttgtttttttggatttcactcaactatacatcgcatagacagaaaaacctcagcttaactattatctttaattttgctttctttatattttaaaggaaactttaaaattaaagcaattcaagtaaatgctttgttgcaggtaatgatttgcaagagtgtagttgtatagaaaatgatttattttgaaagtatattcaatttttcaaagtaaatcagagaggcatacatatttggaacttttctagagggaactaggtggtgctgttctgtcatctttgtgtcttagtgacttctttgattcttttctcagttcattaaacacttttgtacaataggtaaggtatagttttggtctatagtggccttatttttgttaaccaatgaagtttatattgatcttgaatcttttcttttcagcagtatttttgtacagcagataaaaactttcttcgtaagcagtaagctatagcacagtgtaaaatgtcttttttatttcttcatcatttaaattattatatataattctgagatcttcaaatatttatattattatgtgtttttaaattctttggctattttacttgtaaaaatacttatgattggtttaatcaaaatttaaagtggtggaatttttgtgcaaagttgatttaatataaaaatgtcacaaaatgcataagctcaaggcaaacttaattgtatttttgaaatactaaaaaaaaaaaaatcaactaaaactttaaacaaagaaaagtaaaactttcccttgaaaataaattggttgcttactttacttacatataagaaaagtaaccctcaattaggccatcagttaatcttttcttgtttctagatattaagttaattttgtcttatgatcttggtggtacttgatagtccaaataagtctcttatttcaggctaaataacaacaaataaagttactccactgttcatgtatttttggtatactggtattttgggggtatattttcttagtaagaattttgacttctggatacccttaggcttagagaatcagatatgagaaaactttaaaagggttgcagctttttccaacaaaaatcatcctgtaagttgtgtttcttaattttttaatacctttagataagagtgtatcgtgtaatttattttctaatataaatctggacataaaataaggatgaagtacttcaagagttctacccatatgttttcttgtagactcatagttctatcattttgaatggggacaaaaatgacttatgttctttttttcctgacataataaaccctccttactatttttatcataagatgttcaagatttatctttaatagaaaagtgaatgttatatagacaactcttcgtgttttctgttctctctgaaatcttttatctttagaagacagaactcaatgtggaatttcagaatgggtccatggcatgtcgtcttacagtgcagagagataatctctgagatgaacatctgctaggctaataaacctaagtgaaagtgctgctatacttctgtgctcatgtctggtctcctggaataaaatgaaagtcacaagtattaagatggataccagtggctaatcatttgtcaaataagagttcagattgggaaagctgcataaaggaattgagattattcattcacaagaataccttcattttatatcaaatgaaaaacttcctaagaaggattaggtaactcccattttatactgccataagcttaattgtgaagaaaacgaatagtaaataaacactttgggattagataaaaaatcagtatttttgtcttgggtgtcaattttttatattgcaaaaatactttctaacttttagatgatgtcattatgagagtaaatcttcggttagcataaagaaat

SEQ ID NO: 32420 - DNA, 1291 bp, Bovine  19866880994513
  misc_feature (1)..(1): n is a, c, g, or t
ntgtacagtaaaacactgttaaagactagaatgtctcaaatttggtggacatataaatcaccctggaatcttgttataatgaagaatctgactctgtgggtagggtagaagttgggactctgtagttctaacaaattcccaagtgatggtggtgatgttgtctgacatcacatactgcatagcaaacctatagactatttcactacagaatcttaatttctcttgtagttaccaacaagaacaaaaacatgatttgcttctgagtattgatcacaagtgttgagctacttatgttcaactgggacactttcttgaatatagcaatcttagaataatgatttttttttttttaactcagtgagactttagaagtcatcaaatacagctctgtcatactatcattgaggaaattgagggtcagggaagttgagtacatgcccacaatcatatagctgacagcaggttgtgcaccagaacgaaggaaccctaactactgtgtcaataaagaaaccctaacttctttggcacttttgtttttatttatactccctggcacaaaacaaagcatgagtcaataatgattagaatttcaccttttggtgctcacaatagtttaaatgatagcagtatccttggacttgctgacttgcctaacagctaaaactcacagtaggcaactgtctcttacaataataagagtattcacatatcctctttcttctagagtccactttcagttttattatggacattttgctccttaattttgagaacctggggagaaaggtggacatagaaatgaatgggtcgttagttaaaaggcaagggtgaggtcgtaaaaggttgtggctaagtaagcaacaaatgagaaagagctaagggcctcaatattgatcctgcctctcatctttccctctgtctccttgcttgcaggtttctattgtgtagtctcttgaacaaagcagactatttatggtgtgactgatttaacactactgaactagtctatcatctgctaatttggtccgattaaaaactggtcatagggaaaagcctggaattaagctcatttggaaacacaacttctgattaatttatgtcctgttcatttatatctcctcctctaaatcaggcacatccaggtgctgatttatagagatggttctttccagattcctgaattttctttccatgaccacctttggttaggtccttgaaaaaagcacagttatgttttttgtcccttccttaaggctacaattaaggcacatacggaagatgcctaagattt

SEQ ID NO: 32421 - DNA, 2402 bp, Bovine  19866881029671
  misc_feature (1)..(1): n is a, c, g, or t
ngatttttaatttcttaacttaaaatgggatgcaattgtaactttaccattaaattttttcttatggcattttaactaaataggagtctagtattaattctaattgctgcttattaataaataccaaagagaatgctctccttctagtatgaatagatgtatgatcagccaaagtaattgcaaacagtcacaggaaaaaaaaaatgcttttaagacttactaaacacagatgcaaacaatgtggcatagctggatagctgtgaaatcaaagctgccagcagataaccttgcatgcagctttaaggaattctcttagcttaaaacaaacttggacttgactctgagcccaaaagagttatgagcagaaacaggtcttaaagaaggaggctaaagattgtaatccaagaatatattttttgtgtgcccaatgaggaaagcagtttaggaactattgggttggcccaaaattttgtttgggtttttccataagatgtggcagaaaaacccaaatgaagtttttgaccagactaacacattgcctgttggagccacacaactttagaaaacatttgctgtcagagagattgtctgcacacctggagggaaacatcaaaaaagtcccttttttcctgtagtggtgtatgaaaaaaagaaacaaaagcaacgatatggttggaaatgttctttatttttaatcacaattaaatttatgaattattctagcttaaaaaaataaaattgttggaagtacaactttttgaaatgcaattcctatatttctgtatctgaatgtttcttcatgataaaggccaggaacgtagtgaaggacagaaaagcatgcctggtttggttatcctcactttgactaactttgtgtaagatactatatttcctgaatgaatgcaaagctaatatatatacattgagatatataatgtcatctttaaccactacatttcaagtcagtatttaaggattactaatacttctagagaacccattataataatgttttgaaaaatggaagataaaatataaaaaagaaatcacttatgccattatttttgtctgcttaatttgaatatgtatgtcctctagtgtttcttaaattgacaacgtgatctctcttacttcatcttaaccatcatatattcctgcattgaataccttcaggtacttttcatctgtcagttagtgtttaataatatattgcttagatttgaaaacttattcaaatttatttttctacatatttgttgtgtatataattaacaacgaatatgctagggttacaggaatcattcagcttcttcaatagaattacttcctctgtagatgagaggagcataaataaatactaagaaatatggaaaaattaagaaaaatccacacattcactcaacaactatttttatcccttattcagatatgatacaagcttgtgaatatacaaagataaatgtggcacagaatatcatatttaagaatttctagtcaatgtacaggtcaacaaactttttctgtacagggacagacagtgattattttaggattatattatatccctgtgataactacttaattttgcactcttacacaaaatagtttatagacaaaaaatggacatattagtatgactgtaataatataaagctttatttacaaactaagatcaaatatatatggggtccaatgtctaaagtttctcaatcaacccttggtctgctgctgctgctgctgctgctaagtcacttcagttgtgtccaactctatgcgaccccatagacgaaagcccacgaggctccactgtccctgggattctccaggcaagaacactggagtgggttgccatttccttctccaatgcatgaaagtgaaaagtgaaagtgaagtcgctcagtcttgtccgacttagcgttcccatggactgcagtctaccaggctcctctgtccatgggattttctaggcaagagtactggagtggggtgcattgccttctccgagcccttggtctagtgggtgataaaggacatataaagcaatcattaaacttagtgtgagagtactagaagggaggtgattaaaggatgcagagtttgaatttatctgagggaatgctgtacacagaatctggcatttcattttatctttgtttacttattttattgaagtatagttgatttactgtatattagttttgagtgtacaaagtagtgattcaatatttttatagattctactccatttaaagttattataaaataatgactgtatttctgtgctgtacaatgtgtccttgttatttatttgttttatacatagtaatttgtacctcttagtcccctacccctaatttgcccctcccctcttctctccctctactcttctctatatgtgtaag

SEQ ID NO: 32422 - DNA, 870 bp, Bovine  19866881690744
  misc_feature (1)..(1): n is a, c, g, or t
ntaggttctctatgtgtttattccagatactccaactcttaattaaaatgaacaatccccagcatcaattcagcatacagagctgccattattgccattctttgatatgtgagccaaaggtatcagtgattgtggatttgaacatgtggcctcctgaattatcatcaagtattcatcaagctctctcagagctcaatggcaccattttaggtcctactaaggaaagtgcatttttccctgctaggaagatttcataaaaattggtaaccatgaggtaacaattatttccagtgttcattaacattgtatctgtaatgggaataggagactgttgaggctaaaatctaaagcagataattaagaaaacagtatattacaaactatatttctcgtattagaaatcttattagacttttctttattataacatactatatgaagaattctaaccatttattttactttctctactctaacattgctttctaaaactagtctgtctgaagaaataaacataactttctaaataacgtctacaatttgtacatattttaaatgtgtgcatgtgtgctcagttgctcattcatgtctggctctttgtgaccctatggactgtagcctccaggctcctcttttcatggaagaaggcaagaatactggagtgggttaccatttcctactccagggatcttgccaacccagggactgaatctgtgtctcccgtgtctctgcatttcaggtatactcttcaccactgtgctaccagggagcactcaaattacttatagttatgtttttcatgtttaatattgtttgatgctagatgtgaagtattattttaacaattttatagatgaaaacagaggagtt

SEQ ID NO: 32423 - DNA, 915 bp, Bovine  19866881868035
  misc_feature (1)..(1): n is a, c, g, or t
natgaaatgataatgatttcattaacctatttttgcccttttccaaatatgatgagtataaatgtgataggaaattaaaattgtgcatttctggaggaaagcaatcaagctagaatgaccaaaaatgcttacatgcttatctggcaactttgctcccctagatagcaaagctgagagtaggggatcattataaatatctatttgtctatcaatgaagaaattaaatcatgaaaactcaggctcagaaattcaacaaatcaattttatagaaggaactctcagactttttatttatttgggatttccagtttaatagtaacaataaaacattctggcttattttattaaatgaaaggtaatggatataaactcagtgatttttggtggcaaatttaaaatgcattcccaagtaccaaatattttattatgaaatgattttaaaatctaggtaaagaagagactattaaacacgcatatgtgtgcaggttagttcaccgctggatgccttacaagccagctgctgtgcaggctatgagcacttgcagatttagttatagagtcatatttaaaaatgaagaggtgttaatagatatcctggcacatagaagccacagggagaaaagaaataagtaaggtgatactagaaagaaagaacacaaaatagcaatcaaataaaggtcaaccatgcaatgcactgtttacaggagtacaacaaaatattctcctctccctctgctctcccattctctctctctctctctcttacatacacaatcacacagacacatgcacacatacacgggatgatgacctggtgacctgtggctctggaaacaactctgacctagcttgaagctggcatacatatcccgtttatagacagactctataggaatgagaattatacctcataaa

SEQ ID NO: 32424 - DNA, 1674 bp, Bovine  19866880351996
  misc_feature (1)..(1): n is a, c, g, or t
nctgtaatgtgctctaaggaaacagcatccacacgccacatcacccaccaaagtcacctctgcggagtgacacacgggaagccggtggcccagacgcaggccatggagcttcttctggtctcaggcaaacccacacatttaatgctcagggagcacatacatcacacactattaaagctgccagtttccgtctctttcacaccattagctgaatatatatatcattaaaggaagtgagttacaatataaaaatatggtaattttgacagtcaggtcacaattgacagcacatttgggggcctgctttccttaactgtctccagagaccctatatttagtgaaaagacatttcccagaaaagttttcataaatattctccagggggaaaaaatgtatatttatcacttcacataaaaagaaatctgaagtaaatgttttagtagctgacttctcagaaagtgagtggctatttttaatccaggactggaagaatttttcttatcaactttatgaaagtcagggaatgctctcagctgggttaccagcaatgttattaacagcagcatccttatttttttttcttccttccttgtcctccctgccactgtaatacttcatattccatctgatcctggtgtggatatttttaattttttgcattttatgacactttgtcattttggagactcactggctgtggacagactgcccatcccagggtaagctggttcttggagatagcagatgagtcccctacaatttcacctgtcacatttctatcaccccatccagagccccgcctctgatcatctccttgtttagactctcagacttccaggtactcttgccttccctaagcactttaggctcagataccagacaatgaggaacagcccctgtgccctggagcccactgaaagtattcaggctagcccatccagccatactcagctagcttatcctgctgaacttattcctttcccctcaaacaataataaaggttcttccccccactccctcctcactcccactgcctcctgacccaccctggcccttccttgtggaggccctattggtacggtgttgcccttccttttggggagtgtgaggaacactcgatgtctttttgatggcattcacctccgaatttattatttacaccagaatttaataataataaaatctgcattgaaaaacagggagggatagttagggagtgttcgatggacatgtatacactaccatatttaaaatggataaccagcaaggaggttaaagaggagagtgaaaaagttggcttaaaactcaacattcagaaaactaagatcatagcatctggtcccatcacttcatgggaaatagatggggaaacagtggaaacagtggcagactttatttttgggggctccaaaatgactgcagatagtgacttcagccatgaaattaaaaaatgcttactcctcggaaggaaagctctgatcaacctagacaggcatattaaaaagcagatatattacttttccaacaaaggtccgtctagtccaagatttggtttttctagctgtcatgtatggatgtgagagttggactataaagaaagctgagagctgaagaactgatgctttttgtggtgttggagaagactcttgagagtcccttgttcagcaaggagat

SEQ ID NO: 32425 - DNA, 994 bp, Bovine  19866880505403
  misc_feature (1)..(1): n is a, c, g, or t
ntccgtctagtcaaggctatggtttttccagtagtcatgtatggatgtgagagttggactgtgaagaaggctgagaaccaaagaattgatgcttttgaactgtgctgttggagaagactcttgagcgtctcttggactgcaaggagatccaaccagtccattctgaaggagatcagccctgggatttctttggaaggaatgatgctgaagctgaaactccagtactttggccacctcatgcgaagagttgactcattggaaaagaccctgatgctgggagggatgggggcaggaggaagagggaatgacagaggatgacatggtttgacggcatcacggactcgatggatgtgagtttgagcgaactcctggagatggtgatggacagggaggcttggcgtgctgtgattcatggggttacagagtcggacacaactgaatgactgaactgaactgaactgaactgagtccctatctttaaataatcacattagggattagggctttaacatatgaattttaggggccaaaattcagtctataacatccctgtaagatataatgacaaggaagttgtaatcttaaacagaaagtgtattttttattctaggttcaacaaaataccttttgtagtaatctctatcataagacatggtatcctgtatctaacaggtgttcaaggtctttagaaagatttgtgaagaaacaaaaagcaacgcaaatacacttctcattagtcctatttttggccaaattcgtcttgagaggtcacccagaatgataaatatcagtagttcagaggttaagttattttcttccacataaacattagtcagtgttatgatttttaattcttgttttaattagatatcagagaatattgaaaaattccctctaatgagcttttttttttttctccttcatgagaagatgaagtcatgagagatgattaagtaatagggcttgccaagtacgtatcagatctgatcaagga

SEQ ID NO: 32426 - DNA, 1637 bp, Bovine  19866880516354
  misc_feature (1)..(1): n is a, c, g, or t
ngtttgccttggaaacaaacagagatcattctgtcatttttgagattgcatcccagtactgcatttcggactcttttgttgactacaatggctactccatttcttctaagggattcctacccacagtagtataattttttttaaaaaataaaatttttcttctttgtagtttgttgttcagtcactaagtcatgtccgactatttgtgactccatgagccttagcacaccaggcttcactgtccttcactatctccctgagtttgctcatattcttatccattgagtcagtgatactatccaaccatttaatactctgctactctcttctcctttttccttcaatctttcccagcatcaagatcttttccaatgatggtacttcatatcaggtgggcaaggcactgataacatagattatattaattgagtttcaaatgttgaactaggctttcacatctagaataaatctcacatgttcacactgtataattacttcttacaaacttttaacttcaacttctcaatattttggtacagattttaagtctaaaatcaatgaaggatactgatctttaactttcttttttgtactgtctttgcctgatttgagcatcaggcaatactggcctcataaagcaagttgagtagtattattatttttagttgtccaagtttagatgctatcaattgttcataaccgctagaaaggacttgtacattgtggtatttcataaaatgtaacagtataaagaaattggaaaaaacaagccacaactatatgcaaaaatatacattgacctcacaaatactatcttgagcaaaatatatattcaatatgactccatttaataaaagaatcagagaaaactaatgtatgttagaagtcaggataatgattatctgtatgagaagtagttcctaaaaaaaggacatatattgtggcttctgggttccagtcatgttctatttctagttatacagatgtggacattcctgaacagttcattgagctgtgtacttacctacccatttctatatgtttgctatatcttgatttgtggggggtaaaaaagcaatatccacgaccccaacccaagccatggaggagctcccctctcacacactctctgtctactttttgcttgaattcccaggaaccagagtcacatgactcaaagttcatgtaaacacaaagatgaaaacaactttttatagtgtgtttgactagaaagacacaaatttcattgttttcaaaacaaaaccactatctatttttgtttacttttaggcctatgttcaaacagcctcaacaaatggataatctatctgaaaagtttgagagccattcacacttttagcagagaagaaatgtattaaaaggtggttctgccaacaactttcatccactgtgcactctctcctgcctgcttgtgcttgaagagactgctatcatatcatattctttataacaatacccagttaattaaaagtaaattatcctaatagcttctgtgattgcagatatcctttctttagcattctgtacttaagactaataagtgaatagagatttattaaatacatattataaaatgaaatccttgattactaagtacatcaagaatctgagaatat

SEQ ID NO: 32427 - DNA, 1797 bp, Bovine  19866880545496
  misc_feature (1)..(1): n is a, c, g, or t
ntctaaatttcttttttaacattaataagaaatatagacactcctaaaggaactgtgggttttccaggtggatcagtgttcaagaatcctcctgcaatgcaagagaggtgggttcaattcttggattgggaatatcccctggacaaggcaatggcaactctctccagtattcatgcctgagaaatcccatggacagaggaacctggtgggctatagtccatggggttgcaaagagtcagacataacttagcgaccaaacaacaacaaaggaaatgcaaacttggtagctactgctgttttataagtgatacatagcctatgaaattagaaagatatttgaaccactcaaatgaacaatggctttaaatctatcccttctaaaattattattaggagccatttttacaggcatcacaatatttttttaaactcaagagtgtggactatgaatatagcacagctatcatatttaagaaacacttatatcaaacttacactgagaactaaaaagataggaaaactggacttcatgtgttgtactataaaatatagtcaattctcattatgcatggtagttatattctataaagttgctgtgaacatgaaattaatgaataatgaaccactgatcctaggggaaatgcagggttaggttcatgttgacctctggtcacaatatttttgtcaactgaactcataatcttgcttcatgtgtgtttctgtttaaagacatattattcagtgtttaatgttgattaattaattgtcaattttatatattcaacctaatgttaacatacccattttaatgatggggaacctaaggctcacaaacactgactgtccagtggcacacacagcttgcaagagagactctgaatctgaacccagatctcttgtttccattgagtaccaggtatacatttcaggccataaaagttcttgtaaaacaaatgtttaactttctttacatatgtgtgtgttagttgctcagtcatgtccaactctttgtgacgccatggactgtagcctgccaggttcctctatccatggaattctccaggaaagaatcctggagtgggttgccatttccttctccagggtatctttccaaccctggaatcgaagccaggcctcccaccttgtaggcagattctttaccatctgagctaccggagaagcccttcttcaattatgtgtgacattaaatgcccaccaaatggtagagatttgactgtaaaaacaaaggcaaacatcaggacgatatttctgcccaccaaggaataccaaagactgtcagcaagtcaccagaagctaggatagaggcctggaatagagccttctcttacagtcctcagaaggaagcagccctgccaataccttaatctgattctttagttgccagaactgtgagacaacacatttctgttgtttgagccccctagtttgtgggtcctttgttacactggaatctaacatatagcccatcactggttgaagaataaaacttatccccttatagcttccattttgctacatttcaacaaaaccagaaaataatttacttaaaagataaacaatgaactgaatcctacccaaggttatgaaaccatagcatcaacttttcccagagtacaaaagtctgattttgaaacctacctcaaaggatggatcacttctaagccatctgggccactgacaattgttctggacttcctagccattagtgtggctgcttttgtgtcatgtaaaaattaatgcagaaagagagtttcttggggggagagcagaggtccc

SEQ ID NO: 32428 - DNA, 1611 bp, Bovine  19866880681429
  misc_feature (1)..(1): n is a, c, g, or t
naattttttttaaaaggagaaagagagcctaatagtacagaaggtaaatcaaaggaactattgttttaagagaaatatagatttaaaagttaattcaagatcagtatttccagaggaattaaagatacatgagattaaggggatggataacagcatgtgatccttaagaaagcaaaaagtcatgaaatcaggacagaaaataaggaaagaatggatgcagataaaagcaattttgtaaatgacaggccaaccatctgatggctccgttttctctgaggtagagagatggtgctccaaaaactagccttcttggcaaaaggaagctgacagcacttttcctctctactcgttcagctcaccaggttgaagcttcttgttgctacaaagccaagagcagcagctatgcagatgatgcccagcactgatgccagagtgtccaccaatgccaatgttatgggtatctttgcacagccaagaactcaggagctatctctcataggagtcaaagctgcagaagatggctgaactcaaagcccacacagattttagcttcccccagttaaaacgatcaagctcatcaaatccaacccatgagtttgggcaacagtctgtgcatacttcagttctttttttaggatgcatttgctttaggaaactctaagaacactgattgtcaaaatgtaatgtgtagtttctaatccagtagaatatgagggtggctcagtggtacagaacctgcctgccaatacaggagagcgggttcaatccctgggtcggcaagatcccctggagaaggaaatgacaaccaactccagtattcttgcctggaaaatcccatggccagcagagcctggtgggttacagtctatgcagtcacaaagagtcggacataacttgagcatgcacacacgcagaacatgtgattctacattgttaacacgctcccaggtgatctcgatgttgttggtcctcaaatcatactgtgagtagcaaggtcataggaatttcataataaaaggccacaaggctcaacgtatctatccacatgacatttcaaaatgagcctgaaatatatgcgacttagacataacgacttaggtaaatgcagcttggcttcaagctgggacattcttcaataatacctatccaagtgaatgattagcacatctgtcagtcaaaaccaattgagtatatggatgtatctcactacgtgggctgcagacaattagtgggtattatctctgcctttgttgaatttattttttactcaatgaaaggcagaaagatactccgaaagtaccaaaactctcagggacactcagactaaaagagttttcaactacgtacagtcctgttaaactgtacataaggtttttggttttttctttcttttccacttcctgacatattatccaattccttgggcatgctgtgaacacatttcatggactagaaaccacagtgattctgtatgtactggcttctcatatgggtagttaactaaaggaaaagctatcctgttgataagccacagtaatataacatagctatggggtttatatccttcactgacatgatgattctatacaaaccttagtagattgaaagcca

SEQ ID NO: 32429 - DNA, 1427 bp, Bovine  19866880708931
  misc_feature (1)..(1): n is a, c, g, or t
ncagaaagagacattgggtgaatttataaaatagcttatctgtctgccttttcccttccaggtgagcagaaatcctattttctaagtttgaatctctcccctgcattcaaagtcatttctaacatgcagcttcttaaatttcttttatgaaaacagcttgaaattctgggtggaaaagagtctttttctatgaaagaaaagtaatttagtttagatgttattcagtttgatctgcaaaccaagaaaatacccagagtcaattagactggctcaggggccagtaggtggtcctttgtctcagaagctgtttctttctttctttttttggctttacagatgtgaccacggaagccagtatgataatacaaagtgaaattcatgtactgctagcagctttagctgttttcttgccaaatgttatgttcattaagacagctatcatcaaaacaaaacaaaggagtcattcagggagccagttagaaatgcaatctggtattacatttctgataacaaggataaatcagttctgatgagtcccagtaaacaggttttgacttcctttgtaatttttgaatgacgttcttaacttattacttatgtgtgatttatttgaagggattactacccatatattaaagactctgaggatctttaatcatcttccatatcatcaatcatcaaggcagaacgttgagggagagcatatactgcctctaataaaccttcccaaggtgtagagaagctgtggagacagcaggtttcagattttatagcatttgctcagtttgatgcgcattagctgggtatcatttagcagcaaacactatatcagccaagcttcccaggtggcgctagcggtaaagaacccgcttgccaatggaggagacgtgagacgtagattcaatccctgggttaggaagatcctctggaggagggcgtggcaacccactccagtattcttgcctggagaatcccatggatagaggatcctggtgggctacatacagtccatggggtcacaaagagtaggacatgactgaagtgacttggcaggcacacacacacatgtattacctaagccgaagagggaggtgagcaagaatggtagtcagaatgacttgaaatagcttcttctgaaggattatttcatggacctgggctgcacagtaacttttcactttagtctcaacatcctctcaccctgatgccacagtcagctcccagcactgatggcctaattcataaggaagcacccagcatagttcctggcacctggtgttaataacacttgattgtgactgttgagaactggaatttgatggcagcttcttataccggtttctccaagatttattttcagaaattttccacctaggaaatggtactcaagtccttttctcttataaatcaatttctctaaaaatgga

SEQ ID NO: 32430 - DNA, 1037 bp, Bovine  19866880725295
  misc_feature (1)..(1): n is a, c, g, or t
ngagtttataatttaactgccttggttttttaagtttgcttaattttatacataactattactaaattatctccaaattcttgaacatagtccaaagccttcctgctgctgctgctgctaagtcgcttcagtcgtgtccgactctgtgcgaccccatagatggcagcctaccaggctcccccttccctgggattctccaggcaagaacactggagtgggttaccattaagtttaaatacatcaagtagtttagaagttaaaggttgtatgaatggaaaagatctaataccagttaattgaaaaaaagatttctatggtgtcttttaaaatctagaacatgattttatttgcagtgattttaagttttatctgtctttccttttgcaagttgtgctcattaaatttaaggactttttccttaaccccaggtcaaaaagataattctgtatttcttaaatttaaagttttgcatttcaagtttaagtatttgagataacaaaaagaattaaatagtcaaatcagattcatgagaataatatcttatgtggtttcaagcttggtgatataaaataatttaggtattcctgaggcaaaggtgaagcatgaagttcaggattttgggtgctgttccttaggtcctttcttacctcactgggatagtttctgacccagacttaccccataggtttctaagtggtgtggtgtatgcagtcacataacttaaactgaagagaactgtgtaaacatctccattttacactctaacagttatatgtatgtatagatctatttgaattctctacagtttttcgttagctttgtacttctgggtttaatgacttttatataaatatagtgtttgaaatacattatttctcacttacaaattatgtataaagttatcacagtaatctgatattgcctatttaaatgttattcaatttcatagactgaacctccactgaatactccagaaaacagggaatatactgctgaaataatgtttgagtctttcaatgttcctggcttgtacattg

SEQ ID NO: 32431 - DNA, 1120 bp, Bovine  19866880736484
  misc_feature (1)..(1): n is a, c, g, or t
nactgaatggtctatgatctccaactcttgcttgatcttttcttttgtaatattttatgattcttcattctgccttcctcaggcttgaacaggtattgttcacttagactctttctgcttatagtcaaatgtaatccctctctgtgaatgtgtcctaatatttaagatctcccagtgagcttgtgtctgcagggagagagatttttctgccacatggtcagtttaacctcttatcagataatgttaattaaagccttgttatggaggtatggtttgtagatcagcagcagcagcacacctgggagctttgttaaatatgcagaaatccagaccctgctctgcctcctgttgaatcaaaatctgcagtttaaccagattctacataattcatctgcacattaagtttgagaagcaccgaactcaagaaactcttttttttttaatgtttttgcatgtgcttttacctctggcttttacctgtctttccaatgtaagcataataagaaagatttctgttaagaacttacatgtatatgtatgattcacactttctctttgattaaaatggattttcatatatgggaaaagaatctggaaaagaatagacatatgtaaatacataactgaatcactttactgtatgaaagtgaaagtgttagtcactcagttgtgtctgactctttgtgaccctgtggactgtagcctgccaggctcctctgtccataggatttcccaggcaagaatactggagtgggttgcagtttccttctccagaagatcttcccaacccagggattgaacttgggtcttcttcactgcaggcagattctttacattcagcccagaaactaatacaacattataaatcaattatacctcaatataaaatagaattaaaaaaattatatatctttcatcactctttttggctgtatttttaaaaatttagctttatgaataactgttcagttcagttcagttcagttgctcagtcgtgtccgactctttgtgaccccatgaatcgcagcacgccaggcctccctgtccatcaccaactcctggagttcactcagactcactcacgtccgcccttgtcttcccagcatcgggtacagttgcg

SEQ ID NO: 32432 - DNA, 2695 bp, Bovine  19866880756097
  misc_feature (1)..(1): n is a, c, g, or t
ncctcttagactgctctggaggtgttggacagaaagtcagaaaatgtccctaagaactccttggcttcaatggaaagtgttatttcactaagtaaatttctgtcccacccagacagatggtcttgtgaaagtcattcgttgtgtctgactctttgcgaccccatggactgtagcccgccaggttcctctgtcaacgggattctccaggccagaatactggagtgggtagccattcccctctccagaggatcttcctaatccagggatcgaacccagttctccctcattgcaggcagattctttactgtctcagccaccagggaagcccaagaataccagagtcggtagcctataccttctccagtggaacttcctgacccaggaaccaaaccagggtctcgtgcattgcaggaggattatttaccagatgagttacaagcaaagccacagctgaccttggttttgattaaaccagggagaaggttgccttgtgattggtgtattcttgtcccccaactcaccgctagggaatgctactcactagtatggtccatttttgttctttctgaccctgcctatcccaaacacagctaatatgattataggctagcctctctttttcttcatatcttcatctccatccccaacctctacatatcttatttgtgactttttagggaaaacattttaaaccaagatagctaccaaaaaatttgattttcccaaagtaatggatctttatggtgtaatattaggcaccaagagcatttttgtgttgtgctgatattggacttttgtctttggtagccggtgagggtaaagcacaaagccatgtcttcggtcacactgtgtgcagtccacctttccaatcacaaatggttcttagtacgactctcatgcctgaagaaaactgccacacatccatcctatacttccatttatattctcaatgccatcagaggttgaccacagaaaaaaacaatcccatctgctgcaccattatttcccccaaaaaatcacatttccttttccatgcaattttttttaaaaagaagaattttgtttcattgtcatatcttttggggtggtactgatattgtttgagttggtttgttttcatagggcttgctgactccccaaaatgaacaggaacttatatattcagttatacatcagtttgagagactgtttggacaaagttcagtttacaaagctaaactcagaaatgattttccttttaattccgtggaagaacatataagaaaaaggtttgcaaagcccattagccggtgtacaccgtaacatcttcagaaaatctagagccatattttctacccacaggctctggtgacagataagagaagctgtaattatcaatgttttaagttccagccttgtgagaatttctgatcagtctcctcctttcaatctttgttcaaagaacatctgtcttcagttcaatagtttaaactctaaatgaccaaatcagtaaatgtttattttgtaaattggcaaagggaaaggcagaagcaggctcaacctttcactaatattttgtttactgtgatagaaaatgccaccagataaattagagtcaggaagctttttcctaacaggcacataacatttactaatgagaggctgaggactgttttgttcaaaaaaatgaaaaggggattgaagtagcattcttgaacgtgctgtgtcattgccctttccctcacgataaattaagatgaattctttgccacaaaagcagtatatctggtggtgtaggtattaaacatactgcaatattttcaagatacctcaggaataaataaatggagccaggctcttgcagagggtcagattcaagtaagaagtgcagagagtcaagggtaagacaatttaaattttcacaaaatttggaatgagaactccgaaaaaagaacttctttgacgcctagcaaggggtaggggtaagaggaatgttagatgaatgcctaattggaatataacagaggtttgtcaagagagcacactaatcatagaaaacattcttttccaacaacacaagagaaaactacatggacatcactaaatagtcaacaccgaaatcagattgattatattctttgcagtcaaacatggagaagctgtatacagtcagtaaaaataagacctggagctgactgtggctctgatcatcagctccttattgcaaaattcaggcttaaattgaagaaagaagggaaaaccactaggcgattcaagtatgacctaaatcaaatccctcatgattatacagtggaggtaacaaatagattcaagggattagatctggtagatagagtgcctgaagaactatagatagaggttcataacattgtacaggaggcagtgatcaaaaccatcccaaagaaaaagaattgcgagaaggtaaagtgattgtctgaggaggctttacaaatagctgagaaaagagaagtgaaaggctaaagggaaagatatccaactgaatgcagtgttccagagaatagcaaggagagataagaaggccttcttcaatgaccaatgcatatgcatcacacttctatttataatttcatccccaaagtgtatcatttacaatcttaagctttatgactttgaggaatcccaaaagcttgacttcctgtaaattgcaacaaccagaatattttcaaggagatta

SEQ ID NO: 32433 - DNA, 1263 bp, Bovine  19866880762182
  misc_feature (1)..(1): n is a, c, g, or t
ntggacacgatatagtgactgacaacagcaacaacatgttaagcacctagaagtgcacacccatcatttccttaccaccgacaccatcatcatccccatcccgcaccattttcaccactgtcatcaccactgccatttccttctcttcctcttcctcctcattcccttcctccacttcttcaccagcccccgcttcttctctttctcttctcttttattattttcacatcataattttcattcccatttcaactttcactgtttggaaatttggaagttatatgactattgaaatacatgagcgcagaagagacaaccaacacagcattggaaagcaattatactctgattaaaaatacatatataaaatcatgaaaaaaattggtagaatatatttaggacttttccctaactatttaagttgctagggccaatttagttttctgatgtggaaacatgacctgtgagaaatcctgatgtcagagctttcttttcaatcacatcagttaaaaaaaatttttaaataacattaataaagacagactggagagagtatcttttgactcatctgcatttatatctatcagactcatgcacctgcttgatgtgtaaaggtcaggcttttagacagaaatctcatgtggatctccttgaattatgtagaagtttacctggccagataatttttttttttcatagaaactgtagagaatgcattccaagtcatagtctacaaattgatgtttatatgttcccctccggagagagctgtaaccctgagaaggatatcaaggctgataccatggagcagacctgagaaggagcacctggcgtctccagtgattgaaatgatatattaatgagttctcattctcagtgacattttaccaggagccaattaaccgtagtaattacatcttttccattgcatgctttgaaatacgaagtacatgagtgttgggttgctgtgtttgttgagcattgtttttccatttaaagcactaaaagtttgagtcatttattatgttccctttgccttctgggtgttgcagcatggcagttttttgcaaaggatgagttttacaaccacacagatactgctgcatataaattaatataatccaatacaaccacagctgtgctttaaaaggtggcagaaaatacggtgggggagactgcacacagctaagaaatggaaaagagttagagcttcatgctaaaaaacagaatgcttggtaatgagagactgagtaagagatcctg

SEQ ID NO: 32434 - DNA, 1035 bp, Bovine  19866880808102
  misc_feature (1)..(1): n is a, c, g, or t
nccttttgagatggcccacactctgtctatggaatgtgtttctctctaaataaatccacttctttcctatcactttctcgctgaattctttctgcaatgagacatcaagaacctgagcttcattaagtcctgagaccaggtgtgatatagaaggcttacacagtttcaaaaggaggaaacttataaagatagattcaaattttttttatgttctaaaactctaatactttggccacctgattcaaagagccaattcactggaaaacactctgatgcttggaaagatagagggtaggagggggaggtgacagaagatgagatggtaggatggcttcactgactcaatggacatgagtttgagcaaaatctgggagatagtgaaggacagggaaacttagcacgctgcagtccctggggtcgcaaagactcggacatgactaagagactgaacatctttggatggtgcttatatttagtaaaatagattctcaattacttgaaagcaatggcctataaaatctagacccagaagacagaaataatggagactgcccatgcaacccaggcaccaaacatcatcatacaaaatggctttctgtgtacatcaaccagataatcaatttctcttttcaactgtccgtttggcctagagagttagaaattcaaatcactgcaatgtccttgttgccacaataaaacttgctattgtattctaaatactgaatattcttgttatacataactggggcaggttttataggtacacgctcagatttctctgagagcacatgtaataaataacactgcagaaatatggaagctgccttaggaccctaactttaattctacaaggaaagtataaaatagaaatcaagttcttgctttcaaacaagaaatcttaatctttttccagttttctttctaaaatgacagtttataatttagattaaaaggttatctgagatggaataattttaatgattgactagaagagtgaggtttatgaaacaattaatatgggaaaatcaattttat

SEQ ID NO: 32435 - DNA, 1931 bp, Bovine  19866880817313
  misc_feature (1)..(1): n is a, c, g, or t
ncatttaataaatatttgcctttcccattgataagaatggaaaacataatttcttttaattcttcataccaatgctaggttactagtaaaatatcccaggagtccttgggagcagtaacttttcttttttgaaaatttctgagttgtaaaagcaaatgagctccttatctttaaggaacaaaggctagatagtaaatgcatgctcacagtagcccaagattgcactggtgtgtccccagctctaaacaatgacaaaaagtacattaaccacaagatcaagatgcctaatcaatttgcaagtacatggaagggcttagaatgatgggtaataagcagcatgactttgtgaccaacaaatcatgttagaccaattcaattgcctcctctgacagagtggcagaccttgtatgtagggaggaagggacagacataatatattttgacttcagggaggcttctgactttgttccacatgacatgctcatcaacaaggtaggaaaatatggcttgctgtcagagatggattaaattgattagagcagtggctaattggaacgagaaggaaaatcacagactgcatgaaaatataaatgcagagccaaatatgctggcgttttgggtttggataaattcaagggcaaatgagtatagcaggcaaagcagaacacagttagatggcagatccttgcccataaatacaatagctcatgtcttctaatggcatttcttctaactctttggacattaacaagtgtaggaataaatggacactctgttactgtacttgcaggaaaggtgttatgttagattaaagctttgtgtcttcaaaatatacttttaaaatgcaaagaaaaccccctagatataattatttttctattaaactactaatattaagagtaagtctccatcacgagtaagtctccattcatcttcaaatgaatgaattttgatagatcttccaaatatgacagattgaatgagaataagaaaataagatgattaaatttcaaagggaagaaacaggagagaaatcttgggggagcagtaaatggctaaaggcaaagcaataggggcttctaataattctgactgtagtctgatttgacctgaaattatttttttggttagcctattagttaagatctgaccctaaattcagcatttagatcagggcaatcaatatcagatcaactggaagaactaccactatcatagaaatttggtcaggaattggggaatcctttatgacaagtaaatctttaatagataccaagtaagtgtccatctctgatagacacagcctctgccctccaagatctggggcactaaaggcaaagataatacctatgaaagataaaccataagtatttggatctctcctctctccagcatctgtgatttctttttctcacttgaatatatactagtcccctttctctaaaaaatttcacctaattttggtacatttaatgattttaagagatgtctaaatattctttgagatccctcctttgaaaaggtgaagactaattcctctccccttaaccatgggttgtgcttagggactgcttctatcaacatgacaaaaatgttggtgtgtcactttagggaaaatttacagaaggacctcaaaggaaaaatactgatgtatttgacaataataaatgtaaaacatctattcattaaaacataaagtaaaaaatataagccacagaatgtgaaaaaaatacttttaactgcatcactattaaagaacttgtatccagattacacaaagaactacaaattgataaaaagttggacaagtcaataaaaacagtagtttggaagtcttaactgagcattttgtaaaagagaaaattcaaatggtcaatagataaataaaataagagccaccttttagtaagcaggggaaataccaatgaaaa

SEQ ID NO: 32436 - DNA, 1738 bp, Bovine  19866880824135
  misc_feature (1)..(1): n is a, c, g, or t
nataagctctggtgaatgtatgagttgttttatttttttacacccataatcagttcccagagcataataaaacaaaaagcttatttctcccactaacccccttcagtttgttcccagtagtgaagctataaattatcaaccttcaaaaataactgttgccatttaataagaaatataaaatatactctcatctaacaagggaacacacgacagataaaaacaaacacagtattctttaaatttggtgacaagacgaaagatgggtacaagcatgtgggtgcattaaagtcagcagtgggcatgacccagggacacagctaaaaaaaagacctcatttagatgtcataaagtggatattacacatcatttttctaaaatgcagttgcaggcatcttatcttacctcctcctgagctttgcaattccccaaattgtcaaagctaagaaaaggaacaccttatcactccaatatagaggcataaagtgaaaacaaaggcaacctgtgccatgttgagggtggagagctttggtgtaactgcagaggtagccaaacctccagctccctatagattggctgccttgctgcatcccctccggcccctccctcaacacccactccctgctcttctcccagaactttcatgcctgcaacactttgtacctgatgtgttccctacagcatgggtctccaacctctggatctaatgcctgatggtctgaagtggatctgatgtaataataagtgcataatagacataatgtgctttaatcatccccaaaccatccccctccatgtccatggaaaacatatcttccatgaaactggtccctggtgccaaaaaggttggggacctctgccctataaaacctctagtcatcacagactctgattttgtatattcaatattttgcattttaaatcattttaatacatcttatgtaatcaataccaatcacactgaagtctctgggttaaatatcctacgtcaaatattcctgcctaaatccttaaatcccttgctttggagaagtaaatgtggtctacgtaactgagatcttattaaaagtgaagaatctctaatgagcaagccaaagaagctagacatcaaagaatacatgctgtataattccatttatgtgaaagcctagaacaggcgagattaatctgttttgacagaaagcagattagtgagtgcctggggctaggagtcaggaccagggagtgagaggcttgggtaaacttgtgagagttatgaaaacatcctataccttcacggaagtagtgctggcacaggtgcacacatttgtcaaaactcacactgttcacttacaattagtgcattttcttgtatataaattatgtccaacctttgctccatctcagaactactgaatcggcatctgcattttaactaaacactaggatgatctggacatttatgaagcttgagaatcaaaggattagagaacttaactcaggagcacattgaaattgcctgggtagctttaaaccaattccagaaaaacatctacttctacttcattgactactctaaagcctttgactgtgtggatcacaacaaactgtggaaattcttaaagggatggaaatacaagaccaccttatctgcctcctgaaaaacctgtaggcatgtcaagaagcaacagttagaaccagacaaggaacaacagactggttcaaaattaggaaaggagtacatcaaggctgtatattgtca

SEQ ID NO: 32437 - DNA, 1206 bp, Bovine  19866880828843
  misc_feature (1)..(1): n is a, c, g, or t
naaatggaaatgttactttaatcattttagtcaaattgaatgtgtcaaggagaaatacaatgaatagaagcagcactaattcaaaaacacgtcctcagtcccaacaatcccaagtgaagcagagaaaagagattgcatgccttgagaagaagatgctagcaattaggaaagcttggttctaatgcagttcaaatgcaatccatttcaatgctctgagcttcactcttcctattaatatgataataacacatgatttatacagctattgggagattaaaattaaatcacatatatgaaagtgcctaacagaaggccgagcatacaacaggtgttaaatgaatagcttgagtttttttctccttattcctcctttatgtatcaatattatcatctctaaaacaaacacatacacacacacatatataaaccaaattcaaatgataactaacaatattcaagatataactgacgaacataaaatgccttgaaaatgaacatttttcagctcatgtaaaatataggtacaattgaaaattaacccaaattatcttaatatgtactaccttaataaaactccacagaggatatcttttgctcaccaaaaggaaaagaaatcctctacatctccttttcaaaaatattgccccatactgcaggaagggaggtctaagaaggaggggatatattatatgtattatgcatgtgcactcagtcattcagtcatttccaactctttgcaaccctatagtctgtagcccaccaggttcctctgtccacaggatttttccaggcaagaacagcggactggattgccatttccttccccaggatatcttcccaccccagagatgtacttgtgtctcttgtgtctcctacactggcaggcagattctttaccactgcacaacctggcaagccccagggtagtgataccagttctgaattccttcctgtgagcctagcactcagagccactatacatatagctgatttcctttgttgtgcagcagaaactaacataacattgtaaagcaaccatacgcccgtgaaaaataaaataatattaatatattgcctcagcttgatgctaaaaatccctcctctgaacaagcatgtttcatgtctatgggcacaggctcttccttgggtcattttagacaccatatgaggagaatattacacccaaagaccacttttctgtaggca

SEQ ID NO: 32438 - DNA, 1793 bp, Bovine  19866880842186
  misc_feature (1)..(1): n is a, c, g, or t
nctgagggtttgaatgctgaggttttaaaatatgctcaataccggaaaaatgtaagtctaaagatcagctgaacaccacctgtactgagaacacagatctgctctctgtctccatttgacttcatagcagtaggttacaagaacacgatttgaaagggtgttatattcttttattgaatattcaataaaagtataataacattgaaatgctggagtccataggaaacactgtacacttctgttttttcattccactgcgtagtaaaatcctatcttaaaagtgtgcctgcagttctaatctctccaatggtgctcagtgctaaatgatacagactccacggtcattctagaaaatttgcactttttctttgcaatatgagaagcttcagatatttcataaaaccaccatcctccagaaacagaggaaccagacaatatttgagctcttgagaagagccaaaggcactgatttggggatggaaagaatgaagaggacactcagaagtgggcaccagtagtgataaatctataaatgcatagaataaaataagatcaataagtaaattatctcagtgcttctaagagatctctctccctcatgtcccagtctagtagagggcagggtggggtggggacaagtggagagagtcttctgatctctcttgcttctctacaattctctaaaatcatttctccagtggaatattacccagccataaaaaggaacaaaattggatcccttgtagtgatgtggacagacctagagtctatcatacaaagtgaagtaagtcagaaagagaaaaacaaatgtatattattgcatatgtatggaatctagaaaaatggtacagatgaatctatctgcagggcaagaatagagatgcaggtgtacagaatggatatgtgcacacagaaagggaaagggagggtggaacaaactgggagagtaggattgacatatatccaccactatgtgtgaatatataattagtgggaagctgctgtatagcacagggagctcagctcagtactctgtgatgacctagaggggtgggggtggaggctcaagagggaggagatatatgtatacatatagctgattcactttgtcataaaacaaactaacacaacattgtaaagcaattatactccaataataaataaactaaattataataataaataaataaaaataaaatcacttctcctttccttccacctcctcagcaaactatatcagttctcctgagcaattcagcttttgagaaaccaaagatagaataaccaacaggccactaccttctaccccaccaggtagccctcctgaatcaatgatgaactgagcctgttacatgcagaaagaggacaaaaaggaagacacgcaccaattaacacatcagtcaatatcagaaagccacagacgtgagtacatgaaaatagatcatggcatatctcttgtcttcagagtcttgttatgacatctgtaggggcgggggcggggggtggggtggtcattagtagtaaagatgctctccatgtttctgaagatctgctcaattgagatggcactagactgccaggtgagcatatgggcttcttaccctgcccattctctcagggctcttgtctaagtgaatcagacagcctgggaggtcctgccagcatgattaggatcaaagcattcaccctgtctgcagatggtaatcaattcaatttgctcacctcatgaagttatctgccccctgccactcctcctcaggaagtggaaatgaagccctcttgtgagtctcggg

SEQ ID NO: 32439 - DNA, 1852 bp, Bovine  19866880955431
  misc_feature (1)..(1): n is a, c, g, or t
ngttttgccatatatcaacatgaatccgccacaggtatatacatgttccccatcctgaacccttctccctcttccctccccgtaccatccctctgtgtcatccagtgcaccagccccaagcatccagtatcgtccatcaaacctggactggcaacttgtttcatatatgatattatacccactccactctcaagacgaccttacttaactggtcttcccccgagtatgcctctgagcacattgaaggcagaggctaaaccttttctttctattactcttcatggcccaagtcttgccacagagtgtgcgcttcataaatattcttagagtagattaatggctaagttcaaatttctttcccaacaggttccatccctgttcaaactccagatgctccactcagctaagaggatgtgcctcagtgttttcctagctctgcctctgagtgatctgaaaccaccactgtagactgtgccatttgccttcatcacctcctgttgacatctctccacgactgttgtcatctcactggacttaacctttataggaaaaacacaaggtgacctccatccatcttgaactcctttatttaatgtatccccactggtcacatttgcttattaaagtgtagaaagaatgatgaagttttcatggttctccaagtcatagaaatgctgagctgcacagaactttagaaattaaccagaatgagcatttcatccaggggaccaggagactctgtgtgacccaaaagaggggaagtgcttctcagggacacaccgtggggtcagtggtagaattaaaattagcacctagctttccagattcacagttcagtgagtgctttttctagtttgtgtaagtgcattctcatacagacatacatgcacatggataaactgtgttctggttaatgaaatagaaaattgaacaaaagtttaactacttaatgctaacatatttgattttgtttttttaggatacaaattttattcaagttcccatagacgataaactaggaggcactggagcatatccagggacataaaacaaggtggaaaaatttcatggtctaaaggtattgaaattacatagattactcttatcactgtggaatttaacatatttgaatttatgaagctttttgaagttttttgtcttgaggtgctccaacggggatttttagcagatgcaatatcagcagcacttatggggggacttttcattatgggatgtgtcctagcactgcagccattggtattcttggtcccctcctgctaaaatgtcagtggtggtggtgtagtccccaagtcacgtgtgactctgtgaccccatggattgtagcccgccaggctcctctgtccatgggattcttcaggcaagagtactggagtgggttgtcatttctttctccaaaacatcagtaatgctccctagagcaacagttgtgacaactccccagatttctgcctatgtttccaaatgctatggaggcagtcttgcccaggaatcactttttgatcctcagagaagaggatgtagagtagggctggttatgctgattttttgatgaggaaaaaaaaaagatattttctgatgagaaaacttcttctgggaggggtcagttaactggcagagaaagggctatgagtgatcatgagatgataccttcgttcttgtaagccctggctttctgctgttcctatcagatggttgatttattttcagtccagcccagactctgacctactcagaggtgtccctgcttgaccagcagttgttgatgtgatggggaggagacgggagataacaaagagctgaggcccaggagggaggagggagaggcaaagtg

SEQ ID NO: 32440 - DNA, 740 bp, Bovine  19866880964277
  misc_feature (1)..(1): n is a, c, g, or t
nttttcatctgtttttaaaagaatggttaggtgtgatagaattttctatttttcctgattcaactgttttatttttcaatcttgatgacctttcataatctggaaactttaaaatgctgattcttagctctggcctctagaaaatacaatttccttactctaaggatgggcttctgtaaattttaaagctccccaggtgattctaatgtgctgtccagattgaaaaccactgaatttaaccaaaactaaggaaatctgtgggtttctgagactataatcctgcgaacactatccacacaatggcagagtaacgccttctggagaccagccttgcacccccgaatttataaagttacagcaaatagcacaaaggattaaccaaatcctttgatctcaaaaacttctgaaaatctagtcacttcgcttccccttttccatttttccaaatcaaaggcttcagacagattatctttaagcaggtttccaaggactaccactgaaactgaaatgttggtagtttccagcagataatcagaatggaactgatatgaagaactgctcttgaagtattggaattacctattgatcctatgggtggtttaaaatatacagaaggaaggggaagggaggaagggatagaagaaagagaaaagggagagaaggagagaagaaacagctcctatgagataatattcatttttgttgttaagctgattttttcagtagaaatagtccaaagg

SEQ ID NO: 32441 - DNA, 1399 bp, Bovine  19866881021350
  misc_feature (1)..(1): n is a, c, g, or t
ntaaaatgacaaatttgatagttttcttactcactgaaatgtatatcattctttttataagaaaattaattttaagtgtttaattatttgctttctgtcaagaaactgaacatcacgttaagtaggagactggtgtattatgcaaactatcaacatataggctgtcctcaatttataaatggggtgagttctcatcgtttcttagtaattcagaggttggaaatttggagtgtacttttttccatgaagattcgttacacagaatggttagttttctaaaaccaataaaaaattcttttaccctgttaacactgatgaaactgttttcctagagaagttaatctcaaagtgtggtccacaaaccccacgaaaccactgagacactttcaaggagtacctgggtcaaaaatattttcacagtcacacagaaatgcaatttacctactgtgcccacatttacactgatggtcccaaagcaatggtgaataaaaccaccaatgccttagcccaaagctgagggcactgaactagtagctttcattcttcactagtattcatatatagtagaacaaaaatgccaatttcacttaagaatgactatgatgaagctgtaaacattgttcattatattaagtcacaactccaaaagacctccttttaatattctacatatcaaaatgggcagttcgcagaaagtacttcagctgcataccaaactacaatagttgtttccaggaagaaaaaaaatactgcatgattgttcaagatgcaaatgaactacccacttttgccatggaatagcactgttccttaaaaagccaactggcagacagtggttaggggcttcccaggtagcgctagtggtaaagaacactcctgccaatgcaggagatatgggtttgacccctgggttgggggaagatcccctggaggaggaaatggcaacccactccagtattcttgcctggagaatcccatggaaagaaaagcctggcaggctacagtccatagcactgcaaagagttggatacgactgaagtgacttagaatgtagcataaacaatggttattcagacttgggtatccagcagatattttagctccctattcataagtgaagtttcagcttccttcatccctattgagaatatctgaaaagtccataaaaagcctatcacaaataatcaagaatatctattcagtaaaataccatacaaaagtgatgagctctctctctctctccctcccttgtttgactaattttagcagctgctcaaagcttgacttgctcagagaccattgattctcaattcttctgtatggtattctactgaatagacatcttaaccatagcagagttaggcggaggtgttcttttccctgctttctggggtgggaa

SEQ ID NO: 32442 - DNA, 1188 bp, Bovine  19866881054146
  misc_feature (1)..(1): n is a, c, g, or t
ntcagttgaggagcttaagagttcacccatgcttggggtctactcttggagattctaatttgattagcctgtgtcaaggctcaggcattgataatttttaaatgttccccagatgattctaaagcacagtcagggttgagaccactgccttagatcatgccaaggttcactctaataatgggtcagatgccatgattgtcagccgtggtgggcagataactgagagaaaagtgacacgatacacacctaattgctctcttaggatatagaaaaaagggttattcaaagagagatatagctaaaatccacaagtagtagtagcaaatagcattgttgactgattcctatggtaggtgcgagctgaggtgcaaaaacataatagtaagttcaccacatgtaaaaagaaaaatgaatagataaatagacagacaggtagatagatagatacatgaacatgtatggcaaacttgatgaagatatccaagaaagtagatggtagttactgctggaatgtagggctaaaggaagacttatttttattatgtaattgtatgctcatttatgtgaccatggcatgtgtcattgtcagaaagacttttaagatacttaagcaacaaccatttctgatcttgataaggactttttcccccctctgtgctccccaaatcaagccatctgtttcccttttctgataaacataatcggaattttttggataaccccctttgtttactgttcactctctacatacacctaacctgagctctactaattagcaataaaccttaatattttagctgactctgggattggtacttgttgaagatcagacaagcatttttctacagaaaattgcaacgtgggagtaactggggtatagctatagatacacttggggctttacagttatgttgtatataggtgggattagtggatgggctagaaaggagcctatgactgctatgaggaaagatgatagggataaaatagaatttgcattagcttgtagctcccttgggctgcctaagcgctaaagaacttttagctttccattctattgatcaggtctgcctttgatgttctctttaaacatcatccccagagcagaaatgtaggggataatagggacccccgaagaccacctagggtcttttctcccacccctgacacactactcctccactcaga

SEQ ID NO: 32443 - DNA, 1310 bp, Bovine  19866881110464
  misc_feature (1)..(1): n is a, c, g, or t
ntgatggaaacgtgtgaagcaatttggtgtcagaggggaaggcagattcctgatttggagtcaatcagctgacactcagataaactgcagactcttattttgacaaccccttagggtcttggcaacccactccagtgttcttgcctggataaaaccagggacagaggagcctggtgggctgccgtctgtggggtcgcacagagtcggacacgactgaagtgacccagcagcagcagtagggtcattgtgacaaacagtgacagggtctggcacacagctcggggatcctctggtcttgagtgtgctgggaggctggatggcgagcaagaaggatcgtagaaggaagagaaccctttcctctcagacctgaaggaggaaaaactctactcatttaaaatgttcaaattttatgaatataaaaaagaatgtatgtatatgggtaactgaatcactttactatacagcagaaattaacacaatgctgtaagtcaactatatttcaataaaaaataaataaaggcaaaagttaaagtgctcaaaattcttatactaggtgtctcttaatatttcagaaatttaaacccaacaaccccccaggagcaaactgcaatctgttccttcttctaaggagtttaaacttgtagcagctgttggtggtggtccttgatgtcttggcaagcctacccagtgcaaaatgtatgaaaccctaggaactcagaggcagccacaaagagaaaaccctttagagagaaataaagttcttaacaatccctgctaactatgctgtgaaagggagaacactgtttcaattaccaaatgtcagctttaatccccacttacgagcactggaaataaaacgatgcaataattacacaatctgcagaaaaactgacaaatatattcccaatacaaatgatttattgagccagcccggccacagcctggcttcactccttaatggaagctgtaaaaatggtgccctgtccttcaataatcaccacgatttcttacaaaccactgattaagcaatagatgaggcaagcattttggaaatgctaaagtatctctgattgttggagctctctccaaaatgactgtgtctgcttaggtggcctattaaggaattgtatgatggtatatcagaaaggaccttttacaactgaggccattccagagatgataagaggttacgtgttaggcagagggcatcatgcatcatgcaggaaatccagaggctctgatttccagtcctttccacaatcccccacagcctcacctattaacaaggcataatcaaatggggccattaa

SEQ ID NO: 32444 - DNA, 1809 bp, Bovine  19866881191898
  misc_feature (1)..(1): n is a, c, g, or t
naactaaaagttgccatcataatttgctacagagctgagtttatatttatacaaatgtgcatggcaaactgcatataagtctctccccaaaatggtgacaaattagtcgcactctaccaattctgacttaaaagaacatttcttcatatttcatacatagagcacaccaacgtggaacactcctgtgctctctttaaagcatgaccacttatgcccctacaattctactttaaggaagttaaccaaaggaactaattacgaatgtgaattaatttggggctttaaggatagttattacaatatcacttatagtagcaatctaaatgttctattgcatgagattggttacaatcatctaaaaaattattctgtggagaaatatttgttggtatcaaatgagttcattatgttgaaaaaagcaggttacaaaataatataatcccattgtatttatacaatacatacatttatatatatatatacatacatatccatctatatgtgaatacgtatgccaaactgaaattttataagcaatttctctagatgataataatatggaagatttttaaaatgtgttttttctttaccctaatccaaattttctgtttttcctataatgaacagttgctacaattgcaatatggaaaaaaaaacgccataaaattttaatcaaaactttgttggtgatcataataggtacaatcaagtaggaaatacactttacacttttcttaatcagtttatcctacttgaaagagacacatgtcatgcacacgtggacagcacaaggctttaagcctaaaacagacagagcccagtcgacacctgtgatgtggatctctctgacatagttggagaaccatttcttcctaaatctgtctaatccttgacttctatgaagttaccttcaggaaggcttctccctttagccttttcatcatgcttttattctttttcttagcctccttgttttagcttgacccatcataacaaagggggcttcccgggtggggctagtggtaaagaacccacctgccaatgcaggaaacataagagatgtgggttcaatccctgggctgggaagaccccccggaggtggacacagcaatccaccccagtagttttgcctggagaatcccatggacagaagagactagtgggctacagctcatagggtcgcaaaaagtcggacatgactgaagtgactaagcacacattagcaagtcataacgaaataccccaggctgcttaaccagcagaagtttatttctcatggtttgagaggctgcatgtccaagcaagatgcgggctgactcaattcctggtgagagtgttcttcctggcttgagacggcatcttctctgtgtgccttcagtcttttcttggcgcatatacttggaggggagagagagctctctccctttttcttcttacaaggccatttaatgccatcatgacaaccccaccctcaagggcaccatctttaaataccagcacagtgggagttagactttcaacatatgaatttgagggcgagggtagggagcacaaacactcagtccataacactcctcttcttctgattaaatacaaatgttttccagggctctgtcctgatgctttgcacattctccaccattcacatatagcaatgctttccaccccatctttttctaaagtctcagtgatgactcaggctccaactccagacccaaatcttccgtgcgtcccacacacagctcaaactcaaatatcctaaaattgctacccatctccagactcactttagggtaaagaaaaacaaaa

SEQ ID NO: 32445 - DNA, 1068 bp, Bovine  19866881231692
  misc_feature (1)..(1): n is a, c, g, or t
ncctgaattccccctgatatagacccagaggggaaaaatacaaatattgttctcccagggaaaaccagtgcccaatttagttactgctggatggatgacatgattcgtaggcataggagatctatcatcttcaacttttctatctagccaagatcagactgtggtaataagtctaaggagcagcatttcaactccagctgtggatccaatttccacttatatgatttaacctggaaattaccagtgacaatcgcagagggaaaatgaacagctgatttgggaggtacagtgggagaagctggctcagccttgtaagaagaaaagacaaatgatatacatggcaaactgggataaaggacatctttgcggaaatgaaatgtgattcacagtcattccaactgtgtagccaccaaacagcctattaaggaatgagtggtttgatgggattataggtaagataagtgaaattaaagaacatcacatgcatctgggagctttgattgagaggtagtgagaggtctaagcagcaggaggaaatgaagactggatcatgctttgaatgaaaaaataaaaggaaaagaaaggtagcacatggggggaaagtctatttaattggggtgcagatatagggggaaattagtttccaactctaaaatatgtaaaggctgagaattgtaaaaagtgtaatgaaaactcaaaaagtgtcagcatctttagttataggggtcccatgtgttcaatgaacattgttaaaaccctaagagccaggtattgtgcacatctgtagattaaagatatcatctcttccctgcatgagattaagattggggcacagaaaaggcagctgaaaaatacaggaacaaatgtataataggaatcagtatttccaggaaaactaccctcttttcattttaagaacacagatccctccattaattgaccttccatatactctgccgctcagtcttcacataccctgccccccattgcactggcaacaaaaccgaggacctgagatatttacacatatcacagagacaaaaatcaaagaagctggggttgaaccca

SEQ ID NO: 32446 - DNA, 1286 bp, Bovine  19866881246900
  misc_feature (1)..(1): n is a, c, g, or t
ntcgtgttttagttgcaggcagtagaaatatttggggtgtgtgagtttcatctctgtttggccctggggttgatagcaatgtattcccaacataatgattcttttcatgtgacagggagctggagagagggatgctgagcgaaggagtccatatattccctataactcgaattactacaatgaattgctacattactcacccctgcactggacattaatcacaaaaacgaaagtgcagtgccagggagttggagaggctgtgctactccagcctgcaccctgtgccaggagcctatggctacagtgaaggtctgcaaagctctctgtcctttctgtttttaaacccttagtcacagtggtttgtgagggaaagtcacagcagagacttagacggaactgagctcttgctcctcagagagggccacctgccaaccaagagctcaccagagtctcctctggatcctgtgcttgacagtcgtgcgtgtatgtatgctaaattgcttcagtagtgtccgactctactgtgactccatgggctgtagcctgctaggctcttctgtccatgggattctgcagccaagaatactggagtgggttgtcatatcttcctcttatgtctcctgcactagtaggagggttcattaccattgagccaactgggaagctgattcttgccagtcagcttacctgtattggcctacgcttgatttggtcaaattcttaagaacctgagatagttaaaatatctgaatacttaagaaaattacatatctgggaaaaatatggacaaaattgtttatgtcacagaaagaagcaaattattaagaggaaaagcatgttgccaagagatatataaatataatctaattcgtttatatatatgttttaacaaatacataatattctgtttttcaccagcttatgggagacaggctcaaatttgaatctaatcactgcagatggtgactgcagtcatgaaattaaaagacacttactccttggaaggaaggttatgaccaacctagatagtgtattcaaaagcagagacattactttgccaacaaaggtccatctggtcaaggctatggtttttcctgtggtcatatatagatgtgagagttggactgggaagagggctgagcaccgaattgatgttttgaactgtggtgttggagaagactcctgagagtcccttggactgcaaggagatccaaccagtccattctgaaggagatcagccctgggatttctttggaaggaatgatgctaaggctgaaattccagta

SEQ ID NO: 32447 - DNA, 1350 bp, Bovine  19866881261131
  misc_feature (1)..(1): n is a, c, g, or t
ntatcaactaattttcaagctctttatgagcttaggtcatttcttggtaccctgccccagcagtcagcttgggactagtcactcactcttcacagagtaagagatgccctgcatctttggactgactatggggtcaaatcacattttgagtacactgggtgatacctatggaagcacgcacaagcagaagaggtaataaatgttgaaatgataaactggggaaagcagtgtctataaaatgaaagaggctttatggatttacttatttacttaaagagtagaggaaagtttaagacgcacagggagagatgttcagcgtcattctgctgaaactttaaggatggttcaaatgccttttgaaaaccccttctgatcccagtggatttttgtcctatgcagtaggattagttgcttcaggaaaaacattagaattgtaaatacttaagttaatgacttactagtaggcaaaataaacactatgaggtaagattttggaaacagatctagatttgagccccatatctagcatttagaatctgtgtgaactcaggcaaattactacagaaggacctgtatggaaatatgagacttgactaagacggtgcaggtaaaagacttcttcccacatagttgagaaaacaataaagaacagcaaagataagatttactactatgttatttggaaatgtaaaaaacataaaggggagttaggtctgatttagagaagttaatgcctaattactaggcattgccttacctttgggaacactacatacaataaacatttgcctgatatccaactgggtgggtcctgtgctgattcttatttcattttaaatcatatttcctttggcttcattcttactggagaacaaatcagatgacagttgtgaccaggttcatctctcttttcttggaaccccacagggttttttctctgtttccacattttggcttgactttatgtgggaccttaataatgacttaaaattgaaaataaaattcagtcactgatactctcttggtagagatattatgttttcattttaccaattccaccaaatttggggaacatcatgtagttattgtcaagtccaaagcttctaaaatatacattgatatatagagacaggagaatgaagaggtcatgcagaagccaccaaggtaccaagtcattgtttagatgtgatgaagagtccattgtaagaatagatgcaagaggtttttgccgtagatgagaggggcagggacaaaatctaaaatttttcaggttgcttattaattagcctagtgctttcctttgaaacctcaattcgctcattaaaacacatagaactaaattgatactgt

SEQ ID NO: 32448 - DNA, 1236 bp, Bovine  19866881280513
  misc_feature (1)..(1): n is a, c, g, or t
ntagtgaaagtgcaaagggtaaaatattggaagctgatccaaactttgaaaggtatatgacaatttaccaagacataaaaaagaagcttacagtatattataggttgcatctggagaagaatggaaacactgttcaaataacgcttgataagtttcttacaaagaaatacagtgctttgtgaactccactctcccaatttctccccctcccctttcccccttggtaactagtttgttttctatatctgtggctctgttcctgttttgtaaataggtttatttgtaccatttttaaagatttcgcatatcagcgatattgtatgatatttgtctatctctctgtgacttactatatataaaatagataactaataattacctactatatagtacaggaaactttactcagttccgtaattacctaaatggggacagaatctaaaaaagaggggatatatgtatatgtacaactgattacattgctgcataaaagaaaccaacacaacattgtaaatcaactgtaaataaaattaattaaaaaagaaatacaatgctttaattctcaatgtttctaagatttttaattcacattgtactaaatatatattagctttactacttttcatcacttgatacatttgtaattgatagtaacaggcttttaacattttggcaaaattttttaagacttgcagaacaattacagttttcactattaaagattactcctcagagtattggattcacaatcatttttatggtcctggagtaccatgcgaaatgaggactgcctgctttcttattaagaaaaagacactttgagtcagaccttttactgctcacaaatgacatggtcatattgatctaagacagtttgactgataatcttgagtaatgtgggaacccttgtgtagatttgtcctgtggacataaataatagctgggttggaaatgaagtctctcagtgaattcctctgtttttttaatgctttagctttgtttttttttttttttcctcactatcagcctgttagaataccttagaagagcatctaaagtaggactagatttcccttgatgttgttaaatcaagatctttttcaaggtaattttgtagaagctatttaagttgtcccactagataaatacctgctgatgactattctattcactccctaattcctgagcttttgtttccttgattgcctatttagtttgtgtaatttaacattttga

SEQ ID NO: 32449 - DNA, 1050 bp, Bovine  19866881300963
  misc_feature (1)..(1): n is a, c, g, or t
natgaaaaatttaatcatccttcaatctcatctgttaggtctccattgcttcatgtgcaactttctatacagttcctgtttataccacatatgaacacagacatacacagggctcatccttccttcctttctccctcccttaatcctcccttttccactcatagttttccaaatattggatccccactacaaatcaatggtcacaaactagcggctcacagtcagggaaaatattttgttggcaaaagattaaggaaatttaacatgaacaatctggacacccattcctctgtgctgatgatgttatcaacgctgcacaggctttctaatttaacatggtcctttccagttcctattattcacgcctctactaatccacctttttacattctggcctatcacctgtaagcatttgaatttatatcctcctggtattacttaccaacttgctttttgcatttaacattatgtcatgatattatcgattagaattacatgcagttgcctataactgaaaatgccaaatgatagtggcttaaatcctaccggtttctctttttcacatgtaaaataagtctggaagtgtgtgggccacagcctagatggcacttcagagtcgtaagtgacctgagctcctcctatttttcctttccaccttccttgggacctggcttctagtctcaaactcagtttatcatccctactggctaagaattctagtcactcaatgtcgatctgtgttacaggcagtagaaaactggagggcaaaacacagaatggtgcttctcctgaatcagccttctttaaaggcattttccggaagtcctgctcaaatactttcactcagatctcatgagccataactttgccacacagccacacctagctacacaggaggtggagaaatgtccttgactgggaacacaagcaccagaataagatccgggtactgctatcaaggagaaaacaaaaatatcaacctctgctccatatccctgcaggttagtacagacatatggccgagactggtcagggtcccctcaagttcca

SEQ ID NO: 32450 - DNA, 1088 bp, Bovine  19866881305274
  misc_feature (1)..(1): n is a, c, g, or t
naaatgtatctctaattcttatagttaaaacctgtatctttttttcttatcatttttgacattctattttttttcatttatatctatccatatcacattcattaactactaaatttaaaacaataatactgtttatcctcaagaaaatgtctcattttccttacttcttttggttcttgaaattgaactaacaaaaaggttgtagatgtgaagttaggtagaaatactgaggaggtggttggttcaattttgttcctagctctctgattatctatgttacagcacagcaatgttggaatttcctctgttctaattcttcaacaccttttagactgcctagaggaaacaaatggtctcttgactttgcaaggaaaatgatccaaatctctcaaatgtaaactacttcccattttgatttgatagcattttctcactaaccaggagggaagacgataaccatagaatagcttttattgccagtatcatattcttatttctattcatcaactaatagtactgtggaagcatatcaaatcttaagaacatgatatgtgctgcaaagaacatataattaggcttttaaataatggtatagatttcagaggctttaagttaatccagaagatattgttgtctttctccttctcttatccccctcccatatttgactaattgctaactattaaatatttattgagtaactactcagttcctacaaagtgctaaacagtgagaaaagactcaaactgtttaccattacagtaaagcaaaatcccaaccaactacgtgcttaaattatatggtgagataaaacttgaaagggtaaggcaattagcaagtagaacagtgtatataagtgaaaatggtatgaaacattttatactcctcttttttgtaagagatcccaacttctatcaatagagaagaaaagtgtgagaagtataacacgtttcccttatttaaagagctcgggaaaaaggataatacacatattaacatagctagcttttgctaaggttctagaacacatagaggtgatcgctcagtcatctccagctccttgcgaccccagggacttaacctaccag

SEQ ID NO: 32451 - DNA, 1552 bp, Bovine  19866881318300
  misc_feature (1)..(1): n is a, c, g, or t
nccttttggtaggacttcagaaattacattttggtaggacctcagaaattactctagtttccaggaagaaattcctgaagacctgaactaacagcttaccatgaaacacactccaaaactttaattctgatatataatgttatatactttaaaaaactctctctctgttgactagtacttgggcccctcctgaccaacaatgtggagaaataaaatacattaaaaaaaaatgcagatcatcttcttttcctcagtcttgtttttaagcaccacatcttcctctgatactttgtgctcattccaagacattttcaaagccttgtgatgtttcctggccctgaccctcttgtgtccttttgtgacccacaaaaaaaatctaattcacattaaaatatattgaagacaaataacatacccagatatcaggaagttattataaaattgaatcaaaacaaatattaatagataagcataaaataaactcagatcttatagccttaaagggattaatgtatgattttgattttaagtgccctgaaaagattattattagatgcattaatgacaattttcccaatattggacactagtgtgtttgcttgattttgttgcacatgtcctagacagaccttttaaaaagcaaaacaatgtattattgatgtaactggaaatataccaactgaagaacctatttctgagagataggtcagaattcttgagaacaagtttctttgaaaaacaaaattgtgctagggaggagagatgtcacatcctcttgaatttttgtactcagatataaattgactgatctaaatataggaaaagttagtctgtaaattgaaaatgcattagcaatttttactcccattcccatgggactgcattgtttgagagaaatgtgtctggggctgtgttttgtttgatctggaaggaacttgaagactgaagggcagagttggttctactttgattattgtaatgccaatatatttttattcagtgcaagcttggtgactcctagtcagaagggaggtgtacttgtttaacgaaagattttctggatgaaggatggaacatatggcagcctcaggttttctgtcctattctgaaataaatgtaaaaatacgtgtttgcctttctaggatgcaatattgattttatgtattcagatgcattttagagaagaccctccaaatgtcaatggacttgcagaatgcatcacatcttaatgtggggtaacactagcagttgggatgaaaactagatgggcttacaaaaaggccaaacaaggggactttgtgactctgaaggcttatttgttgttattgtagttgaaggagatgcaatttgatctgagctaatgacacattcatagtcctatgaatctgtacatatcatttggtttcctctgaaaatgaattaaagcttcccaacacaaaataaaaattaaaaagattctgaagtttctcagggaaaaagaattatataatttcaagacggaaggagaaagaggagaagaacattattagacagacacctagcatagatcggg

SEQ ID NO: 32452 - DNA, 1025 bp, Bovine  19866881336418
  misc_feature (1)..(1): n is a, c, g, or t
nttatgagcatcaactaaatttttttgctatataatagagtttcttctttcacaagtattgcttaaagcagctaaagaactaaatgaagtttcttaaattaagctgaaaaaaagtctggtaaagtaattcctaaccaacaagtcatggtcccacgggctggtgctgccctgcaggccagagttctaactgtgtatattggagaagctggttactgtgtttgtgagcacaggggaagcagacagacagaactgttgttgggtatctcagcctgattgctgggagatgcctccagaggccagacctaattccagaaagctgctcttcctcatatacccagagttgtgatggatgcctgttatttaaacccttgaaatgtgaggagaaagtatctaaaatgagcatgatgaaatgtagccttattcaattagaaagatgaagcatgattttgagaggcagaatataattacacagttggagcatttccaggaggttgtgcatggcaccccagctgactctggaagaaatgtactcagactgagcccgggcagatggtgtccatcatcctcctcctcacaagtgctgcaaaccttggtcttacgatgaccataatgtctcatagtctcaattcatacccaaatgccagtgatatcaactttgcacatttatgaagtcatatccacaaaacactgaagaaggctgatctcacattcttcagtgttttatgaataagactttataaataaggctgagcaccaaagaacttatgcattcaaattttggtgttttaggaagactcttaagagtcccttgggcagcaaaaagatcaaaccagtcaatcctaaatgaaatcaatcctgaatattcattggaaggaatgatgtggaagctgaagctccaacactttgacacctgatgcaaagattcactggaaaggaccctggatgctgggaaagtctcagggcaggaagagaagggattgatagaggatgagatggttgaatggcatgactcagtgggcatgagt

SEQ ID NO: 32453 - DNA, 1385 bp, Bovine  19866881350709
  misc_feature (1)..(1): n is a, c, g, or t
ntttttttttttagtttggggttgcaaggctgaggtcttacaaattcttggtggttgagggtggtggtattgttcaggggattgcatatatgtattttaaccctttatgcacccatgcaagtgtgttctgggtctggatttgtcttggtctttgtgccttcttcccttgctagcattgttaactgatatgacaaggagactagcaaatcctgctttcagagctgaaagcaggagctccgctttgcatcctgatgatagactgttctaggagagaagcagggacatccccaggcttacagaaacagttagtaggatcgattttgtgtttacctactttatttgtatgagtagcagaattctacttgaatttttttttctatagcacagcaactgttggcaatatatctgtcgtggcaggcatattcctaattcctggaatttcctggtatttaaaagaaaatctacatatggatttaagtctgttcacaaccaatatggacaggaaaggaaactgggtttaatggggactgacattgtgcttggaccattggcatcttcctaataaccctatgagatgataattataacccaactttgtaggtgtgaaaattcagataaagaggttaagtcattttctcagggtcagtagcagagttagaatctgaaacaagctctgtttaactttctattattccaaaagcctaagcatttccaatagcaacatcttccttctcagtatatgaaagaagggatgttcgtggttccatcttatacagtaaaagtatactaaagagaaggcattttaatttagtgttcattcttacttttaaagtattttatcttacttatcttactttatcttacttttaaagtattttaaaatatttgttctccatctaaacgaaaaatacgctctgctcaatgctatgaaaaataaagttgaattaatttcaagtttgttagcctgttgaaatttccagatgtggttaaaaatcaaatgtgttattttgctatttagggtttgaaatgtaagctctttgggaagtctgcattgtttgggggtttccgaagctcttgattctttcttgctcatttacactgggtttgcaatagaaattatccagagcagcaatagccttgaagtattttctgtattccatcaagaaacccaacatgtcctttcaaaacttaattgagcagcacaaagctaattagctgtccgaagacacgccatttaattcacaatccagcattaatttgttcaacacaatgagcttatcttccatataaatgccttgccctatggcttctcaagcagctgcaatatacaagaatgactgataactctttcctttaaatgtgatggctgcttttattctctctct

SEQ ID NO: 32454 - DNA, 825 bp, Bovine  19866881357488
  misc_feature (1)..(1): n is a, c, g, or t
ngttgtcacagagcactggctatgagctccctgtgtcatacagcaaatttccactggctaacaaagtctgttttcctctaagggatatccattttccttctcttgacttcatggcgatgaaagaggagatacagttgcaatctgaacccaaaaatctggggattattgaagtagtataaattttctttaagaaattatcaagatggtacctactttgttatccgcccccccatattcctaatgcaaaaccttgattaattaaacaacaacaacaacaaacccctgcaacattgatttagatgttgctcagcccaaccatcactaattagaaaactcaccttggacatggaggccacagaattcttagaggagggccaccttttgaatctcagccaaggaaaccagtagcgcctatctcttgtcccttagcctttccaaaaatgtttaaatagctcatggggtttaagattttttaaagtaccatttaaatggtattaaattggaatattttcacctagccccaaagacttaattttcaaaaattctgcttgatcattagcacaactggtgtcctcattaataagctgagctgccaccatccatgtcctgttacctttgtgctctgctatttacaagctggttgcaaagagctcttgcaagtcattgcattataatcaatttgcttggctttccttctagattcattaaattgtcttcaagggtgcccattaagtatgcatttctcatcaactaagtggttcaaaatgaaggcctttgaacacttctaattaactatgtaaagtttagaacaaagttaatagtgac

SEQ ID NO: 32455 - DNA, 956 bp, Bovine  19866881467947
  misc_feature (1)..(1): n is a, c, g, or t
ngacatacatttttatacttcctctaaactcttttacacactttatagtcactttagtataactaccagttcaacgctcaaatgaaggatgcacttttctttggaaagaatgagaagttccaaatccatatgacaatgaaacactgtaagaaagtctgtattcaatttaatatcatatgtttccagcagtttgcaaatcctacaccagttccatcaagaaaaactgacatagatcagaaactcttctagaggctcactaaactttgtttctgaaatacaccgttgatagattctaagtcaaaaaaagccaaagtcatcaaggcaaaacagttatttagtgcaaactactctctctatcccacatacatatgcaaatgaaccaaaaactactcagatccaccttcaattcaactcaaaccaactaggtatcaccactgtcagtgccctgccataccaatgcacatgtttgaggtaaatgaataaatctacattcgcagaagcagagagaagaaagaaaaacctgggtcctaccttgattgttttcgagggctgacacttgatgtgatgggacacgctggcagtttggttcatgtttcaggaccctggacagtgcacgatcccaggtggagttccacgatgaactggagatcagttctcctttactggacttcagctggggctgctgctgttgctgttgctactgctgttgcttctgctgctgctgcttctgctgctttctcactccggaggctgaaacgctgtcagattggagggatctgtatctcacttagccctaaaaaaagcattcacttggttcatcagtctcaaagctcttggcgatatggaatagaaaactaaagactgtttcaattcacttgcactgtaccttttcagtactgagatgtgacagcttcacagtacagccaagatctggctctcactctcttttcaaaggg

SEQ ID NO: 32456 - DNA, 807 bp, Bovine  19866881525485
  misc_feature (1)..(1): n is a, c, g, or t
ntcctgttgattgctctaggaaataatgccaagttaaccattctggaaatgagtacaataaggtctaggacttgagccttagttttcagggtgttcactgaagaaatgggactagacaattgataatcctttaattcatctcttctaagcttgtcaccactcaaaaaccaagtcaaccatttgctaaatttcccaggctgtccacagttggaaataaagccatcttcctaagcactgtagtgctatttatctctccttatcattacaacagaatccacagctctgtcacacagcatagattataacaggaacataaaacacagcaaattaattttctcacataataacagtgttagatgacaaagaaataaaaacaggctgtcctcttcccaaagcaattttaaaactctaacatcaagtcacactcactctactctaatctactagagacttcataaaatgcattcttttaaagtatttattttttgttaacgcacagatattccctattgttgcataattaagtcagtccacacaaagcctccatttattattgaggttgggggcagtgctaaatattgtaaaggaccttttaaaaatcaagaacataactagagcaataaacatctctgaactgggtattattgggtgaactattggaaagtaattgttgttttgttcctcatataaatttaggactccatctgatctccatgaaatagatgattagcaacattttaagggtagagcatcagaggaaaagatgttaccatacccataagcaaaaacaaatagaattgaaagcca

SEQ ID NO: 32457 - DNA, 1347 bp, Bovine  19866880681453
  misc_feature (1)..(1): n is a, c, g, or t
naaataattttttaaaaattcaaaaccaatacagtttttgaagaatcttgagagctggttttctcctaaacacctaaacattcggctcaacacacacacagacacacacacacacacacacaaattcctctttaaagtgactggccagataaagcttctttaaaaaacattttttactagaaatctgtttcaggcaaaatgattttactgacataaagttctgagagggcaccaactcatacacagacttacaatcctctcacagagtcattgtactctgcaaagagagatttctaatcccttaatctttccctctgtgttcttaaattgcaatttaaatctgtccttgcaaattctagaaaatttattttggctttgcataattcatcactgacaaaattaccatttagcatacttagtatgcctctgacaaggagaaaggcttgaagttctcaggacactcaacttgagtataacttaggtcaaaattattttcacttgactttggtagagtgagttaaaataactaaatggattatttaaagacaacactgaaaatgcaagtggataatagaaataaaaacatcaaaatttgtgggatgattagagggaattttttttactttgaatgtatacattaaaaatgaagaaaaggtgaaaataatttgtctaaccataaacgttaagaagctactctgacttccttaagaagtcttcttgtaatgcccaaagatactctttcattctatctcattaaatagaaaatgatgacatagccacatctatatacaaggaaggttaggaaaaataacatgtagcctgaaacaggtctgctttatatacaactgagatttcttgggaaacgagaagtagggaatgccgcatagcttaatacagagattacacctaagaatttcccttgtagtaaccccatgaagtaacactttccacataaatacatctattttcccctaggcagaaataatgttaaaatggaaattggcagcactccttgaaggatgatttagaccaaactacagtttgcataatccatgaaggaaagtataatagaatgatgatatctatgctgtcttgtttaacactaattcatttaatccataattatatggaatgtctaccttatgacaaatcctaatttacatattgacaatacaaagataaatcagacaagatccctatttataaggaatttatattctgctgaggaggcataaactattgataaaaataaagaaaaataatctactataagtaccagaaagaaaataaaacagggtgatatatggttgcaggtagggaaaacttttgatgaatgtcaaagagagt

SEQ ID NO: 32458 - DNA, 1343 bp, Bovine  19866880702188
  misc_feature (1)..(1): n is a, c, g, or t
ncatttaaattttttaaaatgccatgctaaattctctcactcagtaatacagatgaaattattgtatttcatcagtaatgaagctatgtaaatatttaaaaatatgtcaaaatatattctcatttaaaaaaagatttgtaatattctatttatcttatcttcagttgcttatactaaaagcaaaagtttcttatattagtgaagttatttttaaaaattattttactagtcatgtattctaccttaaatcagtgctcactgtcagtgaaagtgtttcttcatatggtccccaaacctagtttaattgctaaattgattaggaaaaatatagtcagctcatcacctgactgatagactttgtttttatcttggctgccaacatttgtcaagcatatagacatattctaacatgcagacaagtgttgaatacatattttacaatattctgtgtcatttccttaaaaaaaaaaagtgtttactttgcaagtaaacagacagtctatctggtaaaaacagactcaaataaaatccctggaaaggagtagaacagatgtatcttagtaacatgaaagtgaaagtgttctccaggccagaatactggagagggtatcttttcccttctccaggagatcttcccatccagggatcgaacccagctctcccaccctgcaggcagattctttaccagctgaaccaccagggaaacccaagaatactgtaatgggtagctaacccttttccagtggatcttcctgatccaggaatcaaaccagggtctcctgcattgcaggcagattctttaccaactgagctatcaggaaagccctcttagtaacataactaactacatatgcaattcatcttccccaccttatataaagggatgagatactgctcagtagcactagcatttccaattgaatattggctgctggattatggagcaattttatgaaaaagtcgaatggtttggatagattatataattaacaaaatttttgaatgcttgtcaccatgattatcatttcaatgtattgattttcagcctttagctagttttttccacatcaaatgtgggcactagtttaagtaactttttggtaccttattaaaatttttattaattataaaatttaagtaaccctttcagattaaatatatccaaaaatcatcataatttgcatcaaattgctctctattctgagcttctggtagagaaattttcatagaaaagatgccctctaaagactaaactccaaaaataagctacagtctgggccactgattactcaaaatttgcatccacaattcttttactaaatagtacatttaggaactaacat

SEQ ID NO: 32459 - DNA, 1674 bp, Bovine  19866880739210
  misc_feature (1)..(1): n is a, c, g, or t
natttaacttagatgcagagtacattatgcaaaattccaggctggatgaatcataagctggaatcaagattgacaggagaaatattaacaacctcagatatggagatgataccactctaatggcagaaagtaagaggaactaaagagtattttgataaagctgaaagaggagactgaaaagttagcttaaaactgagcattcaaaaaatgaagatcatggcatctgatccatcatttcatggcagatacatgaggagaaaaaaaaatggaaaccgtggcagattttattttcttgtgctcaaaaatcactgtagacagtgactgcaaccataaaattaaaagacctttgcaccctggaaaaaaagctctgacaaattctagatagcatgctgaaaagcacagacgttaagagattaagacattgcaaacaaaggttcatataatcaaacctgtggtttttccactagtcatgtacaaatgtgagagctggaccataaagaaggttgtgttgaagaagtgatgcttttgaactttggtgctggagaagactcttgagagttccttggacagcaagaagatcaaaccagtctatcctgaatgaaatcaacactgaatattcattggaagggctaatgctgaagctgaagctccaatactttggccacctgatgtgaagacccaacacattggaaaagaccctgatgctgggaaagactgagggcaagaggagaagggcacaaagaaaatgagatggttagacagcttcaatgactaaatggacacgagtttgagcaaactccgggagactgtgaagcacagggaatcctggtgtgcttagtccataggttcacaaagagtcagacatgacttagtgcctgaatgacaacaaccaacatattattttgagtaaatacaatcagaaccaagaagtatgtgacacaatataattggaaaaattaactcatgttacagtgctggaatcatgtatttatattctctgataaaattaagtctgatataccatagatattaattctactattgaagaataaggaaagcttttttcacaaataagaaaagaatttttaagaatatatatgaaagtatagtttttttcagtttttattgggttcctttgcataagtatttctagactataatcctctagtcactagtgaaaggactctagtttgtgctctggtgccatcagtctgcccataattctttactccaaacacacgagcagatttctcccttaattctacaaaactttgcttagcccaagttgtaattctaaaccaaactttagtgaaagcttggagatagcaagaagaaattatagctctgaaaagaaaatgttagcaacagacaggggccataaattctcctggacaccaaaaacgatgggtcttcacacagtgagtatttttggctctttcttgccttattgcccattctcctactgtcagatggcaagggccagtttatttccctcaatggtgatgtttgaacctgaattctaccttcatcttctcagattatggcggtgatggaggaaaatattattttccactcccaggctcttgcctacctccaatcaaaatctcaataaaattggaaatgcaaacaatctacgaattaagataaacttttaaattattgtgcagaggaatt

SEQ ID NO: 32460 - DNA, 1345 bp, Bovine  19866880800542
  misc_feature (1)..(1): n is a, c, g, or t
ncgacttgatggacatgagtttgagtgaactccgagtatggtgatgggcagggaggcctggcatgctgcaattcatggggtcacaaagagtgggacatgactgagcaactgaatggaactgaatgttctaatatggttttatttctcattgtattcctgttctttgctcaatttccttatcgtttttcatgtctcagttgttttgcagaagttcctcctaaattcttgatgctaatcccttgtcagttgtagatgttgtaaatatcaaagtacagactgtcaccccatctgttaactttgtttatgtggttcattgactaaaaacatgaatcttaagatttatactttgtacacctttgatttaaaaaacttagaatactttctctactccaaattcccaaagaggaatttttaaaataacagtgaagagaaagaacaaatttcccttcatttcttcccttggtcagcattcatagtttataaaggcagcattttcacatctttgattattccaagtattcttttcacacaaactactacctaaatgtgataatcagttgtcaacccactttcaaaaggccttgccatatggtatgattttattggtcaattccagagtatatattaacttggaaaaaatgggctgctgctaatgggatatggaatggaaatgctgtcttttgtcactaaggggactttatgtgtgaagttaatgtacacataaatcaacgctgtaaacaaaaacaagagaatatcaaaaatttgttgctatcagttgtcacctatatacagatgacattgaagtttattatattttgagaatttgtttccatattcacctttatatcatcaacaaatatttccatttaggcttaaagaacaaactgtttaataaatcaaaatgaatttgatagatttgtacctgaatactgactctgaaattaaaggacgcttacttggaaggaaagttatgaccaacctagatagcatattcaaaagcagagacattactttgctaacaaaggtctgtctagtcaaggctatggtttttcctgtggtcatgtatggatgtgagagttggactgtgaagaaggctgagtgccaaagaattgatgcttttgaactgtggtgttggagaagactcttgagagtcccttagactgcaaggagatccaaccagtccattctgaaggagatcagccctgggatttctttggagggaatgatgctgaagctgaaactccagtactttggccacctcatgtgaagagttgactcattggaaaagactctgatgctgggagggattgggggcaggaagagaaggggacgacagaggatgaga

SEQ ID NO: 32461 - DNA, 1112 bp, Bovine  19866880902600
  misc_feature (1)..(1): n is a, c, g, or t
ngaacagtctattcagcctcaatgatctgtgaaaaggacatgtaaagcacggggaaaggacttgaaccagatggcctggttaacaatagaacattttacaaattgtcaaaaaaataaaaacaagaggtaggaaaccacagccttcacaagaacatttcccctgacctgatggaagcagagataactactgtgctgcatttctaacaaacataataattgtgttcaccataagaaccaattgttactagccatgtggaaccaaaattaatttctaaattatgaaccgacagattgcaataagcttccctatcatttagcagtagaaagacctagttaattgagtttattgttataatgtttagggaaagtgtttaaggaatataattttttcattttataatggaatggcaggtttcagtgatcatggtttttcaggagtacaataaaaagttggatgataatgtcagcatcagggtggcaaaagacaattttcattttttttaatcctctcaacaacaaaagttcagtatccttcaatgaacaaaagtgcctgtgaggaaaccatatgatcagttccatatactgaggatctaggagtcttttcttcccacgatttaagtaataggtagacagatctgggtactggctgtagaaattgtagttgtctctgaaacagttatgggggcttttcgattataaaccaggagtcattggaaaacaccgtcttagataattacccatggctgagggagcctttgaggatgtccaagattctaaaaggcgtcagcagcttggccaaaataaaatctgagtttatatgtattggggtgggtaaaagaaaaaaagctgtattttacccatattatcccttgcagagggcagcattgcttagggccatgagagatccttctctgtaatttctctaaaagagaaaaggaagagcatgtgagtgaacacccagcttctctaattgtgtaagatactgccaaaggggctcatttctctcttgattcatcaagaatgttaaataatgagctttatgagtggagattaggaaaggaagaggctggaagagcagcagataatactcagagagggtattaaacatactg

SEQ ID NO: 32462 - DNA, 4355 bp, Bovine  19866880967960
  misc_feature (1)..(1): n is a, c, g, or t
ngatgtcctttgcatataagttaaataaacagggtgacaatatacagccttgacgtactccttatataaatcaaaaataaaatgggtttgctatggccccatatgttatgaactatgtgaaaaatgaattgataaataacttttgttatttaacaatttattttatttatgtatttactagtcagattgtatcacatcatacctgcctttgggatgccaattcatcatttaactaagaaataaatattttaactgaagctaagcaaatgtgaaaataccaatatatgtatgtttaaaggacagtatgtatttggaaactgtgaacctctacggacataacatactcttttactcaaaatcattcagcaatcttaataggatgcccatatcatttagccaggtatggaagccacagaggtagaataacattacttgaactttaatttttttaaaaattattagtaaatgcagatgtacctacagttcttagattttgctattttacagattattttcttttgaatgaagcttccttcatggctcagatggtaaagaattagcctgcaatgcgggagacccaggttcaatccctgggttgggaagatcccctggagaagggaaggtctacccaccccagtagtctggcctggaaaattctatggacaaaggagcctggcgggctacagtttagggagtcacaaagagttggacacagctgagtgattgacactttcacttttcttttgaatagcaatagtcaggttattaaaaggaaagcaagttggactaagtcggactaagtaaacaagatttcaagatcaggttttgcaaggtcactgctattataaaaagtaaagtcatctttgattaacttatttttaactggctttgcagttgtagactgctttattgtaaccaaagataaatattgcagaaatgattctccctaaagctagtaagatattacatattctctaagctaggaattttaaatgaatttttgctagacacatgtgtggaatgcaaggcttaaagaaactatttggtatctcaaggaagtttttctggtctagtgagtcattcagagattgattgtttactgctgcctgctagtatatagagtttatggactgtttacttatttcaagatggtataaactttgccagcaagaaagtttcctgaagaatgtctcctcaaggaaagatgcatcagcatcttaactatgaagtctgaacaagattcagttgtttatataaactagattttgagactattgcagaagctatctaatttaatttttatttcaaaaaagtaaatagttggtacatattacatgcctactcagaaataaggggatagtagatttctctgatcgtatccatatatacacatgcactccagttttaatgttaatttttattacttaaaattaaaatattctacctatatcctaaaggcttccttggtggctcagactgtaaagaatctacctgcaaggcaggagatccaggttcccaactctgggttgggaaaatcttctggagaaggaaagggtaacccactccagtattcttgcctgaagaattccatggacagatgagcttagtaggccaccatccatggggttgcaaagagttggacaggactaagagattaacactttcactcatagttcctaaaggttgattggaataaatttttccaattatattttccacaattaaatataatttttcatgcaaatagttattgtgtgcttatcattgttatggatactggaaatatacacataggaagacacaggcataaatcttaaaccctagaggaatgtcttgttaagaggtaaaaaatgaatatgtaaagtttaaaaataaaatgaaatttaaaaaaaagcatgtaaaaattttacaagtttccaattattttatatttgccacaaatatccccaactagatttcaatttcctatgtgtctccccacccctaattctcaacttccaccattccctggctcatgtgtgtgtgtgtaaaagtcactcagtcgtgtctcttgtgatcccatggattatagcctgccaggctccactgtccattagattctccaggcaagaatactggtgtgggtagcagttctcttctccaggggatcttcccaaacccgggaatgaacccaggtctcccgctttgcaggcagattatttacagcagagccaccagggaagcccttcctgtctcatagggctcttaaaaacctgtttgcatattaaaaccttgtcctttagtaaacaaattgacaatctgtgtttaatccaaaatatctcaaactcacatggctagacattccctttttatcaaggaactaatgttatgagatataattgggaatgtattagtctcacttttgcatacaagaaaattgataaaatagtgagaagattcattaaccctcacaaggttttcttaattcattctctctttaatctaatcctaaatacatttagttactggagattgaaattttcaattactgtctatgggaaatttatgtgaatttcagtgcatctaaatataattgaagaatctttctctaaagtttaaaaatgaaaataatttatatattaattttacattttaatatacagcattaacactgacatgatacatactcaacatatttaattttccatgtccgtaagagtcatttctgtattcctacaagaaagatcagccatatatagttatcaaataagtgttggtatcataaaatgtaaagaaataaaataccaattaagttttcatcatattctaagtaacaagaaagaagagaagtcttccacatgaggtataccaagtagaaggatactcagatgtaaagctatgaaattcatttatttcaactcaatcaagtgtctttctaacataaaacattactgctagtcattttgtacattttcaactggtatgtaaagctttgaaatttcaagtattttagaaagttagagattttacatgcattttaaagtatctgctgtctttgatacctgaaaataaattgttacaaaagttgtcaagatctatgtttcttatcactaagcaaaatcataaatacctttcagtcagtcatcatgcagtcttattatcttggtactaatcaatatgcatgcattcacaggccatgaatttacatttttttttgtagaaacataactacagtgattgtcaggaggagctacattacttgactattagcaaagagttatattacttgactactctgttctagcaatcattgttcacatctaatgaatttacttatgtaagaccatattacattattgtcatttgaatgtatgtcaatattttctactctgattaaaaccagtaaagattaagaatcctttgtttgactcaaatgaacacatcatgcccagtggatcacttattgctactattttaaatagagaatttacttgaaaaatacctagaattctaaaaattgtttccactatggggtgtataggccacaaagttcttcagatattcattgagttatgagaaataatgtaggatgagctggtcatatcatgagaagtgcttttaaggtgtacttagaaactctttttcaaatataaaataatcttgtgataaaatgaacaagctaagaaatatttagtaaataatatgagataacatgaactccctgttaaagcttgggacagtagagtcagaatgcttctaaagagaagagaaaacactttccccctatacctgtattttaaatttaaattttttctatatgaaacacaataatacttctagccaaacttaggccctccactgttctggttttgagagaactaaagaggaagaaagtatagatgtacatttatatgcagttcagttcagtacagttgctcaggcgagtccaaagctttgcgaccccatggaatgcagcatgacaggcttccctgtccttcaacatctcctggggtttactcaaactcatgtccatcgaggcagtgatgacaccaaaccatctcatcctctgtcatccccttttcctcctgcctttaatttttcctagaatagggatcttttcctgtgagtcagtacttggcatcatgtggccaaagtattggagcttcagcttcagcatcagtccttccaatgaataatcagtactgacttcttttagaattgaatggttggatctccttgcagtccaaggggctctcaagggttttctccaaaaccacagctcaaaagaatgaattcttcagcactcagctttctttatagtccaaatgtcacatccgtacagactacaggaaaaatcatagcttgacaagatagac

SEQ ID NO: 32463 - DNA, 2684 bp, Bovine  19866881031622
  misc_feature (1)..(1): n is a, c, g, or t
ntcattaaatattcaaagcaatgcttttaaagttatagactaaaataggcataaccacttaatgtcttttttgctcatttgtcaatatcatatggagagttttaaacaaggcaattaggctatcaaataattcagaaatataaaattggtaaagaccaggaagtactatttgactacataattaaaacaaaaactattaaaactaatgaaaaaaagttagtcagtatggatgtactataaataattgttactttacattaatatacaattattaaaataatgaaatagaaaaattcaatttatagtagccatgacaactataagcaactaaaattcatattaaataacaaaagaacaaaaatatgaaagcattttggaaaaagaattaaaattttattctacaaggagccataattaagtcactgatgaaaagatgtttgtgatgcaaaatctttaaaaaaatgcatatgttttaaaaaaaactaaaattttaaagaaaaaggcaatagaaaatgagtttaaaatatttacagaaaatagaacaaaaaagaaagctgattaataaagtaataaaaaatgctcacactcacatgtatataggaaaatacaaattaaaagcacaatggacaatagcatgccatgctcatcaattaaggaagaataaaacataaaggctgacattaccatgtatttcaaaagatagatatcaatgagttgtcatatactgccagtgggagatgggtacaaattgtcacaagcactttgaagaaaaatttgggaatatgtaatatagtaaaaaaaatccacttcttctgtgtatatgacctagaagtagaggtcgttccagagtgcctgataaaaagtggatttatttgacatttcagaaaaatttctcacaggcattcatagtctcagaatatcctctatttcaactgatacatagcaagtccagttgaaattttgaggtattttgcctgtgtgcctgcattctaagttgcttcagtcctgtctgactctttgagatcctgtggactgcagcctccaggctcctctgtccatgggattctccaggcaagaatactggagtaggttgccgtgccctcctccaggggatcttcctgacccaggaatcaaacctgtgtctcctgcggctcctgcactgcaggctgattttttaccactgagtgaccgatgaaaccaatgtatttcgagagaagcaaaattatgcatcatagtcacaagcacttgctttctgatagaggccattgagtggtacaggtattttggattatgtaccttgatcaaagaaaggaacagtatagtttttaagaaaacaaaacagtaaaatgcaaagagaactttttttatgaaaaagagattactgttagtggattgagtgcaaatgggatggcaccatgcagacagtataaattcaatgagcaccattttaaagatattaaatgcatactgtcttatatttatatagcacacattgcatactaaatcagttattaaataaatagtacctcatgccttgaaaaattcctaaaacatgaaatttataataagcatgtgtttggtcaccaaaatatctcaatgcctactctttaattccatgtcagtatctccatttgttatttttgctttgtgactcctctggtataaatctgctcatttttagttatataatatacacggttatcactatttagtcaaattatctgtgtactcttcagaaatatttcaggtagccttcctgaaacttttcatgttgctttttgtcaaccccccagggagagactgcataaacaaggcaacaaagcttatggcttacagaagttttccaattacagacaaacagttccatcaactcaatttccttgcagaaagagaagatgttgattcataaaagttttagtgcctcacattggtatgatttccagatgttttaattacatatcgctctgcatctcttgacaatgaatgcattgcactgaactgaaaagttacagccagctggttttctgtcagtttgaataagttatgatccttgtatttccagctattcacttttatagctgtcaggcctcaatacctccaagattaggaaggacagtcaaagcatagggctcagtaaaccccaggtattgatgcaaattacatcattctattcatttattttttgatggctaataaattaattttaaaagaaaaagcttcctaatatgctggttgtttggcaatatttggtataacataatggtaaaagacttgtttaacttcaaaaccacgtttgaatgcttttgtttttcttcgttatttttgctttccactttatattttacttcctttccattgtttttatttatcattgagacataaaaatttcctatttcacttaaatttttactgtttttgcattatctattaattaccttttccaatcattttccttttttatgtgattacaaactttgataaaatgcagtatttatgggggatgacagaggatgacatggctggatggcatcactgactcgatggatgtgagtctcagtgaactctgggatttggtgatggacagggaggcctggcgtgctgcaattcatggggtcgcaaagagtcagacacgactgagcgactgatctgatctgatatcacttcaagaatgataaatagtcctg

SEQ ID NO: 32464 - DNA, 1472 bp, Bovine  19866881210684
  misc_feature (1)..(1): n is a, c, g, or t
ntcagagttgaaaggaagaaaaggggagtctaaagatcacaaatgcagacatgatctaaatccttgtccttctggacccatgcttccttcagggtcttcatcattataaatgttctctgccatttgccacacttgcatgatattgtcttctgatatagaacaaatcacccgaggttcattgggagtctagaagaaatcagacatcttggcagtgtgaccaccatgaataaacaacaactctggtggcccatcttctggggattgttcctctccaattttacttacatcccagacattcagtctttgatcaataccattggaagccaaaatagtctcattgtgaggcgaccactgaacctggactatttcatccttatgtgattcaaaggaatccaacttaagtttcagatttctcagatcccacagggcaacagttttgtcagctgatctgtggcaagaatgagctcactataaggactgaaagaaaggcagttcacttcagcaatgtgagcatcaactgagtggcttggtttggaagtactgtttgaaggagtatcccagatcatgagtttctgatcatcagcaactgacccaaagagggactcatggagcagatgccaggagataacctctactactgctgtgtgctctgtaaagatggtcttcacatccacactttcccttcctttggaacagcacttatgtcccacaggcagatggtgtggtcatctgaagcactcagtaagtgcccactgagatttgggttccaagaaagcccgtagccttccttctgatgtccacggaggcacaagtctgggttgcactctccagaagggtctggtttagcaggatattttgaatagtcaaaagcaagaacatcactggatggattctttgttgcaatgatgcaagggttctggggcatatagcatgcactgtttacctctccttcatggctgatccttgatttctatttcaattttttccactaactgagccaaaacctccaaattctcctttttcactgttgtagtgtgaagcatcaaactgagcatcatcattagggagctgcacgctgactgtcacaaggtgggttttgttcatctgacaagtgtgtccccaggacgagtcggtgaatactgaattctttcccttctggtctggttacatttggaagccactgtgcagttaggctaggccactccagagcatggatcatcaccaagttgtaaagaaaaggggtgttctttttccatattttatattcttcgttgatcacacattcttctactgcatcatcaaaggtgcttccttgttggccatgccgagtaggcaagccagcggggatcccagggttgagcactgcaggagcctgcgggcacttgctctgcacatgtagcctctctttgtccccagtgagctgattttttatgtcatataattacttgcagatggaatttaaaaacaccaag

SEQ ID NO: 32465 - DNA, 1014 bp, Bovine  19866881222591
  misc_feature (1)..(1): n is a, c, g, or t
ngttatctttgtactaaaagttccaagatgtcaaattactcccccaaatttcagattaccaaagcaatagcatttattttaaaattcatactttcaaacataccctccaactctggggtctcaaaatactattccctagaaagaaattaccactcacaccttttacaaagggttgtatcaaagtttgctatattgcattttccttagacttcatgagaaatagttttaatcaaatagtaagcttaaaattatttcatagtttttcaaagaatcttgacatttcaagtttttgagactcctgctttttttcaaatctgaccttttctacctaaatatcatatttttgcattgcattttgataactcaatatgtttttaaatgaacgttgtgtgctttccacttgaaagtatacagaacaacatggcaagagcaagttccatttttaatttaaattattttcatggcattgagcagattttaacctttaaaacagcctggatgcaattctgattaatgcctcactctttagtctggtgattcagtggagatgaactccatcccctacagcagtggtgaacttcccttatctgatacagttgagaaaaatataataatagtatttccaggccatatttcctttcatttaacatgaaacattattactgatatccatggttcagggatacagtaactgtctaatggaattcatagaacatcaagaagaaaatcgatcttctattagacagtaagatattaatatataggaatatctgtgattttcagcatgaatccttaccccttacatttgtatagtattttagagttccccgagaacattcatataccttaaattacaaaaagaatcatgaattacatattatcatattgttttatacatatatatattatacatatacaagtatgtgtgtgatgagtcacttcagtcatgtccaactatttgtgaccccatggactgcagactgcaaggctcctttgcccatgggattctccagg

SEQ ID NO: 32466 - DNA, 1788 bp, Bovine  19866881256518
  misc_feature (1)..(1): n is a, c, g, or t
nacatagtcacatgagctttttcaaccctcaacccttgtttcctatatattttcttaaaatttgtaataatatttaacagaaaacaactcagcacttattaattaccaggcacacatataaggagtttacatgtattcagttcagttcagttcagttgctcagtcgtgtccaactctttgcaatcccatgaactgcaacaacaccaggcctccctgtccatcaccaactcccagagtttacccaaactcatgtccattgagtcggggatgccatccaaccatctcatcctctgtcatccccttctcctgccctcaatctttcccagcatcagggtcttttcaaatgagtcagctagctgcatcaggtggccaaagtattggagtttcagcttcaacatcagtctttctgatgaacacgtcttacatcatttaaaccttcaataacttatgtaaaaacactctattctaggactttatttcaccaggctctgtttcttaaacttgtttatagatccaggttaatttatataagaagtgaagtgaagtcattcagtcgtgtaatttatgtatgtataaatataaatatatatatatatatgtgtgtgtgtgtgtgtatatgtgtgtatatatatatatgtatatgtatatgacaaaagccagtgtcaaatttcagatttttggtggggttagacaatgtcataataccataaaaaacttttcaatatatggcttgtagaagggtagaaagattacatttaccattgttaaagtgctcctgtttctgcctaatacattctgtggggctgccctcccttggaggatcccatggccaaagaagggatattcaggcacatcgcagctttattattaaacaagtgaggctcgtgttgttactgcagtaccttggatattctaaggcacatctatggatacatgctatcaatgaattgcccttcattataagatagttttatgtcctaaacagaaagtgaataaattcagtattgctgaggtgagtagagcacaggcaagtatgaagatatagagatttaagggcctgaaaaatgcccaagaatgcaactgcaagtaaattaatttatacatttgtcaagataagagtgaaaggtcagcatacaattccaatttttatgtaaaacaaaaagtaaggtgaatcctaacaaagcattctcacttaaggcaattttctctcagagttgtttttagtcctgccacctattaagcagagatttacaggtgatctgtgaaggggagtttgtactgccacacattaacagaaggtggagagtaaaacataatcgaagtcttaacttctcaactttatggtattgaaactcttttaatgccattttaaatttgcttaatttaaccccctgttaatttaaaagaacataaagcccaatagttttattgtcatactttattttgccctctgtgcacctctgatttaattcaggcaggttttaggcaggcaaaactaggctcatcataccacacctcgatgatcttaccgatcgctaaagtaaggatgctttatcttcctttattttacttgtgctctctcttctttaaatgcatgatgaatacaaaataaaggtcttttcaagttcattgatgctcttccactttcagtcatattgtgaatgatctgtgcctgcctggtggtaaggattggatctgtaaaggggcgagttgtctggtccttaattgcttctccctgttccaagtgataaggtagctctgtggatttacaattcatctctaaggaga

SEQ ID NO: 32467 - DNA, 856 bp, Bovine  19866881804551
  misc_feature (1)..(1): n is a, c, g, or t
ntaactataaatgttggttaaaaacacaatttaaatatcaaggtagagtttaacggtgatattaatgatttttttcacaactatcctattcttagtgaagatcagctgatacttttatgatttcatacacatacatggtaatttaatatttcttctggagaattccatggacattggagcctgacaggctgtagcctgtggagtcacagtccatggaatcacaaacagtaggacacggctgagtgactaacactttcactttcttacaatttaaattcaaatctatttgtctgcttctatatttgagttcatgtaatatagtcagtccaattacatagcttcataagtggatatttaaaaaatttaatattaacaccaaggctttatgtttaattttctgtttgatatgtactgataatatttactctgctgtttccattcatatcagagatgaagaaaattttctttagattatttctaaggttattagatagatacttctttgaataattttaagaactgagtattaaaatggctttattttttaaagatatcaaccatcctacaatattaaaatatcctataaaatgaatagttttgcctatgtacagaattacctagaagtagataacatgatgcacatttagtgttaaaaggaagttgttgacatttgtagcagaaaatatcaaattaagtaactctatcttgaattattctgaattaccaatcatctgtgccagttaggtaatgacttcctattacagttaatggaaattgaatgtaaatctccacgaacaaaattaaggttatcctgatatcgcaattacccagggtataagggtctgtgatagtctcc

SEQ ID NO: 32468 - DNA, 916 bp, Bovine  19866880361736
  misc_feature (1)..(1): n is a, c, g, or t
ncacagaagctttagtcagatttaggtgaaaagctacagtggatcccatgcaactgcctgcatttccccgtaccagattattactatactgaaaactctgaaatacctaaaaaacatctagagcttagagatcttatttcctagagaaaagttttgtttgccatagactacgacacccttgtgagggaaacaaaaagaactagcattgaatgaatgaatacctggtctgggtccagcacttagccaggtgctgggactacaagagatgagggaaaacaaaacaaaacaaaaccttgttttcttagccagtccaggagctccatggactacagctcagagaaatgaagtaacttgttcaaggccatgaagctggttcaggttagagccagaatttgaacacacatcatctccatccaaagcacacatatccttttttaccactagtatgctctaaaaagatttcttaaaaagctggagtgtgctgtcatgcttctgtggtatggtgctagattaactagcacactttgcttgcgctttgtacacccatcccttttcacttctccatttcgagaatttgtcattgaaaaggcaagttggaatacagtgagggctgttcccccaccccacccgccatagtgcaaaagaggtctttctagggcacttgggagttcagggttagcccagtacagtaataaccatgaagtgcacaaggggaatgcagctgatttttccttgccaaaatgttcttctctttggttcatttcatggaggcctttgatacccttgtgagaaattctgttatttccataaaagtcctgaaggtagtaaactgggagttgttttaaagtatctaccccttttccaacttctgaaccaaattatttgcataaagtctggagaaaagcttttagttttg

SEQ ID NO: 32469 - DNA, 2022 bp, Bovine  19866880392459
  misc_feature (1)..(1): n is a, c, g, or t
nagataagccctagcaattttatttttattttggagaaggaaatgacgacccaatccagtttcttgcctggaaaatcccatggacggaggagcctggcaggctacagtccatggggtcgcaaggagtcagacacgagtgaagtgacttcactttcacttcaattttatttttaggaaattattctacagataaactcacacctgtatgcataggaatacataggaagttttccactgccttattttctgtaagaggaaaggacaatgaacaacctaaatacctctccaaaggaaaataagttaataagttatgacacatccacaaaatggaataccatgcagctttaaaaataaataaaataggtctctttgggctaaaatgaaaaaaattgctgagatatattgttacatgtaaaaatcaaggagccatacaaaatacatgaaatgcaatcgtttgtttttatctaaaggacatgcccatatatagtggttcatgaattttaaacattctgaaatgacacccaagaaacaatatgtgcttcttaaggagggaaactagagcctggagtgggaggggggcttatatattacttcatatcacactattaacattttaattttacattcatgatttttaataagtgatcatgtaaagtgcttagaattctgtgccagtgagtattaaatattgtttgctgttgatgatgttattgtaatggatgcatacttatttcttttggctaacacagcatttgaggggctcctgcctctggctcccgggaaaggtctggctcctacctccttgccttcctcccttttctccaagaaggatgagaaacaggaaactatggagactaaatgcctattttcagtcttctctggaaggaacaattccacctggacatgtgtgcatgccaacacatcccagctgcctctcagctaagatatgaggttcagctagaggtgctgagaatgtggcaagattactccagcagatggaatcctgctgctgccccccaggagatggttcccgaagaaatgcttgtccttgaaccgtagccatgactccagagtttgcagtcgaaggtgattatcattgatgctgctctacgttctgccgcctgggactggcagaagtggggaaactggctgagaacatctcctccccagtgtggccaccctgccaacctggcaggacccagaggggaggctgtcagtatggtaggctgaataatgtttccccaaatatatccatatcctaatctctggaacctatgcatgtttacttatagggcaaatgggacttttcatgtttaactaaaggaagactcgagatggggagattatgctgggttatctgagtgggtatgatgtaatcacaagagtccttataagagggacataggaggctcagagtcagaggagaaagctacgtgagaatggaagcagagatttaaatgctatgccacctgctttaacaatgaaggagccctgagccaaggaatggaactctagaagctgaaaaaagtaaagaaatgcattctccccagagcctcctaataaaatataatcctggtagcaccttggtttcagcccagtgaaattccgttcagacttctgacctccacaactatcaggtaataaatacgtgtggtttcaagtcctgaaattttggaaattggttacagcagccataggaaaccagtacagtcattatcaactcttctcattatctctctgctcagctctcttcactgtcccctttcaactgccttcccaggcaaacctaccccacatcactccaagatggctactgcagctccagacctcacagcctctcagcttcaatcccacggaaaattgactaattgacaccacctaccactctctggctctactgagatgtgagaggaaggatttctctcaaactgtagggacccttgactttgtggtggggagaacagcacatgtctatgtaccgtggcagtaaagtaatggtaaggagcatggattcagaagtca

SEQ ID NO: 32470 - DNA, 1533 bp, Bovine  19866880404318
  misc_feature (1)..(1): n is a, c, g, or t
ntgttcccactaacatgcacctttgcaatcaattttccttgtgctgacaggtgggacctgccttagatcctcagcagttgagaaagataaagattgggaagtgaagccagagctgaaacataccacatctacttcctggcttgctggaaaagccccagttacaaatatcaaaaagggcacaaataccctctttgccaaatgaaaatctgaaattctccaggccagaattctggagtgggtagcgattccattctccaggggatcttctcaacccagggattgaactcaggtttcccgcattgcaggaggattcttcaccagttgagccacaagggaagcccaacatctgtattactaggtcacaaaatatatgccccttgcttcatggaaaaggcaaaacttggagcctcgaattgtacatacccactctggttgccagccaagcagctttggtcagggtatgtaatgtctccagacctcagtgtcttcatcagtagaatgggcacagcaacctctaccacacagaaagatcatgaagattaatagagatcattgtaaattacaggcccagtgcaaacacacagtgatagctctaagaatgcttgtctccttcctggctgatggcaaagacacagatagaggtaaaaaaggaaaattcattctgatattttctggatgatacaagaaggaaggagctatgcgtctttcacgttctttaagttcatctaaggaaagaacagggccatgtgcaaactcactggctaaaattaagtcttctccatagctcttcataatttctttgtgagtcagtgtttgagacatgatgttgacaaggggagagggtgggagactgattccattatgctgtaaacctatctcctcaaataaggacaaaatgatagctttgtccacctatcctaacgacaatttacaattatgactcaatttgtcacagaagagaaacatgctatttatttgttatttttatttttttaagggaagcgtgggagacatttacatggctaatgagaaccaaaggtgaaatagcttttatgataacagagatagcaccagacttcatttttggtaatttccttccaattgagatgttgctgataatgctggacagtgtccagctttgaaatggccctaatcagagtccaaatgctatggcaacaatctcttgagaaatatcatacccactcaggtgatcttatgcctgagtgaagaatataattgttactgtaaaaaatatttggtgtgttacaattatatggtatgtcaaaatacagcattctctcaatgatagttaaattttcatggatttttttttaccctctttcacagtatttaaataatttgactgtgagactaaaccatttaaaaaggtaagtttacccacatcacttaatagcccttcatacaaaacccacatccaaaggtctgaattcttttttagaaactcatcatttatgttagaaaaaaagaagagagagaaacatgcatcaacaatgtagataattttaattcaaa

SEQ ID NO: 32471 - DNA, 1330 bp, Bovine  19866880444228
  misc_feature (1)..(1): n is a, c, g, or t
ntgaaaagctgtttatagttcatgtaagagaaggactgagaattacccattggattcagtcatgtagagatcactggcgacttaacaggagcagtttctatagaagggagggtaatgaaaccttattgcaaagggtttttggctgaacaggagaggaatgggatgaaatgagtaaagagggggaccagagacttgagccagtagccagaggcaaccttcaaaaggggagagtcctgtatatttttaaaaacaagagcaatactagagctgatgaaaatgatccagtgaaaatggaaaagtcaatccttagagtgaacttgactgttgaaatatcttctggcaagtgagaggagtctcacgcacctgtggtgctggccttagataggggcgaggccattcttccaaatgggaggggaggcagagtatgggctggtaagttgacctatgccatggttagagcggtggcacttccattttctcagtgaagtagggagcaggattattagctaagagggaggagagagcagaggtgttggaggtttgatgagactctgtaaagcaaaaaatggtttgagaatctaggaaagtgactggaataggaaatatcaaaggatctccaggaaataccaagggatcacttgaagttagtggacaggggttataataagactagttagcacaattcagtgtttttctcatttctgttcagcagactcagagtagatgagtaaaatggaggaagaaaggacaagaacgtttttaacatttctgctgtcactatttatatcatcctatcatcctaactaatgattttagaggattttgtaaaatgaactcaacctaatttagccaatctctgcaacttgggacattggagtttctctgttgctcattaccacaagtaatgggttcagtgaattcccttttatatcaacttttgcttgtattttccattctttctctggaaaatggtgttgctaaacaaacaggataataagcaggatactgtcagtggcaagtaacagaaatggaaacagtttctgttaagtcacttaaacagtatgcaaatgtgtcacatcctatacaaggcatcctgtgataacttaagcttcggacttgccttattcatcattttaaagccatcaccacagactcagagttttctgctctgtcaactccagtgtgccagctttgtccccaaggtagaccatcctcacggtcagaaaatagccaccatgatctcacacatcacatgtggatatgacaatatctgtgagcaaatgttcccagaggctcacaggaaacctctcctcacatctcattggacaga

SEQ ID NO: 32472 - DNA, 1455 bp, Bovine  19866880454059
  misc_feature (1)..(1): n is a, c, g, or t
ncgactttgactaagcatctactatatgccggacttggcatgttccacccccaccctaccctgagagctgttcacctgtgatcaccctgattttacaactgaagacactgaggcatcttcctcaggtttccaaaaggcagattatagtggtgagacttgtactgtcatcctttcatagccaagcaattattttatggagggaaaatgaggccagaaacttctgagcagcaaactccacaaacggcaatgtagtttttctgacgcccgtgtttctgggaagctcagcgtttcagatgtgttttagtaactcattcccggctccccaggagagctagtcccatctcataccttggccagtgaaaaccgctccctgggccctcagaccctgaggtctgcgagccagggacacagtctcgtctacctgggtctctagctggtgctctggtacagtacctggcagcccggggtggcctgggatccaggacgtgccatcctggaagctggtctggccctagacagggcgtgagcagcacaggtttccctcagagctcactgtatcctggggaaacagaacctcaatgcagcatcaagtgttattcgagcctcacggccaggctttctagaggaggtgacattccttccaccgggtagaacaacaaagagaaggaaattcaggccaagagaacacgtgcaaagacacagaggtgtgcagaatccttgggggtgggcgagagggcgggaggtgagcccagtcggagcagagcctggtggcgctggggccagggtggagggagcggcgagccccaccagcagggcggacttggcacctgtgggcagcacggggcccggggagctctgagtgatgcgctcagctcggtgttgaggaggccccctctggggccagtggggctgcctctcttcctttcatcagacactgtgaacacattcccttaagcgtatcctttttaatatcacatctatttgtctgtctgctcattgtttgttgctggaacaaaatacgcagtactttaagaggcccagcttctgtgaagaaatcaggatctctgctatgtcacagagcagggggaaccaagccagaccccagggcccctgaggatggaacacagcaggagctgctcctgtcggcacaggttccggggctgtctcgaagcccagggaccccagactcgatcaggaaagaagccccgccacaaagcctgctcttccctttcatggctcgtgccatggtcccaggcccccaccccactgggcctgccggcctccccggctccagcgtgctgctccagccagcactccccagccttccccagccttccagaagcctgtagcacaggaagtcagcctgctctatacttctccctcagatccggggctcatctgtgcaaaacaggagccagggagaggggtggtctccaatacaaataaaccccagga

SEQ ID NO: 32473 - DNA, 1010 bp, Bovine  19866880459667
  misc_feature (1)..(1): n is a, c, g, or t
nccccactgtctctattactaaattctaaacagaagcatttggaagaaaggacttatttagccaaggtttctcttgcattgtttcatttgcaggcagcaccctccctctatctcccctcctttcatcttctctgtcctcctggcctgggcctttgtcctccacaccagcctcccagagccctgggttccttgggatgctaatcacacccggtgctcttcttgcgccaagaatatttctatttatcaagccagggcagactttgccttcgggagggacacatacaagggcaggaacactttccaatccttcgggctgcttctctttttcctttctcatttcaattccaggacgcttttcttttttctttctttctcggtcctctttgtgccttgccctgcttttggatgcactggttacttggcactgtctcctctcaggactgagtgcagacccgtccagccacagttttgctgcagaattactgatacttactttacaaaggagattcaactctctttaaacccagcaaacccgtgttcaatccctgggttgggaagatcccctggagaagaaataccactccagtattcttggccgggaaatcccatagacagaggagactggtgagctatagtccatgaggccacagagagtcggacacaactgagcaactaacacacacacggacacacacacacaaatccagcaaagtggtatcactagctgtctaaatttcctctgtctctgtttgggcttcccctaaagtagatgtaagatgagaattccagtgcaagcagtttatgtaggaagagaaggggacaccagggggagtagggggttgggggggtgagacagccaaaagaaggagcccaggaagggtgagtttccaaatctactactactgtgggcagctgcagcccactccccatggaagctctggaaaaaggtgaagaccatacaccccagcagggttggaggtgaggagctgggctatttgtgtccagggaga

SEQ ID NO: 32474 - DNA, 2180 bp, Bovine  19866880560858
  misc_feature (1)..(1): n is a, c, g, or t
nttcaaagagactctctcaaactcacctctgtctttaaagcatctgagactctaagaatgcatcgaggatcttatacgtgcaacgtgctctctatctcccagagaaataaaaactcatgtttgacctcatccaatagcagctggcttgtcactgagacataacgcatagcctggcttcacagatgatgatgactctgggggctcctgacccccagcattagcatggaccttccttctcccttgcctctccaaccagaaaatcagtagttggatgagaatcttaattcttctgtcattctgctgggagcctaaggaaaggaatgatcctatagaacagacatgtcaagaaagaacagatcctgggacttccctgatggtccagtggctaagactctgtgctcccacacagagtcttgctgggggcccaggttcgattcctggtcaaggaacttgatcccacaatctgtactaaaatatccttctaagactggatagtagtcggagtgttagtcactcaatcatgtctgaactctgtgtgaccccattgactgtagcctgccaggctcctctgtccatgggattctccaggcaagaatattggagtggggtgccattcccttctccaggggatctttccaaccccagggattgaacccagtcttctgcattgctggcagattctttactctgagctacagggcagcgagctaaataaataaatattcagaagaaaagaaagaacaggtcctaccaataagatgtcctgatcaaaggatggaaccatgtgacatacagagatattttggggccagaatggctaaaagaaggctgattagtagcagagtggaaatcaatggctggaaataaggacacagtctttatttttttactttgtgcatttctgtttatggtactccttagagtagaagctggaatttgtctttggggcattctgtccctttgttctggggggaacaagtttcatgagctggttttgtcccagggatggcagcaagtccctagtcctcattactgggcttgtcttgaactctgagtaaccaaacccagagcttcaggctgaggagttaaatagtttgttgaagaatataaatataactctttaaactgggggcagggcaggttgcagcacatgtcattataatgtagataaagtgttttgtttgctttggcagattggggagtgggaagggtggagaccaagattggaatcctggcattgaaactgagatgggcagcaggcatggggacacagtggctaatgtgtgaaggtgggaggaccccctatttagaagaaccagccctgcaccccagggacagtgagagctgatactcacccaccttccctttcctctctgcaactccctggctggttctcaagccctgtgaatgcctgataaacccaagatgtcggcgtaatgaatttgggggatcaggaaggaacctggatcctggctttcatgagcaatgcgtgcaatacaagataactgtgccttgaccagaggcgccaggaggatatcctgctgagaggtgacaagcaccaacaatccagcagggaaggttttataggtcatggagtaggaaggagacttccctgagggctgtcacaccatcggaggctctaccctttgatgcagagggacactgttccttgaccaaagacaaaaagggaatggatgaacgtggaaggaatgaagcactgctttcctgcatctgtctttgtaggctcagctgtgtccttgcggctcccccgtaatcctgatgatgtgaccaatcacaacagagaagctatctctgaggagcatcatacaccaagggacagctgccccgcaagacactgaccatcctgcggctgctctccacgcaggcagcacacacccttcggacaccaacacgatgagccacaactggccccaaatttcaggacctcaacagttgtaccagaaggtccctgctcggaagtggtcagcagagaaaggacttggccatatggtggtgctggggccgcttggggttggcagaatctgcagggcagcaacccacactcacctcctcttgatggtgagcatcacgcccaggaggatgatggtgaacatgaggaggccagcgatcacgccagccatcttcacggtgttgtccacctgcttctccggctccacagt

SEQ ID NO: 32475 - DNA, 1311 bp, Bovine  19866880588274
  misc_feature (1)..(1): n is a, c, g, or t
ngccccttctttggcagtgaccgtgtcccctctgtggctccagcctcccataggtccgctggagtccccacttctgttgggtggccctgacctctgggctctgaagagcctttgtctctctagtgtgggctaggtaatggcccctgaggttgctaccttctgggttgcctcaccatcctctctcgatctctgggtacccagttctctggtaaattcactctggtttgaatgtttgaaacagtttcctttttcctggttggatgctgactgatgtggagcccatgctcgtttctagtgattagtccctcctttagtaaacggtgaggggaaaaaataatctgatttaaccatccagtctatatttttttttcctgtatcaacatcacacttgtgtgaaatatctggaatctacatttttccatttaaaaaagtcaacaacagcatttgtttctccccaggcttctcgcacccctcctgtttgctataatttccatccttaaagactgccaaagtagttcatgatcacaattacaaatgttctcaatgccttgggatgcaatttgtaaagtctagaggcttgaagctaatgaagtatccagatgctttcctagcaacttctttcctatcgtggacttcaattccatcttaaaagtagtctaccattctgagaattcacttcccaggaaaagtcagaagggggatgatgcatacctcactctagaagagccagaaacctgcccagcttccccagctttcccctgctgcctcctcttggcaaaaacccccaaaatcagagatacctgccatgcttgaaaccttcgctggcatagaggtagcatctcagagtcagaatttcaaaggtttgctctactgggtgccagatgcatgtaacgccagagaaaagacagaaaaacaaaagaagtcattaaatagatgggcataagtaagatgccagctcagtaagatgtggggataaatgcccttggatagtgaagaggcgactgtgtgtttgaaagactggagcttttaggaattctgtctccgagagccagcttcctttctttgccttcagcaatgatcaccagcatgggttatgcatccactggggtgtgcttggttttatcagttgcaattatatgttctttatctgaaacttctattttttgctccatatctttacaggggaaattctttgaagtaaagctatagaattagggctatagcaagtgagagtacttggagagaaacttattaatcccttgttgccaaattacttattgctgccattaagtgatctggatggaaactggt

SEQ ID NO: 32476 - DNA, 1172 bp, Bovine  19866880609059
  misc_feature (1)..(1): n is a, c, g, or t
naaattttaaatttaattgaatatgtatacaatgttactcttttgttaaaagactatattagaaggagacaaccagaccctcaattttttccaataatgttagtgttgtatatcctggcttgaataaaacacatttcataaaacacctacacagttctgcagtacattatgaatggcctctctggagaaatcttatatgcctttcaactttgacatagtgagacagtaataatagaagtctttggcatatcattttgcagacattgtaagcatttttagctttactgatggaaagccagggctgaccttacctggtactgacctgcagtggtttgggagaggtgaacggggcaggaagggccctccctctttgttccccgcccaggtggggctatggacacaaaagccaaatgggaatgtattagaaattgtgtgagttgagatagaaggtagctgctcttggagaagctcaaaatgagtgtggcttaataaatgagaagctggcttctgtctcaggtaaaagtccaggatggtgcagccactctgcccttcactagtgctcaaggatcgagcgtgcttgatacttgatgctcttccattcctaggccatttcctttctctgtgttgtcagatgtgacccaccatgcccatcagcagtgtatctgctctggaaaggggttgggggtggggggtgtggaaagcagagaccgcctcttccttctacgggcaggaactgggggttgcatgcatccttcagctcacatcctattagccagaacttaaccatcctaaccataggaccacatctagctacaagggaggttaggaaatgtaatgtttattttgattagtaaaatgcccaactgagtccaggctttccattactacagaaaaaggagaaaaatggatattgggggcttaactaacagtttctgataaagggagaccaaagggcttgaaatcatggatattatgaaggaaaatgagttttctccttggagttgtctagttttacctctcaaccatgtaataaggaagcaggcccaactagctccttcctttcttcagaatcctgattgtctcagggtctgatggaaattcagattcagggagaacttaatgaggtgttgagtgcctaatgaagcttcagttattcatgacaatcacatgaa

SEQ ID NO: 32477 - DNA, 756 bp, Bovine  19866880614878
  misc_feature (1)..(1): n is a, c, g, or t
ntcccaaggctgagctcccaggtcagaggcccagaccatgggctgggtcagctgagccagggtctgcctgggctttgctcccttccaggagctgccagcatgggcagtgatgtccacggtttgctgggcatgatagtcctgatgctgccacctgtggggagcttgttccagtcttatgtggactcccttggctgccagagatcaaagatgtttgcccaacatggcttctgctcagttccaatcaatatcctgttctctgatttcagctggtagcctggtggctctgggatcaaacacgaggagaaaccaagctcagaatccagctggtccagggtcattagtattcaccatccagcaaccaaaacagcaaggttggccaggaggtgataataacaagggtcaacatgcacggagtgctcactgtgtgtgtcccactctatttcctaaatcaccacctggcccgtcagctcccagacttcaggaagagtgtgttaatacacgatccccccactagtacctcagccccgccaaatctcaccactgggttacttctctgtctccccctctccttgtctctgtcccacaggggagggatagtctgacagtttcactttttcaaactgctctgaatttcaaagatgccgtcagattcccataacagggccatcatcaattctgacggctctaagctttttcttcctaaactgtcataatgcagcttaataatatgaagcttaaaccctttcagcttttaat

SEQ ID NO: 32478 - DNA, 1799 bp, Bovine  19866880638227
  misc_feature (1)..(1): n is a, c, g, or t
ncattgccttctccaatgcatgaaagtaaaaagtgaaagtgaagtcgctcagtcgtgtccaactcttagcgaccccatggactgcagcctaccaggctcctctgtccatggattttctaggcaagagtactggagtggggtgccattgccttctcctatatatatatatatatacacttttcagattcttttccattataggttattacaatacactgactgtagttccctgtactgcacagcaggcccttgttgtctgctttgtatatagcagtgtgtctgttagttccatactgctaatgtatccctctccccctttcctctttggtttgttttctatgtctgtgagtctctttctgttttgtaaataagttctcttgtgatatgttttagattccacataagtgatattacatgatgtttgtctttctctgacttacttcatttagtataataatctctaggtccatccatgttgttacaaatgacaatattttgttattttttttttttacggctgagtaatattgccacatatatagtgtacatcttttttatccattcgtctgttgatggacatttaaggacctcgatttttaacttgacatatggccaagtgaattaaaaaaaaaaaaattccatatttcccagcctcttctgcagcttggtgtggccatgtgactgagttctggccaatgaaatgtaagcataagtgatgtgtagtgtttccaggaaggctgtttaagggccatgactcagctttaatttcttccaatgtgtctttcctttttccatccaaaaaaaaaaaaatacggactggtgttccagtagctatggaccgtgaagttacctgaggaatgaaagctaaagatggtggagcaaaaatactgaatcctggattgctgacgataccacagagctccaggcctctcttgaaatgggtgcttcctagattttttatgagaaagacaaaaataaacttcaatcttaaaaaaaaaatttatttatttgggtgccctgggtcttagttgcagcattcgaactcttggttgaggcatgtgggatctggttccctgatcagggatcaaacccatgccccctgcattgggagttggagtcttagcccctggactggcaggtaagtgcgctccactggatagttttgcatctggccagcagatgaggataggagaagagtttggaggatcacttaggaagttttagaggatgcttagaaatgagatatacttttattacttctgtcctgattccattagagctcagtcacaaggacctatctgattactaagaaatgtagttttgctttgagcctaggaggaaaatgaactgggctggggaaagcaaccatttcacaaatatataagcaagaacaatagagaagctcaccgtctagaggacttccctgatggtccagtggttaagaatctgcctgccaatgcagaggacatgggttcaatccctggtttgccaagatttcacatgctgcaggcaactaagcccacaggccccaactgctgaggcctaagagctgcaactactgaagctcttgcccctggagcctgtgccccgcaacaagagaagccaacacacctgagaaacccttgtgctgcaactagagagcagtctgcgtgcagcaacgaagacccagcgcagcctaaaataaataaacaaaattttttaaaaagaagctcacagtctaaaaacagacaagtgaacagaggcggaaagacaagagagaatgtggtcaggcaggatgcagctcatgttggtggagctgc

SEQ ID NO: 32479 - DNA, 1285 bp, Bovine  19866880650371
  misc_feature (1)..(1): n is a, c, g, or t
ncaggtccccagccctttttggcacccaggacaggttttatggaagacaatctttccatggatcagggaaggggtagggtttgggaatgattcaagcccatttgcatttattgttcacttttttcccattattattataccagctctacttcaggtcaccaggcgttagatcctagaggttggggacttctggcatagacaaccagctctctaccacattcattctccccttctaaatgatacagctatggctgggaagtagctattccactagagaatacattttctaccctcttttttagctatgagtggcctcaagaccttttttatttttttaatagactttattttttaaactggttttaggttcatagcaaaattgagcagcaggtacaaaacctccaggcaagttttcaccggtgaaaagtgagtgggagtgacaggcaggacctggctctgccctcaagccccgcacgtgcgcacctccaccctcttcccgccaggatgcttgttggctggagatgaccaggaagacctaagaagcctggtcagggactctgtccacctgggtccctgagcaactgagcagagaacagttcgtcctgtctacctgcctagagagcaaaaagtaaacttcactaactgtgaaatggtatcatggattggatcttggaacagaaaaagcattcatagaaaaacctggtgaaatccatataaaatctggtattttgttaatagtaacctactaatgttaatgtcttagttctgacaaatgtagcatgagaattcgagatgtaagcattaggggaacccgggtagagagacggtgagaactgtctataccatttttttgcaatttttctataaatctaaaatattccaaatttaaaattgtattaaaataattttaaaaccttcacatgtatggagccattctatgtttggatctttaagttagtgcagtctagcctaccctacccaaggcacacctcttcatctctactgttcctaatcacactgtaagactcggatttggcattttccccactacgaagatttctgcgatccccagggggtgaggtgcccctcctactgcacactttcttcttctgtcattctcaagagaagcaactaacagatctgcccagttctcaagcacgcaggaagccttctttgagttgggagtcctgtctccttcacagctataatattcctcatgctgctctgagatatttgtccaacgagttaatgtcaacctctcctatttgttggaacatttactacg

SEQ ID NO: 32480 - DNA, 3818 bp, Bovine  19866880659948
  misc_feature (1)..(1): n is a, c, g, or t
ncccctttccccaaccccatgcctgttaacaattccagtctcatctccttctatgctccctcctatttcttcagctttgacttagacttcatgtcttccagaaagccactggccatccaacctctcaggctaggctcaatgcatgccacctccacgggttctgatagcacttcgttcagttcagtcgctcagtcatgtccgactctttgtgactctttgtgaggttgctcaaactcatgtccatcgagttggtgatgccatccaactatctcatcctctgccatccccttctcctcctgccttcaatctttccccacatcagggtcttttccagtgagtcagttcttcacatcaggtggccaaaggattgaagctgcagctttaccattagtcctttcagtgaatattcaggactgatttctttttggattgactggtttgatctccttgcagtccaagggactctcaagagtcttctccaacaccacagttcaaaagcatcaattctatggtgcttagctttctttatggtccaactctcacatccatacatgactactggaaaaaccatagctttgactagacagacctttgtcaattaataaatgtctctgctttttaatatgctgtctagggttgtcatagcttttcttccaaggagcaagcgtcttttaatttcatggctgcagtcaccatctgcagtgattttggagcccaagaaaataaagtctgtcactgtgttcattgtttccccatctattttccatgaagtgatgggactggatagtgctctgaggatgcttccattgtgccattttactaaatagtgaactggtcagtttatatgcccatctctaagaataagctctatgagctcagttggtaaagaatctgcctgcaatgcaggacaccccggtttgattcctgggtcaagatctgctggagaaggtataggctacccactccagtattcttgggcttcccttgtggctcagctggtaaagaatctgcctgcagtgtgggagacctgggttcgatccctgggttgggaagatcccctagcaaagggaaaggctacccactccagtattctggcctggggagttccatggcttgtatagtccatggggtcgcaaagagtcagacatgactgaacaactttcactttccccataaggcaaagactgtaccttgtctcctcagttcctggagaccagtacaatgcttggtccaggaaaagtgctttaacatcttacagttgaaattctgtgagactgagtcctcggtcctcatctctgtctatattcactgactttgaacagccacatatcatctctatgtcaatgattccccagattttctccaaagtccaggcttcttttccaaattccaatctcatacatccagctgcccactcttcatctccactaggatatctattggacagcttagttcaaaacggaactccccattccttccttatcctcactgttccacctgcagattcccatctccactggtggcaactccatccttccagtgtctcagataatagccctggagttaccctcgactcctctgtttctctcagttgccatgtataatgtgtctgttggctcttaaaatacatgcatagtgcaaccacttctcaccacccctgctgccacagtccaggtgagtcaccgagctcctgcagtggcctctcaactggtttccctacttttacacgttctttcctttgtttccattcttcaaatagtaactagaatcagtctttcaaaataatgtccggaaattatcacttgtcttctcaaagctctgcagtggctttctatcccattcagagtaaaagcctaaagtccttataatggcttataaggcactatttggtcaggctccttttatttttccaactacaccttctattactttttctccacacatactctgcttactccatgacctccatgtacatgccagatatattactcccttgatctggactcttactctggatatttttcacaaagtctctgcccacatctcataattaaagacggtcctttcagtctctttagggttggaacctctttcacttcatgttcctggaatataccctctcccttccttgtactctttcatttcccatggtacttacttgtggaagattgtataagccacagattatattttccaattgctcctgttctgtattaccttttagaatcttgcagctgcccctcccttcaacaagagatggagtctagggacttccctggtggctaagtgtccaagtggctaagattctgcactcccaatgcaggcagcctgggcttaatccctgatcagggaaccaagatcccacgtgctacaaactaagagctcatacgctgcaactaaaagaccccacatgccacaaagaaagcggaagaccccatgtgccgcaacaaagacctggtgcagccaaataaatagtaataacatacatttttaaaaaaagggatggagtctaattcgtcttccgtagaatgtaggcagttattgcttgcttataaccaatagaaggtggtaagaatgttctgtgtggtgtccaagtgtaggtcacaaggggtaacacatttgccagtttgttcgctagcaggctcaccaatggagccctgcaccaccacggaagaagttcaaggatcttgaggcaagcatgctgtgaagaagccaggctacctgaagaggctgagtgtaggtgttccagctggctatcccagctgagatcccggatgacagcctacatcagctggtagccatgtgagtgaagacacttccagaccacttcagccctaagccatagagccttccaagtcaaggcttcagacatcacggtgtagagacagactatccctgctgtatcctgtccaaattcctgattcactgaatcaacatgcatgataaattggttgttttacatcactaagatttggggtaatttgtaacacagtatgtttttactgtctaccataccatattatttactaacacattacaataagttattgtaaaataacaaccttattaagtctattgtttattttgaggttcctctgctagaacacaagtttcacaaggacaaggatcttcgtccgtttttgttctctggcatatcccagatatctagaacagtcctcgggaatagtaaatactcagtaaatatttaatgaacaaatttgtaagtgacagaaaaatttaactgaattttataagacacagcttgctacagctgagaggtctcttatatgtcaatttgtcaaatccactcatttgtatgaaaaaactgagcagagtaggggagtgacaggcaacaaagagagcacacggtgtgtggctccagagtaggcctggaggcccggggatcttctgtctgcaacaggaaatggtcttcaggtagatgtgtgatgctttgctcagtctgcagcttccagacatcacaggagccttgatgatcaaaacaacatccagctacagttagtggaaagacgctgtggaaagattcctattaagtaatgtcttccaattaacctccagttaatcaggaaatactgttaactagaagctaagcattcaagctaactaattaatataatttgaaatgattgagggcaagtctattctacttaatgctatttctggttgaagtccaaatgatggaacaacatgtattgttttctctttcactataaaagcagttaatttccatgctagaaagttggaaaatataaaaaagcacaaacacacacaccaagaaaaaaaaatcaacccaaatccca

SEQ ID NO: 32481 - DNA, 912 bp, Bovine  19866880681900
  misc_feature (1)..(1): n is a, c, g, or t
ncaggcattccctttgctccttagaatttaaaagggtttggggagaagtgatacgagggcctcattctttaaaaaggaagttgaatcaagatcttccccattgcagaacagtatttctggagcaggtggagtcagtaataacatcttgccccagaattgagttcagttgtttcaaaaccaggaactcgttcaaacaggcagtgcacacctggagcgcttaagggagaagtgtgaggcaggggaggtccctgcccactctcgcctgtgggattgtttcttagcctgcttattttgcaggagtacctttttattcatgtcttccctcaccaaggtaaccagcagtttgagctgtaggaaggcacaggggtgtcctcctgtccacagggaccttggcatcatccttggagggcagagacgccgaaacagaccccgaagtacaggtgctggccaatgaagggagggcgactgtctgcacttggaacatctggccgatgagtgtcctgtggatgaaacatctgggaggttgcctgagagacttagtttccatccagatgttctttagacacagaccattacatgaaatcattagttgctcttggcaacacgcccaggagttccaaaccttgcagattcctaaatagactttctgtaaagagctggaggggtgtgtccatgaagatgacttacagggcctcagagagaaggtgcgatggagggatgaccctgccaagagccctgtatctctatttatacatcccgagttacgcaagatgtcctgattgagaaaacaggagatgaggcctctctctcaggatccagcattctcacacccatcccagccccacccgaaacccagtcttggctgacccgaggctcacagagccgtgtctggtagcattgtccttagtggat

SEQ ID NO: 32482 - DNA, 917 bp, Bovine  19866880707388
  misc_feature (1)..(1): n is a, c, g, or t
nggcttaaatgtcctatgatagtgtatacagtcaaagcaagagaaataccccaggtggtgagactgtgacccactattacaaccagactggtgtggtctagagttttggcaaatattaagtgtttgtaaagacagctcactgagcatttgctatgaatgtagtgtgatcaggcaatgtgttaccacttggcactaagacatttaatcctcataacaaactacacaggagggctattcttaatctctttttatacaggtttagagagttaaagtaacttgtacaaggtcactgacccaggaagtgagaacatgtcacaataaacccaatgtctggcttgaaagtccttgtgcacaacggcttggccgccatctatccatccccaggaagactgacagctggaagcagtgtgtgcgtagactcatggtttgaatggtggtaatacacctactatgtgccagcattgtgcagttcacatagttcatttaatcactaacaaggctcgaggtagttagcaatagctgccttttgcagataaagaaactaacactcagaaagttcaggtcatttggtcatagcagcccactaatgtacagctggggttcatattcaggctgtttggcataaaacccctctctctttccagcctcgtgttagaggaaacagcagggaatctatgggagaggttttgttgtgagcctcaaatcacctgactgattgcatttggctttccagaagcacctggggggtgcaccaaggcagggtccaggcatcatccccatggcgtggatagaaggcttccctgagcaggaacaccctgcccacttgtgggagggctgagctggggttccgtttcctctttactgatgcggagtgaatttgaaggttattgcaatgaataataaatgagctatcatag

SEQ ID NO: 32483 - DNA, 1261 bp, Bovine  19866880734132
  misc_feature (1)..(1): n is a, c, g, or t
nctgtttgaaaagtcagcctctggaaccaaatatacctggaaaaagttgtttaacctctcagcacctgggttccttatctgtaaaaatggcgatagattgggaattctctggtgatccagtggttaggactctgtgcttccgctgctgggggcccagatttgatccctggtcagggaactaagaccccccagccatgtggttactttttaaaaaaggagataatcatagcacctaacttccaggttgtgctcatagaaaggatggcatgtatagaaactagaatcatgtccatccgactctaaagttttcattaaatgtagctactacagttgcactaaatccaaaaaaaaaaaatcttgacaaagaatcctttagcacaatcaacccaaaaaccacccacccatctctttagaactgtagatgtccactgtcatagctatagaaaacatgacatctatatccaaggagtggcaacatggcagaatttcacgttaacttaaaaataatcaaataagcaatccaccttcatatttccaataacattaaacctgattttatataataaggagatacagagttggggcaagtagggtggtttggtggcttacttgctaagttctgtctgactcttgtgactccatggactgtagcccaccgagctcctctgtgcatgagatttcccaggcaagaatactggagtgggtagccatttccttctccaagggatcttcccaacccagatatcaaacacgggtctccagcattgcagccggtctctttactgactgagccaccagggaaacccagggtggtttagtgacaagagttcatgggggaacctggttgttagacaagggggagccagtgttgggaaccagcatgaaaattcaggacgctgaagatgaacaggaaggtttagcccaggaagagctcagggcatttcttgccaagatgctctacctgctttgggccactttttgaggattacctacatgtgcgactgtacatcacaagtcccatatttaaggcatgccccaacctctccgtttcttcttctcatcaccaatggaaaacaaaacaacaacaaaaaaaacaatcacaaggtctttatcaaaacaaattgagaacagcaatgctttgaaattaaattttaatcaaacaccattaatgtttgagagagcagaggtgctccatctctgctctctcgagctgtgtgggcatcatcacagtaaaagcaccaacattcaggacaccaggcct

SEQ ID NO: 32484 - DNA, 4712 bp, Bovine  19866880758672
  misc_feature (1)..(1): n is a, c, g, or t
ncttcatggaagacagtttttccatggaccagtaaggtgggatggtttggggatgatgtgaatgtcatgtgcattacacttactgtgcactttatttccgttactggtttatcaggtccacttcagatcatcagacattagatcctgggggttggggacccctgctccaagacctccagtcagtttttacagtagaaaaagaagaaagacacatagcttgacccaggaccatgggaaaaggaagatgatgatatcaacaaaagtgcttaaaaatggaccatatggtccaggcttgattaaaaatgcctatgcaggtagctgtgcacatgatgaaagtcctgaatgccagatgacctcagtactattgagaatctgtgccgagggtccaaagctgggagaggctgaaaagacaagaagtgatatttagatggacatatacacactactatatgtaaaataggtaactaataaggacctactgtgtagcatgggaaaactctactctataatggcctagatgggaaaagattctaaaaaagagtggatatatggatatatataacagattcatcactgactcaatggacatgagtttgcgcaagctccaggagatggtgaaggacagggaggcctggtgtgctgcagtccatggcgtctcaaagagtcgggtatgactgaacgacaacagtttcaccttgctgtacccctgaaactaacacaacatagtaaatcaactatactccaataaatttttttttttaaagaattgatatttagagaataagataatcgaagtttcaataatggaaccctgctgtgggatgaagtggctttgagtctgactgttggcagtcacattagatagatggtaatggattcaaggtgaagccgagtattttcaagaacaaagagatcaggctatggagggcacagctatctaagtagatacggttcttctgacgctaaacctcccacccaggggaactggtgaagacccttcctaagagcagaagtgactctgcatgctgccttctcctgggtctcacctgttctccagcctgttttctgctgaccttcacttctcactgtcctggtccctgtggcagctggcaccactgctttgtctcagatcttgcacagctgatgagtgatggctctcagtttctctacctgcagtcacccaaaggtcagactttcaagtcagcctccatcaggtgcatctctatagtcccatctcctgatgctcttctgagctagtgcatggacctgtgccatgttagaatccagggaggttttctctcatccacaaagctttctgctcagtactcgctcctgctgcctgcagctgctcagagttgcctcctattggcagcagtaagaggggtgatcctgaatgctctggctttttagtaggactggaactatttaaaggttagagtctccaccatgagatagaagaaatttgtacttacccctttcacagtgcagcccatcctttccttgcctggctgctggggttttctgtttagtgcatttccacttgggtgtagactcagtaagcaatttataaaggttataaatgtattaagtaaatattcttggccagagcaaggagtagcagtagcacaaggaggaatcaagggccagggttcaaacctacacagcccagcaccgtagccaaagctccatgaggctattgaaatttaaattagttcaaagtaaattaaaacttcagtttgttagttgcactatccacatttcaagtcctcagtagccagatgtggctagcagttatcatattgagcagcatttccactatcacagaaaattctctttgactgcattgctgtagactctgggagggctggtaaaaataggtcagggcccatatttggtttcagacaggctattatattaatgtaggcatttgagaccattggtaaaggccaggaatcctgtcataagaaatacaaaatataatgggggcttagaaggcagaaaatatgtctccccaaaagccggaggggacctttgactgggctaacttgctgctacgaccctgatctactaaactggacttcccaaattccactgcgtcactctggcctgggaataaagtctggggaatggtttaagcccagagttttcaaactttattgactagaagacttacctggagagctggtaaatatgaagatccttgcccatccctaatggtaatgaaattagacctgagaatcagtgttttgaacaagctcccctgtgatgatgattccgctggtcgtgaaccacaacttgagtaccatcggtttaacctctaccccactccagtactcttgcctggagaatcccatggacggaggagcctggaaggctgtagtccatggggtcgctaagagtcagacatgactgaacgacttcactttcacttttcacttacatgcattggagaagaaaatggcaacccactgcagtgtccttgcctggagaatcccagggacgggggagcctggtgggctgccgtctatggggtcacacggagtcggacacgactgaagcgacttagcagcagcagcagccctgggtgtggagaaaagagactgtacaggaaaccaaatactttcttcctgctaccagtatttgttcaatgtgacaatacagagaagcagttgttttgcattttactgtagagttgcccctgtgggttttaccgcttttggaactcttatgtcccttttggtgtatatttcagcatgaagataatcagttttcacttataagagctgaactaggatttctgccagcttacttctcaatccctgtccaccgggggctcaaaacacacccctgttttcttatgatgatgacaatgactggtgtctgaaatacatgttgtgttgttgcatgctgatagcatatctgaacgtatcacttctgtacagatattggggcttaggtagaaaatggttgttgggtaagactgagcatcagtatcagaacaaatctgtattctttctcagaaggctagagcagcctgggagaaacaaatccatttccaactttcactctataaaaagttccatattttctcagatcagacaaaatatattgagtgccaaaatgctgcagcaatacggacgcgtccctcagctgggttggaatctgtatgcattgtccccccgggccagttttgattatgttctttttccttttattgcagtcagcaaatctgaatttgctattgtggggagagcaagaagaagaggaaaaaaatgaaggtttttaaccttcagaaagttcagaggttcagtctgaataagcacaaaaacttttcagtgtgcttctgaattccttgaatttgcagaactgctcagaatcccaagagaactaccttgcacgtaggattcaggccccgctttgtagctaaaaggcagagctgcagttatgagaaaggagcagaattaaggaaagagggaagaggaatcagagaggggaaaaaaaaagagtttggtccccatccaggctaagtttcagcctattcagtttcttcaattcaaagccatctgcttcccacgactctcagataacgtctcccctgccaggacaccctgttcctgcttaattgaaattagtttccaagaatagttgtccaatgcagtttccagtggagggactgttttgaaagtcacaataggagtcgaagctttgggatgcagatgtccacacatgagccagatgtttgaaaggcatcacacggtctatagcagccttcacatttccaaagccaggagttctctcagtggcctctgccactcgcaaatggctcctttgaaactgccaccatctctccatcagggacctgtaatcccacaagtgtgaagggaaacaatcactttgattcaggtttagagctatgtgtttcccaggcttaattataccacaggtatataaattacagaaacatgttaatgctcccatgattaaaattatagagtgcctaattgaaaaagcataaactgaattgaagaattcctaattatagtttgctttgaggtgttaatttcctccataacgaatgtgtaatttcttggaacctaaacaggtagcctcttgcatcaacacgtaggctgcagacaggtgggataaggttgatttttcagttcagaaagttgacaaaggaggcttggttcaggcggagaggattgaaagggagcttgggaaggaggtaaaactagtgaaggccataaaccaaggtgcaccttgtggacattgggaccaaggactgatgaggagcccctacaaaaatttttccacctgcttttctctttccagagtctcaactttcatcccagttagttttagtaatttttgtgcctgtaagacagtgattcttaaaatttggtccagaccaatggtaatatctggaaatttattagaaatgaaaatcctaggccccgcccccaatctattgattcaggagctctgtggatggagcccagatggctgtgttttaacgagacctccagaagattctgattcatgctagagtctggggagcacaattcagaatgggtcccagatagccaaagtcacatccagctgagctttcttgggctccttctctggatcagaagctgtgattggtggcttcccaagcatcatttcattctataatcttaacatcacacggagtaggaaaaaaaaaaaatgct

SEQ ID NO: 32485 - DNA, 1107 bp, Bovine  19866880760017
  misc_feature (1)..(1): n is a, c, g, or t
ntaaaaaaaatgtttaagttatcctatgtctaatgactgcaagccaaccaaccaaccagtttggtgtggaagactgggaattgtgcaggtatgtcactttaagatccagccctcacttgccgctgatcctggaccactctcctttctgagttcagtttccttagatgtaacatgagaagaagaatccttatgtcacagggctttttagagggttgaatcccatatgaagcagctaagcacaccagaatcattcaataaatgttccttttcatccttcatccggaggcctcgtgagcctaatgagggtgcagaaaggatgcttacttaacaatctggagtgaagcagttctggggagcgaacgtgcatccttgatttcatcatgtgccagaggatggaaatgaacagcctggaggattgcgccccagccctcgcagctgcctctctactgaaggatttacgttctgcgtgattaggcctgaaatggacaggaagctttattgtgccaggctggcagggcgtggaggagcaaattgataaagacacctgggtcagtggcaagtggggtgtttcctaatttatagaaacacatcgagttctattactcagccccttcctttctgctctatctcaccacccctcctactagaccttctctgcccctccttgacaaatggtgacttatttacgggcagggagaggatttactgataaagatgaggcactggccaaacccacagcaagtaaattcccagagaagcaacatctggtcgtttgacttcatatagccaacctttgctggatgctttctgccaggtgctgggacatcagtcatgtgggaacacataggtcacatcttgtctcagcttcttgggcaggtaaactctgagtcttgttacctccttggaataaaatgaagataatgccggctcctgccccacagatagtaaacgctcagtggcaagtagcattaattatcaaaagttgtccatccacatttccagattccaaaccttggcatcttacattgctcagccatgaaaggaatgaaactgggtcatttgccagagatgtgaatggacccagagtctgtcatatagagtgaagta

SEQ ID NO: 32486 - DNA, 1593 bp, Bovine  19866880938430
  misc_feature (1)..(1): n is a, c, g, or t
ncctactcatagtttctgttggtcagaaatctgagtgcagatttcatgggtacctctggctctaggtctttgatgaagctgtattccagctgcctggtgtgactatggttgcatctgaagactcatctgaggggaagaatctgatttcaagttcacccatgtggttgcaagcagattcactttctcatgggttactggagtaaggtcctcagttccatgcccagtggatctctctgtagggcagctcacaacctggcagctgatttcccacagagcaagtgagagagagaaagtgagcagactaggctagaaggaagccccagtctttttataacctaatcttgaaagtgacatgtccatactttgttacattctattcattagaagtcagtcagtaaaacagtctgtgttcaatggaagggataataccaggatatatgaaagcaggcaggaatcattgcagtcatttgagagactgccacatacaaaccccaacgtcactctacagtggttttgtgagagcccaaggaatcatgtcagtacaagagcatttacatgtgttacagcaaatatacacatgtaagtatacatattataacaatttatttcaaggggtccaatcaaaattctccagctacttttatttagctttcattaacagtcagttaatgaaagtcctttaattcataagtggttctaaactattctctctacacatttctccaacacctggatacttcaagggaaataaatgatttaatgttccttataacataaattgccactgacaacaatatttaatcattaaagagttaacagtgcactctgaattgcattacccagataaaacattcactccctaagtaaatgaattagccacataattgacagtcgattccagtaataaaacactaattaagtgattttgctaagtaaaaagttcaatgcaatgaatttgctaaacaatggtctaacaaattttcacgctaaataaatgacttgaaatggtgactaaatgctcaccatgtgtggggtcagttgaaaaagcaatggtgcttttagaaaacaatgacagaagtgactgtgaagctaacccccttaacgacattacactaggctccttgccaagcagggaccaagcgaatatgtctgactgaggtggaggtatgagactggggggtggggaggggaggaaaatcaccatggtcacagcatgagtgactaggttaaaagagaatttgcaaagtccagtatagtcagactggagtcatagcagaagtgagaatgggaaagtggaggaaggcttcaatgccagaccttatgggctaatgaaggtcagactcagcaccagagagacttggaaagcagtggcttcataggtacaaggatccttgtagtcctctggaagcaggttggattaactcatttaccatgatgtcttctgaaagatgtggattgaggtaagtctatggtttttgtgggccccattagcttggacttccaacttctctccaacaaagaacagtatagattgctcatcattaaaaccttgttctctggaccctttgttgacaaaggtccgtatagtcaaag

SEQ ID NO: 32487 - DNA, 1352 bp, Bovine  19866880957270
  misc_feature (1)..(1): n is a, c, g, or t
ntgcacccatggagaaggaaatggcaacccactccaggattcttgcctgggaaatctcatggacagaggagtctggcaggctacagtccccaaggggtcgccaagagtcagacacaactgagcgactaagcacaaggatccttgaagtgcttactcctatcctgtttagactcctcttgggaatcaggagtgtctgagctcagagttaagagaacctcactctcctaggctccaccatccactgaccatgtggcccatcagcccttgggagcctcagtttcctcatttgtaacaaaggttaacagcatccatcctgcttctctcccaggtcgctgtgagagtccagagagataacccactcacctgctcaccaagtccttatcgagtacctgtgcagaggatagaacagggagcaaagcacgctgtgtccctgttcttgggggttccggtttgtagtagcagatatgcttataaattgcaaagttcgggaaaaggcccacaggataagctgacctgacttcatagaccctgtgggtgcccagagctccccagtccacctttggggaccccagccctgccagtaggtgcagcaacactcggtgatgtgaacccagtgatggggacagcaagctgagcctctcccccaccacccccgccagacccaaccggacattctgtttatgtgtcttttagcgtgtcggagctcacttgaattaactgtaaaggattagcctgattcttctgctgaagaacgtttttttttttttttttccttaattatttttatttggtgttatttgaagtaagcgtgccattgactaaagcctgcacatcttgtttatgcctagattgtgtttaaaatggtattctctgtaacacgatttttagttattgatgacctcttttataatgacttagtcagcttcacttgaatgatagtattgataacaatatgtggctgacaatctgtttgcagtaatactccaagaggcaaaaggaaagcatttgtacacacgtagaaaatagatacatttgctggttttaagaaagcatgaaaatggagcattttaatcctgatctcacttcccgagacacttgcagagtgtttttatgtggtctttcctgcattgtcctctacagaaggcatctctacctgcttttaatgacaaaatctctaagatttaaagaggcaggtgactttccctagtaagtaatgacaaaatcagaaccagaaggacaggtgggaaaaaagaggagcatatacaggccctttgtacggcagagtaatcttcctgagcctcaacttcctcatctgtaaatggggatgataactgagggtgatgccaggggtt

SEQ ID NO: 32488 - DNA, 840 bp, Bovine  19866880992634
  misc_feature (1)..(1): n is a, c, g, or t
nctgcctggactaggtgaacctgctgcctctgggaccatgtctgctgcaccagccttctgaggagtacagcttacctggcagatcccgtgatcatcatttaagtcacttagtctccaggttgctaccctgaagttcactgttagaggctggtgaccacaacactaaaaataacattgtcctagagaatatttatagttttttcattccctcaagtacagactgtgccttatctgggaaataccacttattttagggctcttgagttgggcatttaaatggtagggcttgttaggtggtagtcatatttcaaattagttctgcggacatttgcatgcttctgagttccctgtgacatacctggtgccagggtaacatgttaccacaggtctggtaggggaaatagacacaagcaatatttaaattgcagggaaacaaaataagtagaacaataaaaggaacattaaggcataggggaggttaggaaaaacttctcagaagagttaacatttgagttaggttttgatggatgagtagaagttagaagtgaagtgaagtcgctcagtcgtgaactgtagcccaccaggctcccccatccatgggattctccaggcaagaacactggagtaggttaccatttccttctcctggtaggtaaatagttgcagaataattaagtgaaaatggctagagagatggacagaggcctccttctgatgttattgccagtgtgtttatagattcttaatgatatagtagaaagagcttccagttgtaaaatctccccctttttccctagtgtcctaaatgccattcagatcctagcctcagcagtagggcaa

SEQ ID NO: 32489 - DNA, 1094 bp, Bovine  19866881004577
  misc_feature (1)..(1): n is a, c, g, or t
natccccaaagtatggttttgtgtttattccttctacatacctttctttccttttgtagctacaatacctgtctacatatttttaaattttaggtagcatcatcattaccgtgaaaacattgtgtcaaccattggctaaacactaagaatgtgaaaaaccttagttgtccaatttttaaatatatgctttggagaggctccatttaaaaaaatttttttactcggatgttcagagctacccaaacattactataaaatgccacttttcatagaggcagccaaggtctttttattatattatgcctttggaaaccaatgatttgtgcctaagacaattctctccatattattttaccctgaatagaatgaggttggttgggagttctgccctaaggaaatatcaaaacccccaatacatactcatttatagttcgaaagtgaactctcttatcagatttccttttatttcctgctggggcagtatgaacagaactcagatggaggcagagggtctgctgtatatcttttcaaatttatgattaagaaggtcacatatacatttttaaacacactcctttttgataataaatgaagaatgaaactgtgaaatgtcatcagaagccgaattactcgtttttcgttcattcgcatacccctgcctgctggctgattgcctgccaatggtgagaaaggcccaagtaaccgaatgctgcatttcttaaggttttgctgtctgtctggaatagcctcactggtggagcagcgtgcctgtggccagagcattttaaccgaaagatgcacttctattcctgagcccccttccttgccccaggccaattttaaaaaaatgaataattccattttagcctgcgtttgtcttcacattgtggccagaatgggagaagtgaaagctcttctcttcccaagtccagatcctctctagatgcttctcttttacgttctctgtctgtagagcaggctctaaatggatgccatgcctttggcatgagcccctctaacagatcatggtgggaggggaggatatagtcaggggatctgtgcctgtgggtcccttcctgcaaggtcatttagca

SEQ ID NO: 32490 - DNA, 675 bp, Bovine  19866881099043
  misc_feature (1)..(1): n is a, c, g, or t
ngtaatttgaactctcttcctcttggggatgggtggaaaagctaaagtctcctcaaatcagtgtatggactcaacaaagaatcaaggtgccccctgcccccgccttgctctaaagcttgtatgagatcagcaggataatcaatttcacagttctgtaaggccgattggaacatgattatgaagttagccagagcattctacctgggccttaaaaggcctgttgcagagggacatctagtatatgaaacccaccagacacctgccaaagccaaggactcccttgcttcctaaggtttaatcgcttgctcacctgagttccactgtccaatcctgcccaaggcctggagggtcagtctgtgtggtcagcagtcctctaagaacttaagtccaacttcagcagaaaggtttggggtcgaattgcttactgcagtctgattaagggagagacttcaccttcaaggttgccctctgctgggttcctgcctcaggtacccctaccctttccaggcccctgctctaaatcactccagcctctcccccaggtgacagagctctgccctctaagatgactgactccctgcactgagaggcaacaaggcaccttctacaacaaggtaccgagcagcagactgtgatgatgtcgggggcagcctggtgatacctcggaacctgggc

SEQ ID NO: 32491 - DNA, 1347 bp, Bovine  19866881149063
  misc_feature (1)..(1): n is a, c, g, or t
nttaaatagtatgaagcaaagggaagctatgcctcaagtcattcttgtcagccagctgaagagattctgcagtatgtgctttataaagtttggggttttttcctaagcacagctgtcttcctgctcagaatctttggtctcaggcaatctgttacttgcaatatcactgtatccttgtaaatttagaccttcagtaaatcttcttcaagcctgagagaaaggacacatgtatactctgttttgatcacagagtaaagaagtataatccttgccctggaaggccctgcaattgaatttggaaaacaaattcaattaatagacgcttgccagcttctatcattctggggttgcctggaagcttggtcagggattgcagtggcttctggtgacatccaggataactcagccacttggaagaggtgaatcaaagggcgaggaagcatgttgtcatgaggaggtggccaggcagaggggaatcctgaaggttgagagcagaccgccagaggttgtgaatgttgagacccaagagtgcagcttggagctgctgatggtgaaaaaatcctggctcaggatggaggccttgcaactggtcccaaaatacacaaaatattagatctagtgaggggtaacctcatagcatgcaaataaacagagctgagatcagaactctggcctctccattctcagtcccatgttcttgacaatatagagaacagagatgtctgtgagtctttatcaaatgcagcctgaactctctgcccctgaggaatcatattcccaggctctggtccacagagcccccagtgaagaagaatgccaacctgtattatatgggcttcccaggtggcaccattggtaaagaagccgcctgccagttcaggagacacaagagacttgggttcaatccctaggttgggaagatcccctggaggaggaacccactagagcaacccactctagtattcttgcctagagaatcccacggacagaggatcctcgcaggctactgtccgtggggtcgcaaagaatcagaaacgacttaagtgccttagcacaacacatcacgtggttggtagaggcattggatggcttgcgtgggctgttctagatcccacccattgttggaagttcttcacccctttctcccatctggggccactgttcatttggccaaagatattcaacagttttatgagtgaccagatttgctggctgtggttgccccagttcagcctcccaaggaggcacagagctttccttctggacctatagaatttggctgtcctgataaatgagagaaagccttggggtgggcttaccttgggggctttggccagttcctactta

SEQ ID NO: 32492 - DNA, 2071 bp, Bovine  19866881278422
  misc_feature (1)..(1): n is a, c, g, or t
nccaaagatcccaagtgctaaagatcccgcataccccagtgaagacaaaagatcccaagtgctaaagatcctgcataccccagtgaagaccaaagatcccaagtgctaaagatcccgcataccccagtgaagaccaaagatcccaagtgctgtaactagtgcaaccaaatagatgaataaatattaaaaaataaaaagccaggacatcctgtccttctataagcctcctgttccactcagcccatgaccaaacaggagtctcccatccctcttcctacacgctctccttgtaaccctgagcccattcgtgtttgattttacttcctgaaatgttaagcctgccctctccttcccaggctgcttgtaacgtgactcagcttgatacagagtatgggttgtatcgtgcccctcacaaaggatgtgttgaagcaaggctcaccccagttcctgtgaaggtggtcttatttagaaagaaggtctctgcaggtataattagttaagatgaagtcgtgacggtggacccagatctataatatgacactgtaatatgactggtgtccttacaagaagaggaaaacatcaggtgaagacagagacacaagaagaacctctgtgatgacagaggcagatattgatacaatacatctccagcctaaggtgtgccagtggttgcccgcagatgccagcagccaaaagagatgaagaaggattctacccagggtctcagagggagcatggccctgttgacgtctggacttcagacttctagcctctaaatttctgttatttaagtcacccgggttgcagtactttattacagccctggaaatgaacaggcttggaagtgcagtgatcctgagcatggggcagcaggcaggggtccacctcgcagagctgtgcctttgcagcgaaagacctcaaggagactgaagctgagaactgccatcctggagaatccttttggcacaccctccccctgctgtggggtctccatgttggctggattctgcacttggctcacagcaggcctcttctctggggctctgaccctcccctctgtaatcggcctcctgcgtttgaacagtcttagcatctgctgccaggcacatcctggccttggcctgggacacaccaaccaggccgttcacgttgtcctgacctcatttgacccataggccatccctgataggtttttgtgctcgcctccggactgactgctcctgcgtaggcctcctgtgttccacagctgcccaggactgctctgaactctgcaagaagagttaaccatccgttcagtgcggccaattgttctcttgcactggctgtcggaggatgtctaaagggactatcactttgccgcagggcacccgaaagagtgtgtgttctcttttacatctgctcttcagactaaatccttaatccccagcgcaggccctgggtgctcctctctcccgcagctaagcagctttgagcccccagggctccaggctcagcacacaagttctgcaagcagggagccagcactgttagccctgagctggctcaatttcttcatcctcatcgatggagcaggcttcgtctggcacacagggagccagggtggggaggagaccactgggtggtcttagggacgtccacaatgtgtcccacacagcgatggcatagggaaatctgactcatagtctagcttggcctaagcagagtcatacatgctcttctctgtacagacttctgtgttagcatccatcacactgagctttgattttcagcttgcacgtgtgtctttgccattacgcggtgagttctcaaacagcagggtggtctcctaatcgcctcgcatgcccagcaccttgttttacccactattatcttgataatcccagcaaccactcacgccacaccagtcgacgtctaggactggccgcctagacagccaagggttgaatgggtgctaatgaggccaagggaaggggtctagtccatttggaagtcacttagctttttctagttccctgaccatgggcaaaattttcctcggccaaatccacacatagctcctaagcatacgttg

SEQ ID NO: 32493 - DNA, 1207 bp, Bovine  19866881325694
  misc_feature (1)..(1): n is a, c, g, or t
ngttcgcaatgtgacatgaaacagcaggcgccgtgcttgccctgctgcggcttttggacccacaccaatatgtttgattgaaagactctttcagaagcttaatgtttttaacattaaagaattaaatcaataatgtccccatttcagcttctctgtgattatgtcctttgtgtcctgtttgctatttagtcacaagctttctaaaaatcacaatccatgtcatttgtcaaagaaaatcaagagaagagggaaagaggacaagaaaggaattaccctcggatgaatacctactatgcgccaggcactgttccagtggtattacatccattgacttaggtcagcctcctcgaaacccctaaagcaatatgtggctataatcctcatttgataaattagcaatcggaagctcagagaggaaaagagacttctccagtctctgcaaagagcagagcctggattggaactctctggtgtgttggattccaaacgcatcctcctccatggtgttctttgctaatttcctccactcggcgctcccatccagtaatagaaccacttgacgccaaggaagaccttcctctggcatgaggctcccctgtcttcaggcctagttcacagagctaatgtgaaagatcttcctgtctacctggctgggcccctcaggtgagtcgctgagtcactcggtcatgtccgactctatgcaaccccatggacagcagcccaccaggttcctctgtctacagggattctccaggcaagaatactggagtgggttgcagtgccctcccccagggcatcttcctgacccaggaaacaaactggggtctcctgcttgcaggcagattctttaccagctgatctaccagggaagcccccaggaggtgatgccagatctcctgaatagtccctgggatgggaaggggaagcccagattgcctgtctacagagggtcagggaattcacttgagaagcagaattttaaagttcagggtccttgatttgggatcaagagtgtggtgactacgacagggtttcaatcctagaaagaaacaagtgtgtcctaggactgagtggctagccaggcagttggaggcaacagtctaggcttctaggggaaactttgctcctctctagctgggagactttgaggaagctacttttctgagccagaatttcgtcagtgaaatgagaccagtgcttccttcca

SEQ ID NO: 32494 - DNA, 1587 bp, Bovine  19866881370967
  misc_feature (1)..(1): n is a, c, g, or t
ntaagtaaaggaaatattagggacaaaaatgaaaggagagccaagacttgagtagcaggcaaatgtcaacactggcattggggaatgacaatttactggggaattctctagtaaagaggacctagattctgagttttaatagccttggacagttagatgtagggtcccatgctcaataaagcttacatactagaaatgggttactcttgagtgaacaactgaatagagggggaaaagatatttgaagcatttaaaggagtaaaagatgggctaatggctcaagaaagcaccaagtgttgatgaggcatattataaaaagcatcaaataaaatttagatacgaaagtataaactcagcagacatgttatgaaggaaatgaaacatacatgaggagagaattaatgacatggaaaatagaaattaataaactccccaaaatgtactcaggaaaacaaaagggaaacatggaagaggagagataagacttgaaacacagctgagagagtctcacaaggtatcttctgtgagtggagtcttggggaggaggcattattcaaagagatttggcaaagggctttctagaactgacaaaagacagttctgcttcaagatgcccagttaatcctaaactggatggattaaacatttttcttttaagtgggtgggggagatttcttacataaaatttcagagcacccaaaaaaagtcttcaaagatgactggaaaaatacacagatcactttgtcatgccatgaccaatccaaaacagctttttaaccccagcaatggaaaacagttgaaaaatctgcaaagttcagaggggaggaggaaaaaaagtaaactgtaaattgaatacataattgaaaatgggatgagagaaaagtattctgataaataaaaaccaagaattggctgccagtgaaatctcactataggaaagtcgaaagattttggttcaagaaaaagaacattgatcttagaaaggcctaaatgcaagaaagaaaggtgagccaagacattggtaaacgatattgaagtcaatattgacaacataaaaaaacaataatgcttgaattgttatgtgcctgtgcaggaaacagagaactgaactgttggacaataataaaatataaaatgggagggaattgattgataaaaatcaccctgaccttttggatcatttggtaagtggagggcctgataatagttgacttaaataaaatatgtataataaactctagaagacacaggagacacaaaattaaattaaagagagtataaaagttgtttataaattgtaggacaaagtaaaaatgcaaaagaagatgaactatttccaggtttatcagtaaccataatatatgtctctgttatcattctaaattcaccaattaagagatacattgtcagattaagtaattaaaaaaaaaaggctacgtgtttgaaaatgacactgggtgatgcagtttttgaattttgcccaattcgttcatatgaatggacaaaaaaaaaactcaaatagcaaaacaaaacccatggataatatctacataatacctgggtgacaaactcccctcatgaattaca

SEQ ID NO: 32495 - DNA, 1063 bp, Bovine  19866881381758
  misc_feature (1)..(1): n is a, c, g, or t
ngtttgactttttccccctgatcctcaccatcactggcctgcagggaggaaatgcagacctctgtctgccccaccttctgattcccagatggggctagcccaccttctccctacctgtttccccactcaggtgaccctaccttccctccgtgtgggtctctttggaaacttcagacatgatcagagagggcagccagctaggcaggatgatcacagagtaggcagcacgtgtgagaagatggataggcttccagtgtttgttgggtagaagaagaaggcatctgatgctcttgagacatcttgttgccacaccccaggcaccagttcacctggctacatgtaggcagggcaagcaaacacacagaatattcaccatgacccagagactggtcaggcaccttaggcacatatgtattaaggcatttaatcctcacaaaaacgccttgaggtagctgctgttatagtcacccccattttacaaatgaagaaactgaggcactaaaaggtagcttgcccaaggtgacataagagtaatggcagagccatggtatcaaccagagtcccttctcttaagcctcacgttcacctgtagatacaggcaagtgcacatccgaagccacgctcacagccttcatgtcccagcccccaacccctgagattccccagtagattgactgacgggcgtcacagtgtcatcacagctccctcttcagaaaggaaagtgagaccctcgagagggaccccccactgcaggccagggctgagaactgcactgtatcttttgattgctcagtcctgcaaaggaacactgagtgtgtggaacaagccagcccaaattcctccgcttgattttctggaatcaaattaggctggtgaataggccagtggcgttttcatcaatttctcagccttcctttggaactgagcctgatttccttggcctcctgcaacgctgcctgctgtttactgagcaaaccagctcccagaaccagcttcactttagcaatgcagcagggcaacgtggtagagggaagattacaggtattagaggccatttaggatc

SEQ ID NO: 32496 - DNA, 1238 bp, Bovine  19866881809042
  misc_feature (1)..(1): n is a, c, g, or t
natacaggttactggttgaagaacactcccaacagggcacgatgacgctgataatatgaatagctgcatcttccaagactaacccagttgctgtcttttaaaaaatatgtctagtcatcttcagcttggtagtgaatcttcagtggaaaaaacttgcctggcattcatgataaaagaagccttgtttctaaaagcagggttcagactgggagctgggggtgggggataccctccctgtctctttcccctcttcttgctttcccgcctacctctctcctttctctccctctctccatgcctctttccctctgtctctttctttctttgcctcttccatcttttcctcatcaatttcaagaccttgtagcagtggctttcacaaaacctgatggcttatgccttccaggaggggaagttcacaaattgcaacagagtggctttttttttttttttttttggtttttgttttgtttttcttttttttttaaagctgagcagcaggatcacagaacctgcaggtttgctgcctgctcagcaggataaagagagcagagcttaaaagatgaaagccaagccgaccagaagaaaggaaaacatgaagaatgctcttgaaagggggaggagactttgcttaagccactggggtaagaaggagacactgcccccaagcatatgctgtttcccttgtccagatggtgtcatttgccctgcgaaacaagtaccagacaatgagacttggatgctctctcagaaataaatgtgtgaggaagtcatttgggaaatgatgcccacggccattgtacttaaacagaagagatccaaccgtattggaaaacaactgccctgcaatgctagcctccagttcatttgaatactctgtttacattgttaccagtcaccagtcatatttgcacaaggagaacttccacctgcttgtagtttacctagggcacatactgtatttacatggtatagattagagtgggagaactagttacaccagtttggaactggaaaaagtgaaatgaaatgttcatcttggtttcctcagacccactgcctgtgccacaggggctgccatgtggtaatctgtatcgtcactgccaccatcctctgatcatctctgatagaatggctgactgtgtgctaggcactggtctaagagctcacaacattcaaaggaaggatgtactgttaccagccagggttcttagccttctccaatccatagaaattga

SEQ ID NO: 32497 - DNA, 1259 bp, Bovine  19866881817999
  misc_feature (1)..(1): n is a, c, g, or t
nctgcagataagtgttaacaggaaattattagcataacacctggtactgtgttgtggttgttcagtcactaagttgtgtccagctctttgagaccccatggactacagcatgctaagttcctctgtcctccagtgtctcccagagtttgttcaaattcatgtcctttgacccattgatgctatctaaccatctcatgctctgctggccccttctccttcttcttttgccctccatctttcccagcatcggggtcttttccagtgagtcagctcttcccatcaggtggccaagtgttggggcttcagcttcagcgtcagtccttccaatgaatattcagggttgagttcctttaggatggactggtttgatctctttgctattatggttgttgttttccaatccctgttcccctgggacatggtgaaagctcagttagatatagctaactgcaaccattctgtcaaagttcttctggtcttgttttataatcctagctcagtgtctagaacacagaaattgcttgataaataattgtgggaaattgaataaatgagtctttgaataaataaataaatatggaaaatcgaaaaagtgagtaaatggatagattagtgttcttcactggtctctttctgcagcacatgatggtctctatgataagctttgtttctgatatcagcatcttttgtccattggctgtttcaaagaattctcagtctctccatctgcaattgcttacagtattcatattcagtacagactttttcttgtttatttatttattttggactgttctgggtcttcattgctgtggcagcctttctctagtttcagcgagcaggggttatttattgtggagctcgggtgtcccagtgttgcaggcttctcttgcttgggcttcttctgttgcggagcatgggctctaggctcccaggcttcagtagttgcagcatatgggctcaatagctgcagttcccagactctagagcataggctcaatagttctgttgcacggctcagttgctctgtggcatgcgggatcctcctagacaaggggttgaacccgtgtctcctgtattggcaggcagattcttcaccactgagacaccagggaaaccccagagcttttgctgagtatgttttaaagtgatcttgtgttcctctgatagtctcagaaaatgacctatggacaatagcttacagcaatggcatacagttcacatggctttcttggctctgagtgtcctgtaatctgagg

SEQ ID NO: 32498 - DNA, 722 bp, Bovine  19866881857193
  misc_feature (1)..(1): n is a, c, g, or t
nttgctgcaaagaagccagtctagtctttgatgggccacattcagttgcgctaaatattaattaactcttttatctgctcagtaaagccagacccgttctaggcagccctgttaaatctattcctgctcctttatttgcttgcaagtagcattggcagtgtttccttctaaagagtttcctgtaattcagagctttacactaaatgatttacccatctcatctcctcattacatctcaggccctccttggtcttctcaacttcccctgtggtccctgggttggggtatccttctcttcaatcaatgaactcctctagctggtccctgcatcccacagattgaaggcgattaaatgagataatgcaaatggcatcactttaaaaccataaagggctgcacagatgtgaggggttattattatgagcctttcttattaatgagtattaatgagctaagcctgcagatccctaacgctacagagacctcatattaaccatatggaagcctgattttcaaagagaatgagaatgaactgggagaagaggcagaaaacaatttttttttttggatttccttccctagttctcagtatcttgaccacaatctgcatgaaactaagtggttgtgtgtttacataatggataattatgtctttgtctttgttcttagctaattgcttcaggacacctgcccccacgtgatttctgcatttttatggccct

SEQ ID NO: 32499 - DNA, 1531 bp, Bovine  19866880358285
  misc_feature (1)..(1): n is a, c, g, or t
ntatatatggaatttagaaagatggtaacgataaccctgtatatgagacagcaaaagagaccctgatgtatagaacagtcttatggactctgtgggagagggagagggtgggaagatttgggagaatggcattgaaacatgtgaaatgtcatgtatgaaatgagatgccagtccaggttcagtgcacgatgctggatgcttggggctggtgcactgggacggcccagggggatggtatggggagcggggagggaggagggttcaggatggggagcacgtgtatacctgaaattaaaaaaaagaaaaaaaaaaaaaaaagaggagaaggggacgacagacgacgagatcgtcgttggatggcatcaccgactcaatggacatgggtttgagtggactctaggagttggtgatggacagggaggcctggagtactgcggttcatgggacacagttgcaacacaactgttggacacaattgagtgactgaactgaactgaacagccgaaaataaatccaaaaaaatatatatatatatacctatgtccagaggattgggaaagtgggtatatgttgggggtgggtaagagagtgttaaatcttcatctttgatagtatgcagttaaaagaaattcttgtaactagaagttcaagcaataggtttgttgtttagtaggtaagttgtatctgactcgcttatgaccccatgaactgtagcccgccagcctcctctgtccatggaattttctaggcaagaatactggaaggggttgccattttcttctccaggggatcttaccgacccagggatagaacccatgtctcctgcattgcaggcagattctttaccactgagctaaagcaacagaaataaagaccaaatgtcagaagaaacagccgaaaggaaaaagtggtcctctttagaggagaagactccaagatggggaccagtgaaatagagggcatggatttgcttagcactttttctaatagtaaaccttttcaacatgcatatgtgccacttcaataaaaattgaaggaagctgacagtttacattcctaactcaaatacatctcacctcatctctaaggagtccactcttcattcaaccatccctcaaccaatgggctcagttttgagtcatcgagcatttgtgtcacagcctgtaaaattcaggtaatgaaaatacactcttatgaaattgacagtaaagacctacagaagtgcaaaatgggtcttgactgatgattacaaataaagtgaagatggtttgcttgctttattcagcacacccttgtgaactaaaaacaccagtgtggaagcaaactcaatcaagctaattaaactgtgtttctccatttcaataatagaaaaaaaccattctatgcttccaagctaactaactaaattgtacatagaaggaaagccacaccaaacaacagaaaaggtcaatgcaatttaagaccaaagactgatgtgtgctttctggatccatcaataacttttctcagtactaaggatgctccattgtta

SEQ ID NO: 32500 - DNA, 3984 bp, Bovine  19866880682079
  misc_feature (1)..(1): n is a, c, g, or t
ntcctttacatattcttgacaagtgtcacgaagtctcccgcagggtccccactggtgtaaaatgatcacagtgatgattgtgggtacctggtaggctagttgacggctctatcacatttaagagtttattgtatgataagtggttcagtgactgctggctactcagaaacctttggataagaaagtgtcacaaaggacagtgttttgaaaggtaaaaaccatgctcctttagattttccttcttcagaatgaatggcaaaggaactagatgaaattgagctctgtcccagtgaacataaattttactaagatgatagagatgaaaagtgttgctagaaagattaacattggtgtttttaagaatgatcagtatgatgtccatattttcagcctttaacctcttgggtcatttctataatggttacattcacatgaataggctaagatttgtgtgaatatgtatgagcctgtaaagtgtattttgatagtatctacgctgccaactgtgaaaaattcataatctgagttcatgcatgcttgttaagtcacttcagtcacttcagtcatgtctgactctttatgactctatggactgtagctcaccaggctcctctgtccatgggattctccaggcaagaatactagagtgggttaccatgccctcctccaggggatcttccccacccagggatcaaacccacatctcttatgtctcctgcattggtaggcagattctttaccactagcaccacctgggaagcccatcatttactgtttttccaaaactaataattaagcaattctaacaatccaatacatacattaaattgttaagatcctgatacaagaagctttctcacttcaggctttgacaaaaatttattatctgtttgacttacagaagtcaatatttaaaaccatctggttttataaaaatcctccttttctatttgattatcaagagagaaaactcaaagtctaatatagtcagaaaaggctttcacagttcttcaggagcaagcctgtttttctcacaaaggtctgatccaccaagctaagaagctgggcaggcacagcagtaccacgtcatcaaaaggaagtgggttacacaggacaagccgagcaggtaccgaagacacaagtaagttacatggagaagtggtccacgtgcccatggtgcccactcctgctcccccaccttctgccccactgccttcttctcacaggtgagaatccataaggaagtgagttttccaagggtcatgttgctgggtagggtcacccaattcccagtctgaaagttctccattctacctggactctaaagagcaaaacaatatttaataagctgaccttgaacccagataatatcagtgggcacattcacaagacgagcacaaggttttatccagctctgcaccggcagaattctgaattctctctgattttccattttaacactgggcagtactttgagtcgtgagtggctttaaattattcagttgcaaataatacatattaaaagtaagtttttatgcatcgctctttgtgttctgggcataaacacctgtcagtgacttggttgtatacaggctgttacgggatgagtgggtcatatgttaccgctccagtaccactgctgggcaccagacagtgatgggaggtggatgccattgagggaagctgagaagcaagtgtctgtggttaaatattgatatgttttgcatagtccttgtcaattaagtgctccttgatagccagctagagatctgtttacaacccagtctcctgagcactgattatattttagtcattccaatgttgaaatactcagtctcaagtgaagaaagaaagaagcatctggttatatttgctttctgtaacacatcagaataggtcccttagaaaaataaatagttgtaaacaaaagtagttgaaaagaagtagatacatatgaactctttaaacaaaaggatcaaaagtggtggtcatgatattaaggggttcagaactaaaatatgcaagcatacaactccacgttgacaaagcaaacaatccgattaaaaaatgagctgagaacctgaatcgatgtttttccaaagaagctttaaaaatggccaagaaacacatgaaaagacagtcagcatcgttagtcatcagggaaatataaataaaaaccatgagatatcacctcacacctgtcagaatgacaagtatcaaaaagataacaagtgttggtgagaatgtggagaaaagggaatcctagcacactgtacactgtgaactgattcagcaactgtggaaaacagtatggaggttcttttcttttttttttttaattttattttatttttaaactttacataattgtattagttttgccaaatatcaaaatgaatcggccacaggtatacatgtgtttcccatcatgaaccctccctccctcctccctccccatacatgtaaaatatcatgtaagaaacgagttgccagtccaggttcgatgcacgatactggatacttggggctagtgtactgggacgacgcagagggatggtatggggaggttatgtaaagtttaaaaataaaattaaattaaaaacaaaaaagatgtactaatagaaaatcaaaaaataaaaaaaataaaaattgaaaataaaactgtcatatgactccccttctgagtatttttccaaagaaaataaaaacaattagaaaagctacatgcacctgtatgttcgctgcagcattactcacgattgccaggttgtgggagcaacctcaatgcccactgatagatgaatggctagagaaatcatagtgcgtatctgtgtaaaatggaacgttattcagacacaaaaaggcatgaagtctcatcacttttgacagcatgaacggacatagagggtattatggtaagttaaataagtcaaattctgtgtaatcacttacatgtggctgctttcgttcagtagctcagtcgtattcaactctttctgacccacatggactgcggcatcccaggcctccctgtccatctccatcttccagagtttgttcagactcatgtccattgagttgatgatgccattcaaccatctcatcctccgccaccctctttccctcctgccctctatctttcccagcatcaaggtcttttccaatgagtcagctcttcacatcaggtgaccaaaggattgcagtgtcagcttcagcatcagtccttccagtgaatattcagtgttgatttcctttaggatggactgatttgatgtttttgctgtccaaaggattctcaagaatcttctccagcaccattgttcaaaagcatcaattctttggtgctcagccttctttatggtccaacttatatatgaaatctaaaccaaaacaaatgaaaaaataaacagaaacagactcaccgatattgagaacgaataggttgttgccagaggggaggggaatgggcagataagtgaaataactgtggctttcatttataaaataaatgagtcgtggggatgacgggtacaacatgggaaacacagtcactaatattgcaataattttgtatggtcacggatggtgtttagacatggtgctcactttgtaatgtatggacatatggactcactgtgctatacacctggagctagtataatgctgcaggtcaatgttacttcgctataagtagataagtaaataaataaataactgaatagtcgttcaggctactatgagaaatgtgccataaactgggtggcttatgaacagcagacacttttcagttctggcggctgggaagtccagggtcctggtagctttgatgtctggtgagacctttttcctcatttatagacagcactgtttagctatgtcctcacatgagaaggcaatggcaccccactccagtactcttgcctggaaaatcccatggatggaggagccggtaggctgcagtccaggggtcgctaagagtggaca

SEQ ID NO: 32501 - DNA, 3164 bp, Bovine  19866880821830
  misc_feature (1)..(1): n is a, c, g, or t
nccttcctgtctatggcccctctgtcttctcaggagcttgttccctcgcagcatgaaatacaagaaagtcgcttattgctcctgagcttgaatgtgaaaagtcagagtgttcaagtgtgcgtgtgtgtgtgaatgtataaatacacagattatacgtaaatgcgttatctctaagttgtaattaaaggcaccctgaggtgggagggaagagaagttagaatagcattttcgcctccagggcgacgcgctgcgttctgcatggatgctcttttgataaagctggtcctcccagagaccgcctgccagcatccaaggatgagcgccttccaaggacgccagcagcacgtgtgtctctccctcccccaaaagcttgcctgccgctggattactgcatccgtttgataccaaatccatgatgttccctatctctcctttcaccgcggacttcagaaatccccgcctctgtgagtgttctttacaaagagggcggtaatcgggatcactgctgggctctaacctgcttttcatattttccctctcacccaggggcggatctgtaggaaagctggcaagtcgaaaaagtccttcagtcgcaaggaagccgaggccacctttaagagtttggtgaagactcatgaaaagtacggctgggtcaccccgcccgtgtctgacggctgatgttcgcgccgtgcactagacgcttaagctgcctctccacacacacacacacctgacatctcctctccacgctgagcacccttcatcctttttataactccagccttcggaacggaatcctgaatgccaaggagacgcctaagttatttatgatcagatgtgtttacagagagaaggacggggagccaacgctgttcgggattaggtttcgatgataaatgaatgatcatctctaggtcactttagatcacacgtcgagatggtgacgttcccctgcccgcctgccctccccgcccccaccccatcattgggcctctagcttctcctcctgacagcagctccacagagcagccaggaagctcagctcccctcgctggacccattgacacgcccctaggaacgccgtgccccgtccagtccccgtacgctgtgcccctgtctccttctctccccagcaggtcaacatcgtaacttgaagacacatctttctgtggccccgtgtcatgacatgtagacctcgtttgtgctctatgaccgctggttcatgagaacaaaaaaaatttaatatggccaagttctcgggatggaaaacagcaaccgccctcttggctagaccgtgctcccaaggccgatgccgacgcatgtgcggtccgcagctcagcccacgcccgtgggtgaaggcggggtgctgtggccacaaccgggcagctgggtgcagacgccggggtggggggcgctcaggtcgggttgcggacggggtctcttccgacatcctcagacgctcctacgacgttcgtgttcctgtctcctctctgctggtcgacccaccgccgaaagcaaaagacagtgtgccatccgctgaagccacctgacccgtgtcctgtgtgcgcgtggcggggaatgccagaactgccttcggaggcctggtgacggtaggacaatttgcatggcccagtagtcactcgtgtgtccccgaggccgcgatgcgtgagcaccctcgctcggatataaactcctgttacttaatctccccacaatttcagttttctcttctgttaagttacttagacctttccaagaagttccatgaaatgaggaaaccactgtttcttataatatgcggaaaagaggtaaaatgttcattccaagtggaaaaatcttattggacacattttaaataaaatcacgcatacctgaatctggtcgttgtgggctcttcttccactgaaagtatttgttttcgggctttccaggtggcgctagtggtaaggaatccacctgccaatgcaggagacgccagaggcacaggttcgattcctgggttcatagttaagatactgcacgtgccaggaaggcattcctgccataagttgcaggaaaggagtctcaggaaccaatggtcttttcaaaaatccagtggattggaacggtccccagaagcagccagaaagacaataggacactggctggaaggactgatgggttatttggccgaacccggatgctgccagtcccagtttagcatcgtgaaggaagaggaagcgtctctgctcactatattagatccttcaggcagtttcgggtacttggcgtcccacacacctgtcccaggaggtcagagctctcagacaccaaaccttaacgccgagggccagctcccccagtagggtttggccttacccgaatccactctttattgctactttaattattttaaccatgttcttatggccccggatacacatgcagttctgtgcagctaagatgcttgacttcttgttcaagttccctctgagtaaatgtagtcatgaaattcgatgacaatgaacttaaggtatccgttcacctgatcctccacggcagaattctccgtcctggaaacgtgacatccagcctccggtccctgggcccctgggctccagtctataatggaatcacacgtgggagagtgagggcctaggacagaagcactggtcagggagagcacctcggtttctttctttccagaagtcctctcttccaattgtaaaataaaagtaactttctactaggaacgtaggtacatatttgacccaaacctgggtcacttgagtgctgctcattaactgatggaacagcttggccacgggttggttcaggggcggccaggtggtgggcaaggtgactgccaacggcaaaggggagggagaccattggcttggctccattccaacctgtacctcctaaacttcctgtgcgtggtgtttccattaggtttgttagaaacccggaagtgatagaagaaatacctctttgtttaaaaaaaaatgctagtcttcacttaaattgggaagacttttttattttaaaaagcagcagggaataatttaaaactcaactattgctttgactcttagaagcaagaattcccctttctgggggcttggagggaaacatgacagagttggccaaacagcagaggccgaggggggatggttccgtgatga

SEQ ID NO: 32502 - DNA, 832 bp, Bovine  19866881053208
  misc_feature (1)..(1): n is a, c, g, or t
nttctatggggctgagaaagtctagcttacatctggatttcatttgaaacatagagtaatttagcccaggagcccgtggactgcagggcccctgggagtggccctccacgtggcaatgaagggcagtccccaaaccctgacagccacctcatctcaggatggtactgagtggcttgggcctcattaactccctcctgaagtaggcatacgacaatgaaaatgctgcaatttagagcagcttcatacaaacatttatttagaacaaggagataatgagtgattattttcacttctagagcatcgcagatgttgttcatcaaagtgtgtcagtcagaaacaattctttcatatgtatgagctcatctttaagaattcccaggggattcatctgagcctaactgaaaaactgcttcaaaacccaattctaaaattgaaggaagccaccaagggggaaatgtacaggctgggatgagaacccctcactgagacacttcaattgaatcttgggttaataaacagggtctttctatttaagtaccttacaatcgatagaatgtttttctaattgattttttgccctgggtttgcttttttgtaaaatgtgaatcaagtaaaataacctccacatattaaaaactgaaaagcttggcataacttgcattgcaggtcagactcctagccagcatccggtcatcaatacacagagaagtagcagaaagactggtgttcaaatcctggctctaatatttggtaactgtgactgcgggtaaatcatctaagctgtcctgagggttggtttcctcctctgacacatgcggtattatgctgtaaa

SEQ ID NO: 32503 - DNA, 1052 bp, Bovine  19866881082677
  misc_feature (1)..(1): n is a, c, g, or t
nctggagtttggaatagggcatcgtcaactaaaaaatacagttgcaacctgaacgttaagagttattttatttggtgggaatatttaggactccaagcccaggagacagcatctcagcagctctgagaaaactgcttcaaggaggcaagaagagaagtcaggctatatccaagtttgcaagaaagggagcaagcagtctgaatatcaaagattagatatcgaattaaggaatttagcattctatgtatgggaagatgcaagcctctaggctcactgaattcattcctttcacattcacctcagctatctggggccaaacctgtttccttgttccacttcaggggtggcagataactgctcttgcattcccccaggccctcagcagtcacagtggggtggggtggcaccatcagctggatcacagtttggggagccctcgttcacatctggaggccagaaattgctgatggatgtgacatttcttgtttatggatgtggcaggggacattttattttcacagcatgaaactttttctcatcaggtctcaaacctggagctctctgtgatataactcaagagcccttcacgtcaaggctgaagggaagccgttcctttggcctgtacttcagaccttccaaaccttccagagaagctcttagaagctcagggagaatccattcagcctgagctcttctctaaggagactgtctgttttctcagtcgctggaaaatgaactagggaccaccagggagatggacccctgcaacttgcaaactcagagacaaaggcagctttgaaccctccctctttcactgttaggacttttttctgccctgaggcagctgggatttggctctgcacctggattagctagacgtggaacgttaccgtcagtgctcatgggagatttgttcttctctttaaaacctcattttcctctttggtttgaaaatagagtcgaacctcataaacctagcttcatttcaggattccatggagcctactcaattgtcagttgtcaagcctggtttgcatgctgcagagatggca

SEQ ID NO: 32504 - DNA, 1609 bp, Bovine  19866881211367
  misc_feature (1)..(1): n is a, c, g, or t
ngaagggaccccagggagaagagggcagatgtgcagagcagtgtttacaatgtgtccgggacagtgtggtccacagctaggctgtctgtgttggggctcagctgaggactgcaaggtggcagcctgtcctcctccagcgagaactttgctatcttatcaggatcagtgaaccactcaggatgcagagctcggtgtcactaacaggtcactgcaacctaaatgtccatcgacagaagaatggacaagaagatgtggtacatgtgcacaatggaatactactcagtcgtgaacagtaatgaacgagtgccattcactgtgacgtggatggatctagagactcatcctgagtgaagtacgaaaaagacaaatgtcatataatatcacttatgtggggaatctagagagagcatacaaatacacttatttgcaaagcagaaatagggtcacagatgtagagaacagaagaatggataccaaggtgggggagtgggtagcaggatgaacttggatattgggactgacacatacacactgctgagtatgcaataggtgactaatgagaacctactcagtgctctctggtgacctaaatgggaagggaatctttgaaaaagaggggatatatgtgtatacataactgattcgctttgctgtactgcagaaactaactcaacattgtagatcagctatattcgaataaaaaatttttaaaaactcctaaaaatgtcactgcaaattgcttttccaggccgaatacaagcaacctttagcatctacaattttgaattatctgtgcctctcttcaccagcattagcagagataattgaaaattggcaacacttaaattcatgtaaaaaaaaaaacagctcagaaagcttgttaatgtcttaagaccacaagggtgccatttattccttcccagaggagtcctcaaggctcctgcaacccaaggaggatctctggtctcccagatgacccaagcgatgtcagtcatcttgtactggacgtctgctcatgacccaggccccttctgtggtaaggagatatcttccctgtataagggcctctgggactcattggcgtgaccagcagcatcaactcagtcctagaagctccagcggccaccagcgctggtggccaggggtgaaaggagccctcgccaaagtgtggcaaacctccctatgattccagtacagctcagcttggaagatggcggtagtggtaaagaacctgcctgccaacgcaggagacagaagagacgtcagttcaatccctgggtcaggaagatccccaggagtaggaaacggcactgtcctccagtattcttgcctggagaatcccacgaacagaggagcctggtgggctacagtccatggggctgcagagtttggcatgactgaagcaactttgcatgcatgcagcttggtagagagtcaggctggctcagcgtggattgaaagaaaagcgttttgactttcctgcctaataaagattcgtcatgtgttaagactcttaatcactgaagctaagaaccactattaattagagctgataaaagcataagaaatatttaatcctcttgttactgggagctggggattttcacag

SEQ ID NO: 32505 - DNA, 1238 bp, Bovine  19866881228368
  misc_feature (1)..(1): n is a, c, g, or t
nattataatatgtaaatatatgtacactgtataattacatataatatttatcatgtactgtacattattggaaaaggaaatggcaacccactccagtgttcttgcctggagaatcccagggacgggggagcctggtgggctgccatctacgactgaagcgacttagcggtacattatatataatatatataaacataatttaaaagctttttaagtaggccccccaatacaacagactgttgagcaaaatgagaaaacttacaagagttaaaaaattaacactcccagaaatgaattgctgccttctgagaaaggtatgcgccattttagagaataatcaagcattctacttgcacgtcaaaaggagactaaatgagacattaaattaacagcaattaaaaaaaagatagttttctaacaaggttttgttcccctgagaaccataggagacgtcagcattccttaagatgacaaatcgtttttccgttaattagcatctctgcaaactgccccaaacagatggctataaagccagctgcatatagtattttttttgtaaaaacaaataaaggaaagaaaatcaacagcagcaagcctagagcttattaaattgtattgaattctatttccagttcaattgataatttattctctaaccccaacataaccacacaacacagcatcagaaaggaacatcatcagtaaatgggcttactggcatctaaggctcaatggtgaatcctcagttttgaaagcagtcatgtcaatgctcagtattttgcttcctgacttttttaccttgatcctccagaaataggcccaagacatatgcatgtggctggtggctcagagggtaaagaatctgcctgcagtgcaggcaacctcggtttgatccctggatcaggaagatcccctggagaagggaatggctacctactccagtattctcgcctggagaatccagcggacagaggagcctggtgggctagagtctgtggagtctcaaaagagtcagacataacttgatgactaaacaacaacaacaatgtattacacattatcaactgatattgatatttgttttattatattatatataaatatatttattttcagttgtatttcaatgcaaaactctcatgcacttactatttcaaaaatgcctgctgcgatatttgattattgctttgcttcagtcttaaatgatggattattcatctcatacctccttcaaagtg

SEQ ID NO: 32506 - DNA, 899 bp, Bovine  19866881270457
  misc_feature (1)..(1): n is a, c, g, or t
nctgcttgctaccagcagctaggagacactgagaaccttacttgctgtaaagttcaggtccaaaagttcagccaagggcacagcacagcccatgcaggaaacgcccgagacgcatctcccaggaaactcaccagcgctccaggtgcatggcctggagcttctcggggtccttcggggggaacatggtcggccggatctgggtgtgtctgttgtgggggacatcgtcccaggatgtgaaccactgcccatctttcgtcatcacctgcagggccagagggttgggactcaacgaccagcccatctgagagcagggaaagccagaagagggggtggggaagctctcaagagatggcacgtctcatttctccctaaagagaggaggacggtttgcaaggaaagaaatgacaccatcttttattccatgaaccaggacactcattctatgaggtggcattttcattttccaagcgggttattttttctctctttcttttataaaacaagactcagaccgttcctgggctaacactgagaagtgaattgcttcctactggaaacaaagcttggaatcccagccaattaaaagggaagaaagcaaagctatacttgtacataaacaaagctgactcgtgattacagaataaaggtaggagaacttccactgccagaaatacttgtataaacgtaccgtttgtcattaaacataattctgaaactgattctaagttgcataatcaaatgaaccatttattcaagttaccctagagtggatgctttaaaattctcacgactctaagacgcctagtaagttgacccgcccttttgagccagagtcctggcgggagactaccttccactgcgagagcccaggcacccactttcagtcctggcaactctga

SEQ ID NO: 32507 - DNA, 1114 bp, Bovine  19866881490253
  misc_feature (1)..(1): n is a, c, g, or t
ntaggctcacactgcctctctcttcaaaccagctgtgacagattcactacccacgtgcagcttcactttagactatgatttgctttctcgtggggacgctgggcttcccggcctcctgacggtacctgcaagggacatcacagaggatgcggtcgtagaagaggatctccttcctgccgttgacgtccacctgcaggcgcgggatgcaggacgcgtcgtggttgaccaccatgatgcaggggctgcccagccgcttggcctggtgcaccagcaggtagcaccgcctgttgtccacgtcgttggcgatgacaaagccctctgtgagcgcaaaggcggcgtcgggttaaaggcagcggacagggggccacgctcgcccccaggctggcaggtgggaccagcaacccagccttagacttgccggaactggggccgcgatccgggagaaggaagtgggcggcttggcaggggtttcaagtcccttaaaatgtcaaatcttcaaaattcatcttgccaacagttcctcactttggacggcttattctgcccaaactagcttttctaccattgactattaacaaaaaaagggagagtgaggagagaaagacgtggaaactaagagagtctcctgacaagtgtttaaaataggccacacgtgctggggctccactatagaccctgagagtcagctcccagagtgaggtggggactgaggctcctgagggtccacttgccgaggaggctcggacctttgccatcgacctaatgtcctccaagttcaagacggaagcctcgtttcctatgtggagcctggaaacgtcacataactcacctaccagacgctggtgggatttgaacctggggagtctgacagtggctctaaactacatcctcccgcctctcacacaggtactaaccatcagaagagaaccaaaaccccaatgtgagacggggactcccgaaaattcaaactgacatcaacctattggggccccccttgaggtctggtggttaagactctgcctcgccatgcagggaacgtgggtccaaaccctggtgggagacctgagatcccacacgctgggggtcaactcctgggccgagcaccaaggcgagg

SEQ ID NO: 32508 - DNA, 1049 bp, Bovine  19866881170492
  misc_feature (1)..(1): n is a, c, g, or t
natatatgttgatggagaggtgtcattcactggttttccagtgcttcagtatctccagggtgtttagtaaatatctttgtcacctacctagtgttaccttggcctgtgtatcattagccaaggagatgttcccatttctttaggcatctttctccagctcatttgtttggataaatgcctttcctgtatgctccctctgctacaacttccatagctttgtcacatgttgccatatttgcctatttattcacctgtcttccttggtaattactatgatttctttgttctttgtaccctattcaccattttatctctggcacatgagacaatatctggcctattgctgatatcaattatttgctggataaatgaaataagtctaattaagacaacaatatcccactggaaatattgtcaagtgaatgatagttgtctgtttcatgatttataaaattgtataaaagcttaatgtggaagataatttctagctaggaggaagtagaagacattaaagtcaactgtttgagagcaccatggtcaaactcagaaatattccagttttgtgtggtgtcagtcctgatctcagtagatatttcacattaaaactctctatttggcacacttatgcattaaaatgttgttttccactctggctttgtcattaaaatattgaatttcctttgtaacatttcaaaaaaaattaaaagattaaactcaagttgcatctagtgtaattatattacaaagactggtatgaagtaaatttcagagcactagcccaagagagtcatcagacaataaaatttgatggttatagttacaatcaatcaaaagtaataaaagtgatttcttactgaatagtaaaatttatgctttcatttatctttatggtgcacctaaaaatgaccatgaaataaactaatccattctactttatggaataaactaaatttatttcacacaccatcactagtgatcccactttaatagatttataaattgccaaataacattcttgactgtgtattcagaaataaatttaccaccta

SEQ ID NO: 32509 - DNA, 1807 bp, Bovine  19866881517064
  misc_feature (1)..(1): n is a, c, g, or t
naaaggaaaggaacacagttttctctacatgttttattaggaccccaaaaggaatattgaaagaaataacatcatttcttaaaaatgaaatgtgtgctcttgctacaaacagtcacttagataatgtgaatatttgcttatctttggctcaaaatgtttatttcacacatgtgtgtttacttctaaagtgaaaaaaaacaaaaaaaaacatatcgtagctattgttagcattgtaatattgaatgcaccagtgcctccctttgtagaatactgaattggctatcattagtgtcagatgttatatacattgcaataacactgtctatgtaattgtgataaattttccacttctgatttgtcagtttaacccataaaaataaatttatgacttcctgaaaatgactgatgcttttcatctattaagtaatgtctgctggtacagtgcaagttttttttgttgttttttgttgttgttgttttaatgagttcttgaattctgttgaagtctgcatgtcctaatcctttgtaaacagtaaacaggtgtgacaatttacagcaatccagtgagaagctctctaatcactccatcttaggattttaaaatgtgttttatggggaaaagctataaatctatttttatatacagtaacatttttgagcacattacttcggtttttagctagtgaaaaatcttgaaaatgaaaatctagaaagtgaaacttacccagattatttacctttaatctatagataattttgttatcatattttgtctttcatgctcaataatattacagtttcagatactgcctctaaatcccaatgtaagaatttgctaaagtattgttacaaacattgcttttaatagatacggtcatgcttgatcttttttagtatgctgattttatttcaattatcaaaaattccactttatgcacagtcttcattatgcccaggctaacagttctatgcacttcatgcttgccagattccagagcagttttagaaatgctctgtgattgattaaaaacaaatatttgcaaataataaattttgataccaaattatgcatccattcagtggaattcttcatcaagctaaagaggaactttaaaaagagtatgagacaataaattaaaatgcacattttaatgagctatcaactgggtaattttggaaagaaagtattttctatcacttctacatcaaatttgactccagcagtgtctgtctctgtccctgtttataaccaactctcatggctatagttgacatcctagatatactacagcttaggtcttttagggagcacttttcatagactttatcctgttttctaacagaatagaaatagcatgcattaaggcacatgagcccaccatttgttgctcagggactgaggtttcacttcaggtgcatgattgccaggaactgaagcttttttaaatctaccacatctacttggaaagcaacagctcctacatgagtgcaatcttaatattttcccccggaaaacaatgtctcttaattcattattttttaataggcgttatacttgtaaaatgaagaatttcttttgtgatggtgaggactacagaacaaacatcaccctttgccttctgaaatcatatgaccaggtcaataatgtgctataattatttattattttctgagctaaggacacaatacttgaataaattaaattattttaccaagagatgataatacagaggtgtgtgtgtgtgttttgggtgtgagcatgaactaaatgttataaatctaaattttaggtgagataaaacagtaa

SEQ ID NO: 32510 - DNA, 1700 bp, Bovine  19866880608107
  misc_feature (1)..(1): n is a, c, g, or t
ngatctgtctctaagcctgcttaactacttctatttggatgtctaatatgcattttagacttaacatgtccaaaattgtattgcttggccctttttattatatcccacatctaatcttcaaatagatctagacattgacttatttattcctctgctgctctcacctttgttcaagccactacaatctctcatgtgcattattaaaataactagttttcctctgtcctcttttcaaaatctgttctcaatacaacagtcagaaagagctttatttttaaaacataagtcagatcatggtctttgctcagaaatgtcatatcatactcagagtaaaagccaaagttctttcaatagcctaaagcattatataatctgtccacccaaattctctatcctgttaaatacaggccttttctactttatacccttcttttgctcattgtcctctacccacactggcctccttgctgcttcccagatacactaagcacatttccacctctgggcctttatactttttgttctttttatcaagaatgttatcctcatgatagccacagtttcactattcatcagctcttcaaatgtcatttcagtatgggtcactctacataaaatttcaagtcttttcaacactctctaatactcttgttttatttcttcttagcaattatccttaactaatatactatgtgtttatatattttatttatattttccctgtaaaatgtaagctctggaagaagggaagtcttatttttgttatatccccagtatctagaactgtacttaagtcttagcgtggtacatatgtgctgagtcatgtctgattctttatgaccttcctcttcccaacccagggatcttcccaacccagggatcaaatccatgtctcctgcttctcctgcgttgcaggtggattctttaccactgaaccagatactcaataaatatttgccaaatgaatgctgaataaatgaagtattttaggaagtcgtatcaggagaatcttttttcttgcataaagccatctgtcaattttatcaacagataaatcaaagctgcttcagactgtgaaacaaataaaatgacctcaagatttgaaaaataaataatactaacaaagttatgattagctgctcaggcgacctcaaagaaacaatgagaagtatttatgtgaatccaaaatattttaatagtaaagaataaacagtatatctcagcaacgtgttcctagtgttcaatggacagttttataagtgcgaaaacttagccaaaatagttttcatcaattcaagaaaaggtaaaaccaaaacagtcatctaattatctgaacagaattacacatttttaagtaacaatgtggttatttcccatttaggctgatacattaaaatataaagaaacaaattattttacaaatcaaaagtcttaatttcagaatatgtttggctctttagaaaataagaattaaaaacttaactataaattttatgttataggctccttaatcacactgattttctgaaattaaacaaacagcttttctgcttcctttagtttttgtttcctattcatcttagcaattacagcccaacggtcctcctgcgttttcctcatagtttcagacttctgcatagatccaggagtcgttagagatgaaggagtctggatagaaaataaagtcataatatgtttaa

SEQ ID NO: 32511 - DNA, 1330 bp, Bovine  19866880709440
  misc_feature (1)..(1): n is a, c, g, or t
ntaatgaacgcatatcactcctacctaaaattgattgtccagaacttatcgtaaagccttaacaaagtgagagggaaagtataattttctcatgtgcctggcaagagataataactggatatacctgatcataaatctctatcatacttgagtaaacagctgaattatggttctaccatgaaatattactcagcaatttaaaagaatgaattggaactatatcatgttttggagatatttccatgagataatgaattgagtaaagcaaaactctgaaaagtacacattatctcatttttataaattagtggggaaccctgccatatacagaggaagaaagatggggggaaagaaagcagaaggataaaatgaggcactaagaatttgtatgattatgtttaggcactgagaaggccatggcaccccactctagtactcttgcctagaggatcccagggatgggggagcctggtgggctgccgtcacacagagtgtgacctggtgggtcacacagagtcggacatgactgaagtgacttagcagcagcagtaggttatacatatgaatatagaaactaagtcatttttatcttttccttataattttgactgtttttataggcctcaaaacactgatctgttgaaattaaatgaagttttcacttccccccagctctaaactctgatttcataacttaaataataaatcttatctatctctatttgtcatttcctatttctaacccacagttacctgctactgattaaagttcttgatgtactactacagcttgttgactattaattacactgaattcaggttgcctgaactatgaataatttatttttaacctttatatcaaccaaagcagcttcctcttttacatcattaatttacatttacttgaaatgagatattttattactgcttaagtaatcaagttaggatatttttcttaggaaaggtattagatctaatctaaaagtctataacttaaattttcagtctaagaaatattcctatctctcacctagactattttaatatcgtcaataacctcacttgtactgatttacattatctaatgatctttctaaaacaaaaatctttttcaagtaggagaataaatgatagacttggaaaccatatactttatattcattcgtaaaattttaaaatatattttaaggaataaagtcttaatttccttgcttaacctctattccatcttccataaaaaaaatgtccaagctttgcaacataatatacaacctcctatatgaagagaccatgggtctgggtatactaattactcttcatcattcatatt

SEQ ID NO: 32512 - DNA, 933 bp, Bovine  19866880806330
  misc_feature (1)..(1): n is a, c, g, or t
ntgaaagcaatttgctgaagaaaggataagcatttggaaacagtgcttcccaagagatagaagaattaggagttgcaaaatcaggtagagatgtgacaggttaaacccaaaatcaagtatctgtaatcataaacaatattgtcttctgtaagcaaaggtggctaactacagcctccaagacaaagtcagcccacaatcttctttcgcaggcccttgaattaagaatctttcctcgaatcgccagtccggttcaatgcatgatacaggatgctcagggctggtgtactgggatgacccagagggatgatacggggagggaggtgggagggggcttcaggaaggggaacacgtgtacacccgtggcagattcatgtcaatgtatggcaaaatcaatacactattgtaaagtaattagcctccaattaaaataaattaattaaatttaaaaaattaaaaaaagaatgtttcctatgtttttataagattgttaaaaatgaagaaaaaaaggaggggaaggagaaaattaacattctctatacagccacaaagcctaaaatatttactgtctagtcctttacaaaaagtttaccaacccatgatctacacattataatcaattaaaccacaatgaagcccttatcctaagaaattcattaaataaatatgattctacctgaacactaaacataggtactgaatatatatcatatatatctttctcaaaattgcagctttgtgtctcaaaggtaacaaaggcataccaaatttacaatcagctacagaatatacacatttgatctcacttaaaggtactatcaacacactcttaaataatataaatactttcaccaagacagttatcaaaatgtactataaaaattgatagagatagaaatgtggttttgctaaaaccaaatatattttagaaaatat

SEQ ID NO: 32513 - DNA, 1163 bp, Bovine  19866881071914
  misc_feature (1)..(1): n is a, c, g, or t
ncccctctcctcctgccctcaatcctttcccagcatcaaggtcttttcaaatgagtcagctctttgcatcaggtggcaaaagtactggagtttcagcttcaacatcagtccttccaatgaacacccaggactgatctcctttaggatggactggttggatctccttgcagtccaagggactctccagagtcttctccaacaccacagttcaaagccatcaattcttcagtgctcagctttctttatagtccaactctcacatccacacatgaccactgagtgactgaacaacaccaaatacaaatacaggcattatttttttctgaaacacgatcagtagctaaaaaacacatacaaatacataagcacttttaatgtatgaaatattattcaaatatttatatctaaaagcatgcatactcaaagcaatcctatatttatatgcttaatatttaaacaatagaatatgctaaatatttctgaaaaaagctaatggggaaaaattatatttttaatccatatgtaaacttatcctattattttctaatattatatctttataaaacttaggttacacctaaaatccaaaattactttatctatattgctacaaaacctactttttcttctcgttctgtttcaaggtgtttcttaacagaccaaagttcatttctgagattgcatagttcagtctcctaaagaaaaaggaacatgaaatttataagtgcatctatatagttcttaagataatgaaaatgcaaactaatattttaaaactttagttttacagaaaaatgaattcactcataaaagatatacgttttaaaagcttactgttatgaaggctgctagatgaacataaccaaagatttcatttagacaaattttaacactatatatatctctaaagaaatatttaacactatatgtatctcttcttctcatcctctcccaatctatcccactcctcctttccaaacctcaatcagagctcaaacttatttgtaattggaatttataacttttcacttgaaaaaaagagatcattctacaatttcaaaaaaaattagaaaaccatctccctataaaatctataatatctctttcagatctatgggtatttgattctatagatcaaaaattatgggttatatgaaaattgg

SEQ ID NO: 32514 - DNA, 1719 bp, Bovine  19866881600537
  misc_feature (1)..(1): n is a, c, g, or t
ntgtggtaagatttcaggttttaagaactttaattttttctacgaaaggggttagcaaaaatgttaaaatattgtctaccagaatgagcattaaattgtgcttaacttcccaacatatgttaacatattttgtcattttaatttttcagtatctttccatgacaaaatttttaattggaacttttaaagatctgttttttaaagacattaagaaaaagtaagagttggacaaagctttgttcctctttaataatttgtaaaatgctataacagtaataggtttaagatgtttagccatcaacctagccttaagttcacaaactgctttattctgattacaactatttccactagataatcttttttatatctataagcaatatatatttttttttcattcgattttctgctaaatgaaaaaaagagtttcttcaggtaagaactgtatttagtactactcccttttgaagggaacatgcaggcacaataaccgttgcttccttgagcccgaatcttgaaaagaatcctagatgtccctctagtgggggtcttatgttccacaaaatttgatgagcccttgataatgtccattttatagcaatatattggtgacagcaattctgttcatgtttttcaaatcaatcatcctatgatgataaagtaaacaatctagatttaagaagtataagacaaaccacaacgttgtaaaatttcagcagcatgaatacaaattccatttctcagagagtagtcaatttggggtcctttgttttccaaatcctaagtatttttgagtggttgtggttcagtgttctcagtttagtaaacctccctatgagatgagcaaaatgctgtagatcttctggatgataaatttttgaatatttgtacaaaatttgtaaaactggttcctgtaaattttccacatgttgcttatttttaaggcatgggcaatctgaaaaacatcatcatatatatcgtaatgaatactggaaaatggtagaagataattaagacaatacagtttaaaataataaaaatagaaaatacacactgaacctttcatatatgccagattttatgctaggtaacctccttctatgcaatgtcttatttgagcttcataatactctatgaggggcttccctggtggctcagagggtaaagcatctgcctacaatgtgggagacccgggttggatccctgggtcaggaagatcccctagagaaggaaatggcagcccgctccagtactcttgtctggaaaatcccatggactgagaagcttggtaggctacagtccatggggttgcaaagagtcggacatgactgagcgtatttcttaatgattagacagcattcattcatctagtcattgtgctggagatacagcagtgaacatagaccaagtttcctgcccttattgagcttgtattttgggtctaggaggagtaggggagaatagagacatatacacattttaaaaataaaaatatatgacaaaaattaagagtaggggataagaatttagggtagaggcacaacagctatattttaaagggtaatcagatttaatatgacacttagcagagatccaggatggtgaaggagggagccatgaagccctttagaaaggagttttcaagcagaaaatttgtcaagtacagtagaacttgtggaaggagcctacttaaaattttcagggaacatatgcatcaaa

SEQ ID NO: 32515 - DNA, 2578 bp, Bovine  19866880389915
  misc_feature (1)..(1): n is a, c, g, or t
ntgaaaagtgaaagtgaagtcgctcagtctgtccaactcttcgcgaccccatggactgcagcctaccaggctcctctgcccatcggattttccaggcaagagtactggagtggggtgccattgccttctcccattacatctcagctaggaagaaatgaaggggtgttgcaagagacacagaagtctgctttggcaaaatcacttttcctggaaatcaagagtagaaaagagcattttctccaatagataggacctgtcacatgtcagcacattcagccgcccagagagcagccctgtcagtcttcctaccactatcaccctgtggaaagggcatgtaaaacttggtcccatgacattataagtacttcctcccttcaaggccacataagccacactcacctgcccaagttgttttggggaagagtaaaatagacgagatgtgaaaatcagaaaaaataaggatctcaaagtctacttttatttaatggggctattaattattttttgattagactaaataaataaaaataaataaaattccctttattccacccaaaatgtgggcctcataaggtatcaattcagttcagtcgctcagtcgtgtctgactttttgtgaccccatgaatcacagcatgccaggcctccctgtccatcaccaactccaggagttcactcaaactcatgtccatttagtcggtgatgccatccagccatctcatcctctgtcatccccttgtcctcctgcccccaatccctcccagcatcagagtcttttccaatgagtcaacactttgcatgaggtggccaaagtactggagtttcagctttagcatcagtccttccaatgaacacacaggactgatctccatcagaatggattggttggatctccttgcagtccaagggactctcaagagtcttctccaacactacagttcaaaagcatcaattcttcagtgctcagctttcttcacagtccaactctcacatccatacatgactactggaaaaaccatagccttgactagatggacctttgggatattactcaataatcagaaaagaaatgcattttctgagcacataaatttctgtgctccctaaaagtgtgtggaggggaaactggcatctactagatcagatacagcttacaaaattgagcacattatgaaacagggcaattgaagtgaaagtagactgatgaaattaaaacaaacaaagagctatataactaaccttctgagatagttaataccaaaactggtcacaaaactttgcttcaagtttcaaagaattcttaatacctgggaaaatgtatgtaatttagacaattgattcatggttgactcctcctccatctattaatttgaagcttcattttgaaagctgtgatttcttaatctagatgtttaaaagaaatagaatatatagaccacgatttcatagtgtaaaatctactcctcaactttaaactagaaatctctggaagctgaattaacatttagaccactagggtacaatttaggaaattattgcttcaattgctcaaatgggaccccaatggaataaaaggttccactaagtctacgctttattaaattgcaccttggagttctgtactgttggatagtacacttcaggtaccacagtttggctctttgttgttgctctctgaagaactaaaggcaattacctattagcatgagcttagaagccaaacgttttttaaaccaaccttgagggagaaaaagaaggaggttaattctatttgaatgaacacaaacaccgctttccaaatgtggtccctattagataatatttaatgacactaagcataagagactaatttatacaagtttgttaacctttcatataagtaaaaatgactaaatggcagctttgggtggatgctgttttctgtttcaggtacctcaattggtgacatcaatatacttcctgaatctaagactcctcaacataacccttgaatctatacatggactctgagaacttctcactgagtattacatacttttactgtccaatatggcaggcattaaccacatacggttattcaaacttaaatttagttaaaattaagtaagatttaaaattccattcctcagtcactctagccacttcaagcattcaatagccacatgtggttaatggctaaattagtcggagagggctaaatggaaggtgacgagattagcattgtgattcagggccaaacagaaagcctgtcatgctatgacaacaggacttactttgcagaagctatggaattaataagggttttggcatatagtacatttatgccctgaaaaaaaaaaatgaaactaacttgttgtaagatggattagagaaaataaaaaggactaaatgcataggagatcatttaaggttgaaaatttataccacacaacaacttactgctgctgctgctgctgctaagtcacctcagccatgtctcactctgtgcgaccccatagacggcagtccaccaggctcccccgtccctgggattctccaggcaagaacactggagtgggttgccatttccttctccaatg

SEQ ID NO: 32516 - DNA, 950 bp, Bovine  19866880436738
  misc_feature (1)..(1): n is a, c, g, or t
nctttcagtatcctatcattttgccttttcatactgttcatggggttctcaaggcaagaatactgaagtggtttgccattcccttctccagtagaccacattctgtcaaatctctccaccatgacccacctgtcttgggttgccccacgagcatggcttagtttcattgagttagacaaggctgtggtcctagtgtgattagattaactagttttctgtgagtatggtttcagtgtgtctgccctctgatgccctatcacagcacctaccgtcttacttgggtttctcttaccttggacgtggggtattttttcacgtcttttaagttatctgcttagaaacaagaattctgtgtcttatcaaaataatttcctgtgggttatgttgtttttattatgttcgtttataagaacttaaggattgtttcatagtgatctatgattctatttattcaagtgttcaagccttttgacatttttgacaactttccaaagtcaaattctaaacgaaattgtgaactctaattgagattgatgtttcccacaggggccttgcaaaatctcagagggtttgttttttcacctagtaagaaagaaacattaaaaaataatttggtttatttgatgtcttaaattgtgacacattgtcaaataagaaatacttaactttctctagcttttatttgtgtgggtaaaaattattaatagatatttcagaagttgtgtgaagttcatagaaattttccagtacctttttatccatcatatgtcctgttataattttgtgagctataatttgagtttttttaattgaagtgtagttgatttaccaggctatgttaatttctgctgtacagcagagttattcagttagatatatatatatatatacacacacacacacacacatacacacatgtatatatatttcctgtttccccttcatgggat

SEQ ID NO: 32517 - DNA, 2406 bp, Bovine  19866880459004
  misc_feature (1)..(1): n is a, c, g, or t
ntttgaacttcggccatgtgcccttccccgcccagaagaattctgttctcttcattagtagacttgcgctacagaaacattgctctcgattgttatgtcagtattttgaatcgcatcgctaaaagttgtgtacaaaactgttttttctcctcttctataagtactggtgtaatatctttaatttggccttctgtaccgcacagcctaaaatatttactgtctgacccaaaacactggcagatccctgtactgagttttgtcttcagtctgatttctggtttgcaaaatgggtgtggagcctatttcagaggactactgtgaagaccgaggaagagagcggatgttagacttctgccaggtgctaatgtcagtagatgttagattttccggagtgagaagtcaataatcaacttctcaagggcatgtgagggttggggaccaggatggagggtggagctcagaactcacctttgagaatcaaccccaccccaggaacagcataccccagtgttgctgtccagcccctgagtcatggaccttgggcctcacaaaggccgcatcctgccagctctgcaaatccccacaatgttaatgccgctgggatataattttcctcatgaaacgcaatgaagcataactaaaaaatgtaagtaacagcttcgggcccttaatgaggctataaatacagtatgaaaataatttatacagctatttcctggtgaagagctgtccttttcttagacctctttgcttttctctttgcttgcctcattaatactagccattggctttctttgctcactcattttaagaaggaaacaaggatttgtcactttgtagtggctgctgctctgcattgcacgagagaggcaaatgggaatgtagagtgaagcgcagatgctgggcagacagctcagcttgctcactgtccaggtgactcactccattccataaatcattcctgtgggaaacttacaccccaccttccttcagggtcagtgtaaatataatatggtgtatgtgtaaatatgaaagtgaaagtgttagttgctcagtcgtgtccgactctttgcgatccagtggactgtagcctcccaggctcctctgtccttgggattctccaggcaagactactggaatgggttgccattcccttcttcaggggatcttcccaacccaggggatcgaacccaggtgtcatgcaatgcaggcagattctttacagtctgagccacaagggaagcctcatgaaatctgtgtaaaaatgagatctatgaatgccaagggtgtcatccctgggccgaacccatgagtcattttatagcttctcccctatgtccctgggctgtatcttctttgaacaggtagatatgcagagattggggttcttagaatgagctctcagggcgggcaggttgctgtgcagagccttgacacagctggagacctggtccagcttctgcacgtggaggcagaggcccatcctcacaccaggcttggacgtccacgtgtgaatcctcccaccctgctgacagctaggatgctccccagacagctctagcgggaagcagttggtttgatgagaaccaaatggctctgggcagtgctcgaggcagatgtgtctggttccatccgacaccagtgccaccacgaggagtggtctggggtcgaaaggacctgcagggatttttcagggctgctgagaaactaatcatggtggacctgctcacttggtgctttacacgtgcccatgcatgagatgttcatgtgtatttgaaagagcaagtcaacgggaaagcagatggttgtcttcagtggccttgtaacatgatgtgtgttggcaccagggaatgggaagaggtgtgttcattctccagggaggttttaggggaaagccgagttgagatctgcaggtgggaacactaagtttgtgtgtgtctgtacatatacctgtatatgtcttgttttgttcttcacggagcctgcagacccgatggtcaggaagcaaaagctaaaaccgaaggtgattggacagatatctgaaagtagggcctgttgatagtttgcagatgccaagtctgtaagacatcacgataaggggtgaccttagagggggaagatcaacagagggagggaggagcatatggagggctccaaccggtgcaggcgaattctcgtttctcagctgaaaaagtcagcactgctcactgcctgttccagaaggcacagaatgcagcagctgtcttgagtttttgcagcaccccctcatcaaataaaaatttgtgggtgccagaaattttggaagaaacagcagcagcagcttcttcttttgcccagtgggggaggactttgggtgtgttttttttgttgttttcttggtgcagatggtgtagttattttaagtaa

SEQ ID NO: 32518 - DNA, 1213 bp, Bovine  19866880527051
  misc_feature (1)..(1): n is a, c, g, or t
ncttataaatatgataggcagattaagtattattgttgtcgagattatcagacatcagattacttttttttttttgattgcttacttttaaatgtattacctttgacttgctggtcatcagttaaatataggaaggcagatggcagaaacagatactttataaacattgagcattcttattatgtagctgagaaagagattgaaatgctttcaaccaggcttgccatccaacatgaagattcctttttgagagttgccttaactcgacaaagcccatcagtcaagatggtggtatttatccatagttaagaaaaaactagttgttgtagaaacagtaagcctggattgagtaagctgtgggaaatagtaaaggacaaggaagcctggtgctgcagtccgtaggctgcaaagagtggacgtgagtcagtgactaaacagcagcagcaaaagtgtcttagagatcagatttcagtctaaaaagctttagagatctccagaaattccattcctcaccatcaatgaatacaatcctgttccctctcagagaatgaatatataaatgccccatcagtgactataaaatgggtaaaggacaaggtagctttctttataacttacttattatcagactgttcgtgtccataagggtttcaccattttataaatctgtcctatttagaggtaaagcagttcaggttttgtgttgactgttctgtgattttatgtgtaaaaatcatatccctgttaaaaaaacttagcttgcgaggataaggactttacatattttgtatcattccaatgttctatggataggtagacttacacgtgctgttcaatttaaaagttgagatacaggaaatccattccctttctgcaagtatgcgttgaatttactacacataaggtgctgtgttagactccaacaactatgcaagtttgtgcgtttttcttttaccctggagaaacaaatgacaggaatgtggaatgtggtggatactgagtctgaaagaactgttcccatggcagtgggctttttaggaaggaaaccattattgctgaaaatccaaccttctttgcaaatatatgagggatgtgaagaatttcagcaaaggaatggcagagttatcctccttggtgcacaatattgtcagtcggatcttaaatagctcagaaagcagaattgattttgatttcacatttgaagtgatgtttg

SEQ ID NO: 32519 - DNA, 1372 bp, Bovine  19866880536209
  misc_feature (1)..(1): n is a, c, g, or t
ntcaacaagcacagcagggttctctctgtgcacggaactgtgaggtgctcaggactagcagtgacacatggacgtgagagcaaggccacagccacgtggcgaaacacaggcagggaggacagccatgatcgcctggaaccctaactaaaatccggcagtctcgaagtcctcaacaatttccccatcacaacatgctcctgtgactttgcgacctttgccaaattacttaaccactccattctgtgcctcactttgctcatctataaaatggggagagataatcactcttcctccttttgggttgtcatgaggattaaataatttaaaatataaagtggttagaatagcactgggtacctacctagtcggcgttacataagtccggctacatcacattacttctgttattactatgattaagaataagcacatatcatcaaagcacaggttcccccatgcatgcacacacacacagacacacacacacacatttttcccttcttttgcacaaaaactagtgactgagtcacattttccaaagagagaaactggatttggcaacagagcccttaatgcagccttctttattttctgtcttcagcactcctttataaataggtttgccaaattgaagcttaatagcttaatattgggttcatattaatctcaccctgtctgaacttcaaagggacaaattgttctgactgctaatgaaacggatttcagttgcaagtttctaagagaccagaggcagaaaaagtaccagctgatctaaaaagacagacatctctttggtgctcttttaaagccatatgggcttacagagttgccaccggaagccgggaagaaacccaacagccttagccagggcggggcgggggggggggtgggtacacaaggcccctcagacactagatggcactagaacatactcgaagcctggccgccttcagctgtccacacaccccaccctgctctgcagctaggttcactgaggcaagatgtgggacagacacttcaaattggcatcaactatctgaatgttagcagcagtcaaagaagtaatattgtgtttgcttttagctccctggacaaactatatccaggcactgttttctgggatttcaaaaggcaaatcatcacaaccgtgtgagtatacttcccactggactctatatttaaaaatggttaaggtggtaaattttatgttaggtacgcgtggcatggcgtgcatgactctttgcgaccccatggactgtagccgaccaggctcttctgtccatgggatgttaaggtatgttttaccaaaatttaaaaaaaaagaactagaaaaaaaaaaaagcaaatcatccccaataacaggaagagcatg

SEQ ID NO: 32520 - DNA, 1376 bp, Bovine  19866880575323
  misc_feature (1)..(1): n is a, c, g, or t
ncagacgtttcccctgtaaatttaggatactatcatatattcgtcatccaagaaattaaaaagctgaaagcagagtctgccaggaagcctctactactacctccctgtgatcttatttagtcctgggctgtcttcaaagcaaaatttgactgacatgcaattcttcagtctaggacagcattgtaccaattgtgctctatggaaaattatatccttaagctgttaatagtattccatgaaaagaaatgaaattattgaatgtttctttcctgcagtccacccccaagttcttaacatacagatgcatgttgcaatattgtatgctatatttccaaagattgtttgagtgaggaacctttctccagcaacactagcaacatcttgtggcttactcttcctcagagaagagtttgagaaatgtcctaagttagacttcactgatgaaagtcatgcagaaacacccaaactctggtaatatgagtaccatacttagaagaggtggaacagacattgagtgatgtcaaatcagaactgccccagttaacgccagagagtgaacagagaattctctgtgcaccgtggccatccacactctggcttggcttaccatgaccgagttgctagggatagctgtccaagtggacagggtatccggctcctgtttactttctcctactgcagaattctccttatttcccacgtccagcagaaaacctccctacagttggtggtttggatgagaatatttatcttccccaaacagctctgcaacttcccctccctaaattgggaggtcgagatgactcagggtagggaagaacttacagtgagaaagaaaacactgttatttgtggttatttctacttctgacaagttgcgtgaccttgggaaaggaatcaaccattcatttaagcctgaatttcttcatctgtacaatggggataataatagcacccatgtcacagagtttgttgtctgaggagtgaggtactgcttgcaaagcacctaacacagtgacagcacatcgtgtgtctgcaattaatattcatgtcacttgtaactgttgctagtgcagattccacgtgtgtgtaagagacagagagagagagagagagaaagcaaaagaatgaagagagggaagtgggaggcatatgatgcaatgtttaaggtataatgggaattccatcttgcagaggaagatttagattaaaatggcaaatgaataaatttcctactaattatctctttcacttaaagagacaatttatcaatgtgatactaggcagagtcctggaaaccaaaattactggttgaagtgaagtgaagtgagagttgttcagtcaagtctaactctttgtgaccccatggattgtagt

SEQ ID NO: 32521 - DNA, 4362 bp, Bovine  19866880579986
  misc_feature (1)..(1): n is a, c, g, or t
ngaccctggaggccactgtcagggagccgatctgatcatcggacccatctgagccctgtgatcaaagtctgggagatcatgagccattggaaacaaaacagtcttaggggaaaaggagttgtttaaaaaaaaaaaagaccaggactccctcctgaatctacaataggcatttattgaaacttcatgaccatattcatccactaggtaggttctaaagatgcagagatgaaagccaggctccatcctccaggctggaaaggcacaagggtatactaacaattttaatgccccacattaagaggaagtccagactcctgtggagtagtgggaggagaagagggcccatgaggctcttccacagctctcatgccggccccctgacagcacaccgtctttcatacctgatttctacctggaatgcccttcgacccatggggtctcccgggaaatcccaacacacctgttagcatacaacttctttgttactctacctcagaagtgttccctgacttcctcaaggagaaatgggcagtcaccctgttgtgtggctatggtactactggggtgatactaaaaacactttacaactggaacaagcgggcagcaaattggaaaagacacagccataggcaaggggtaccacatccacccaggtgccacggatagtcctcagagaccacctgctccgctgcactgacttaacaatgtacaggaacaccctaccgaaaacgagctttcgtaattcaccgaagaattctagaagagcagctatagggaggggcctcatcctgccttaagagcctgcactgggctcctaaaaaccttcctgtcccctcctcactcagccacccactacgagggccaggcaccaagtcgtgcacgccggcctccactgctacagccatgacgccagcccaaccaccacaccctctcaccaggacccctgtcacaagtgacccctgcctcccctccagcccatctctgtggccagagggacctttccaaagagcaaatcgatcgtgacacttcttgactttaaaaagccgttgaagggtttcctcaatgttcttaagataaagtcaaaattcaaggcattagagagaggtcacaggacagaggtggcatttgcagggtctgctggcagatgcagaaatggagcacaagggcccctcgcgcccacaggaagatggcagagaccagagcacacaggctcagtccagggcacagacggtacggaatgaaaaaccacacggctctgatggtctggaagtgagaatgtactgtgccccctctttcccccgttctacacccaaaccaggtatcacgaatcatggggttctgtccattgagcccaccttccatgtcagaacccttctcaagactgggcttgcgaaagccaccaccagccctgagatggtcgtgaaaccagctgcccgtctccggacagaggcacgagatgtcggagtggggctcctaggagacaagcctagaaggacagccaggtgctggatcccctccagagacttgatgcgcaaccctgaagacctacacatccagctgtttcctaataactgctctgggctcccccctccacacacaccccacaaacagggaactcttcagggcttagaacgtagctgccattctgttttgtttggaaatcacttacacttcctagtgcagagctagcttcttgaaggcaagccccttggaagagtcactgggactgtgaaatcttgttctgataaacagatttccagggccagaaaaattggccagattatatttcaaagtgctttccctgagaatccagagcctggaggcacggggacttgataaacgagacggtggaatacagactaaataccacgtaaggttagacacagggtggtcttgcagccatagggctcccagagctttactggcaggacgtcggaattcctgccccggtgtatgagaacgccaaggaaccattcttgggcacatttcagcaactccatcacgcgtgcaagggctgcagagccttgtgttttagaagtgacaatatcaacaaacacaaaaggaaaaggaaaagccgaggccgagagaggttgaatcatgctgactctgtcgtcaaaaatcttccgcaaaccacttatggttgccagaggggaggatgcgggaaagggatagttagggagtttgggatagataggtccacactgctgtatttaaaatgaaaaaccaacaaggaccttactgtatagcaaagggaactctggtcattgttgtgtggcagcctggatgggaggggagtttgggagagaatggacacatgtgtatgtatggctgagtccgtttgctgtccacctgaagctatcacaacattgttaagcagttatgttgttgtttagttgcaaagttgtgtccgactcttttgcggccccagggactgtacagcttgccaggctcctctgtctatgggatttcccatgcaagaaaactggaatgggttgccatttctttctccaggctaatcggctataccccattataaaataaaaagtttaccaaaaaaaatcttcctcaaacccatccagtgtgcctcactagactggcaccatccaatccaagccaccgagacccggggtctgctttacaccagtggctctcaacagggggcacttttgccccctggggacagatggcagtgtctggagacattgttggttgtggcttctattgaatagaggccaggagtgcacccccgtaatacacagggcagcccctcacaacagagaaccacatggcctgaaatggcagaagagagccgatgtgagaaatgctggcttaaaccaacctttcacttctcactccccccaccccaggtctttctcctcacagcagatgaagatgttaaacactgctgatggctcttctgtacccttgtaataaatctaaaactcttgccaggatttataaaacctggtgcccgccccacctccccaccccaacctctacaacctcattccatctcctccatcacaaatgtcctccctgcagtggtcctctgctcacgctgtccactgaccccgattcttccacacaccttgcatctggtattacgggttgaatctgtccccccagaattcacacgctgaggtcttaacccctgtatctcagtatgtgactgtgttgggaggcagggactttaaaagcgtgattaagttaaaatgctgcgaaagacgaaaggcaaaaggagaagggggcggcagaggatgaggtggttagataacaccactgactcagtggacatgcatttgagtaaactgtgggagacagtggatgaagggagcttggggcgctgcagtccatgcggtcacagagtcagacatgacttagcgagaacaacaacaacaaagttaaaatgaggccgtttgcgtgggccctaatcccatcggtctgctgtccttacaaaaagggatgaggacacagacgcacagggagggtcatgtgaaaactctggaagaagacagctgtctacaagccaaggagataggcctcaaaagaaaccaactctgcacactttgatctcagacttctggactccagagtcatgagtaaagaaatgcctggtgttgaagccgctcaccatgtttccttgtcacggcagccctggcaaacggctacatctggctaatctcatttgtcctccactttacatcactgactctgagactccttcaccgacaccccgtctaaagccggccccgccgtttccagctctgagagtgtcccgtgttctccttcatcccgatgtgtgctcaccaacgcatctgtactatcttcccaccagattgcacaaccccaaagggcactgctttgttttgctctgagtcctgggcatctgacatttagtaggttctcaacaaatatctgtggttattctcagaagaaaaccaaatgtctagttactgatttaaccccatccctcacactgtaccttggaaagttccatctaccccctgcctcgtccccctagaaggtgagcagaatctgtacatacataaaaataagggacatgggggtgtctggatgagtataagtaaattactactctgccagctttaaaagaggttagaaatcttttgagcccgacagtaggactttctagtggctgaaatatttatcccatctcagtgtcttgggacacatttagaatccaaaaaagacaagcattagcacgaagttggctagctgggggtttttccttctcctttttcttttttcattaagctgaaaaatgaaaaagagttgcccattttcactgcagcagcacatcacttacttaaaataactacaccatctgcaccaagaaaacaa

SEQ ID NO: 32522 - DNA, 2026 bp, Bovine  19866880580066
  misc_feature (1)..(1): n is a, c, g, or t
ncttgtgtctcttacgtctcctaaattggcagccaggttttttaccactaacaacacctggaaagccctagaattggtcggtcatgagcaattaagactgctgctccaaagaagccacatcctggaaggtcctgtaatcctggtaaggattttgatgttcgctctaaaaacaataggtagctagagaaatgtttgggttagaagctttgggggagagtaatatactaaaatccacccaagggcattcaagtttcgaaaacaaacctttgaaaaacagatcatcctgatatatcctagactgataaaataaaggtgtggtgatgcaaacagcagcctaccttttctgtattattggtaagttgtggttgatggggtatttgttctgatagaaaagaaacataggtgttgtttcagaattagatgggggtcatgagtggattcctggaggaggaaatggcaatgcgttccagtagtcttgcctgtaaaatcccatggatagagtagcctggtgggctacagtacctggggtcacatagagtcaaatgtgactgagggactgagcacacacacaaatatgaatggatttatatcagtgctttccaacgtgttaaataccgcgccaaccttctttaaacacagcacgggtaaggatgcttatatttctacagcctactggggacatgaggaaggctgctcacagttggagacagctgagtggtgtctccaggtcccccaagcctcaagcagtgcagaggggctcaacatctggaaatgttgtagccatgcgttccgggaaacaaactcactcagaaggataatgcagatagtggagtacagtttattataccggcgagcccaaggcagagtttcctcttagcccaggaccccgaccagtttttgtgaaaaccttatagaccctaagtgtatgtgcaaaaatctacctccccaaattccctgaaaccagtctgaacaaaggaaaaagaaagatacaatcaaagttaacccatgattcatatgccttaagcctaggtagttaacagtggacaattttcaatagacttgtgatcatacctcaataagcataatagaatgtatgattctactcggttacacagataattagggtattgttttaggctatggagagccctggggctcttccttccgggggtctggttttccagtccgtatgtcgtttccatagatactgggcatattgttcaaagtccacagtctggcccaagatgaaggtaatagtcctgctttcaagatagagcctgttctgtttcctccttcagaaacacctgtgagtcacttgtcacacacagtgtgccctggcatgtgagtgggaagctctgggcttgaggacagaggctggatcttaaccctttgactgctgcttccttgtctgtttcactcctgtctcacgtcccttcatgctctcagcgcatctctccagggtctcatggatgccacgctgggtgcagctgttctaaacacaacaggctgctttcaattttttaatgtgtgaggtctgatgggttagctttgaagtggtccaggctggacccagcctctcatcagtatacagactgtagaagttatgtctctgctgcctccctgccacccctctggtctgagttctgttggtgggcatttccctgtttatgaaagaccgtggctcagtcatctttcaattaaacttaataatgaaaacaaaccctcagactcttcttagagggaaagggcggatgaatctggagaggcattagaggctgagggagacagttggtttgaataaggtcacagattaattagatttgggcttaattaacactgcatgagcatctggacagctttgccaacaaaggggatcatcgggatacgtttgactggtccctttctcctttgggcgctccttctctggttcaggctttggtccccactgttgtgagagactctggtgcctgaaagcttttccaagtcaattatacaggcttcactctggctgggtgaaggtctggtt

SEQ ID NO: 32523 - DNA, 851 bp, Bovine  19866880581359
  misc_feature (1)..(1): n is a, c, g, or t
ncctgggaaatggaaggatggagaccccccaagaacagaaatgagggggtgcattgcaggaggagccgatgaggaactcagcaggagacatgccacctcctgaggttcagcctggcctttggtgacctctgatctctggggacaactggaagctcaacatcacctgtgacccaacatgaacttgtcaagaatacaggactcaagtggaaaaataagtcttcctcaatgcctctgctgccctgaggtcattattcttcaatttttaccgtggtggttttgcagataacatttttctacatgttctgcataaccggtcctaggcaaattaagtgcttgataagcatcatctcacaataacctccttagggtatttattgcccagattttacagttgagtaaaatgaaatcaagcagagaaatcttcctaagaccaggaggctggtgagtgcaggagttcacgggaggtcctgaggtcttcagcattgtcctgggagcaagtggtccaggcttctgtgaaggatgcttctgaaacttctctagctttacctgctgcgggggttgggtgtgagctgttttgtgtagaccctacctaaatcgaattaaaattgactaattaaatgtggcctctttcagtagactgccatatctccacttacagctctccttctctcctgagaaggcagccccaacattgttttgaaaagttgctcaattattaatggttgaataacactttgaagtgttattattattaaagtgtcatttaattgttaataagaaggccctgaggggggatgggagttggttttgcctgcctgcctccttctcctcctccttccctccctccctcc

SEQ ID NO: 32524 - DNA, 1190 bp, Bovine  19866880590251
  misc_feature (1)..(1): n is a, c, g, or t
ntcagcataaactttttgagtaattcataaattatataaagtcagcataaacttatttttattatttttttctaattgaagaataattgcatacagctaatttatttattaaagttttttgtctatgtcccaagaactctaactgtgtcacatttgagaataaatggaaaaaacaaatttttttcataattaaaaaaagagtgtgtctgccactctaccttctcataatttaattatctatgtatacgtgaactcatttctgtagtactgccagctcctaaggagtaagagacacctgctcccagatggggaggaggtgccttggagctgcactcatctttcccgtctgcctgcactcatctttcccgtctgcctggccttggatcctgaccctagccagctgtggactctgtttcactgattcacttcggcatctggctgtattccttggctgacctcaatgtgaggggcttcctgctgccttcatgtccacgttgcatgtctccagtctgatagcctagcatctgcttgggtgtcatggaggtttgcagcttctcttccattcatttgaccctggaatttgacccattctgcgctttattacagatgctgcttatattgatgaatgttactttctggccacaccactgcctctagatgccatcgtatgtgtgggtgcgacttgaaagtgttatcctggtagaagaaggcagtgagaggataagctgtggggtgtttcagatgctgagggattagtacccagcccttctctctgggggacaccagtgtgcacagcaggcctctggaagaaggatggaaattctagcagctgtgttctctccacttttgttttcccacgtttcctgaagtcaatgttacctatagtttgtgaccgagagaaaaaaaaaaaaaaggccctaattcctttcaccaaagtcattatggattgattggcctgctgggaggagaggatttaaaaagtaattaagagatggtgggttaaagaaagttagcaaaaaccccaacaataatgaacaatggatgaactagtgtgctaacagtgtaatctctcggctttgtaggatagagaggtttaaagtcatgcactgattcctggtgggggtgggggaaatggatcctccagctgggctgggccagacagctggcaggaagaggaggacagtaggggg

SEQ ID NO: 32525 - DNA, 1216 bp, Bovine  19866880639015
  misc_feature (1)..(1): n is a, c, g, or t
nttcaggtgagagtgagtgagtgagaagggagatcattaggtagaaaggttctgggatgcctgtacttctggttgaacctttgggggatgaactgatcacatttgaatgctgtcttttaaaatttattaaaaaatttttcttttggctgtgctgtgtggcatgtgggatcttagttccccggccagcaatcaggacccatgtaccctggagtggaagcctggagtcttaaccactagacagccatgggagtccctaggaaatgctgtcttatcagagctacaggtgatattattgaacctgtgtctttcctcatcaacccgctcctggaaatggtgggtagctgaaacaaagatacaaagaagattagaggcaactgagacctagccaagccttggacctggaagatgaaaggttgagcctgtttgaaattgcatctcctggacctacttcagtgcctgggctttcagagagaattgtggcacacacactttacttttaaaaggtaaaacattgactcttctggagacaagaaaactctctttagctgtggactaatgctcgagttgaacgtagggaatcactgtctccatggctttttaacccccgggtagtgttttagagcaattacctgtacagctagttgctatagttacctattgtctatgcttccagaggagaaatctctagctcagatggttagcaggagagaaacaggtgctcagatctaacaaaaaagtgggacatgcagaaaaaacatctttatccatccagtggcaagttctggaacatctagcctgttcaccggccagtgatcatgtatctctacctcttttcccatgggaatcaccccagttcacaggggcaagcccccaagagtcatatgtgaaataggtgatgtgatcaccgtggttataactaattggaccgtcgcgaacacctgacctcaaatgggaccatcaggattctctcccctggaaactgggactgaagcttttctagctactctgtgtggataaatggcaggacctgtccaagggaggttttcagcctggagactattctctatcttgtggaaagaggggaaagagagaagatgcctgtttgcagaggaagcagagaggggagggagagtgtcttgagggtttttctgtttcaggttctttccttcttaaggcatgattgttttcctgccttggatgttttctgtggtttttt

SEQ ID NO: 32526 - DNA, 1015 bp, Bovine  19866880639029
  misc_feature (1)..(1): n is a, c, g, or t
ngactgcagcccaccaggctcctctgtcctgggactctccaggcaagagtactggagtggggtgccattgccttctccattatttccatttcatagatgagaaaaccaaggcacagagagcttagttgctcaaagtcacacagcaaatggcagagctggaactcaaacccaggcagtctgctccctagtccttaggcttaacccctacaggatgaagcccaatgggaacaggcaggcacctcatttaaaggtgaaataccctcccaagaccagtggctaaaatgatctccaagttcctactcagagccatctgcagtcctggaaattaaacaggggtcagggagcttgaatgacttaactgctgttcaatttagatttcctggctgaaagggtttctgctcatcctactggaaattaatagccaattgtttctttgcattcttgtgggagggtgagccattctgcctgggccctggctgtttctggaacagtaagcactcagccagcatcagccaggtaaaggctgggaagtgaagaaaccaaatctcttgtcgaacctggtagcttactccactggtctaggagctggggcccctcctcctgactttgcaggaaacctgcccctgtcgtgggtcagttcagcgcccttctgtgcctctaacagagggagtcagaggaaggaaaggcagttatttgttaggagaaggggcaaaaggtcttcaaaggaagcatgagaagcagcaaccatagcatctataggagtgaccctgcactattaacaggggatcccgcttagcacagtaagtctacccccagccttgctggatggaagtgagcttggagacacggtgggagcgccctctgcctgggcacagggcagggactccgtgaatacacactgaatatcttgtaacatgagtataactgaacatccttgaaatactgggttttactttttcctggtccctggtcacctccttattctgtctgccagtggactagaggaatactataa

SEQ ID NO: 32527 - DNA, 966 bp, Bovine  19866880644628
  misc_feature (1)..(1): n is a, c, g, or t
ntcaccgccaccagcagccattgagctagaatgagaaggaagtggggacttgagagtaatgggaagtgaatgtttatgtgggactcaacccaaaagggaaacagggcatgaagttcagtcagaagccaaaagggccataataaggagaatggggaaccactcactccctaatctgcgttatctcaccccccaccctccaggctgaccgggtgagacaccaccccagatgacaggatttcctgttattacacaggcctgccatctcaccccacaccatcttgtcaactcaacttcccacttctgtgggctcgatggtaaatgaggcacagaagctggattctagccagtggagaggcagagggatgaccgaatggcaggcagggcaggaagtggcagaaatgacgcagagaaaccacctttgatgtgagccacaatctcccctgagcacaagccccaaagtagcaaaattccaaaggatgatgaaacatcttagagagaggtgcctcggggctaaagtctagccagcgtgattggggaaaccatatcagttgggtagtacttctgtgtcacatgaccatcggcggctgccccaggccccttggcaggatctggccagacaccctcagggtccaggaacagagggaaccttacaggatcctgatcttaagctagtcagtgcctctcagatttgatcattaaattctcccaagatcacccacctcgcatctacaacagggtgtgtttcaaggcagcggcatcctttaagcaggaaaacatggaaacgacctttcctcacaggcccccattctataggggcccatcagagatcgtgtgcatgactcagataaaacgctaggactctcacagctttctatattctgaaccacatgggtggcaatggggacagtgaaaaagatggagaaagccaacagcgagcatttccagagctatacattatgtcattcg

SEQ ID NO: 32528 - DNA, 3841 bp, Bovine  19866880689298
  misc_feature (1)..(1): n is a, c, g, or t
ncggaacagtcagaaaagattcagcaaagccaacaggagcagcaataagaaccaagcagaaaacagaacttaaggtgaggctcccggagtgacggtgaggggtagcccctctgccccagttcaggcccatggaggagagggtccccaactggccagccacgtacctgatgttttcattcagcgcataaagctcattgctctgcaagccgccccccttaaagacgttgatcacggcagtctggacgctgcggggaaatagaaagacccccggtgagtggacctgcctccccggtgccacctccacaagcagctcagagccgaaggtggggagaagggccaggaagcccggggcacagacaggcccactttttctctccctggaatccatcactggcacacgaaggtccttggagaggaggaagaccgaggccaagaggacaaaaagaggccatctccctgcgctttctcgcaggctggcagccctgctggggagcagcctcactgaagggcgggcggtgggatctgctctcgggaaactgtgtggccggcacctgcgggtctggaagagtcccgcgtggcattggctacaagcaggagttcaccccagcctgaggtcctctcccttaggaggcctctgtcttcacagcctggaaaggatcacgccttgccttatcttaatttttttttaattttgcaattatggattttaattgtcctcgccttttattttacttaaaaaaaattggagtataattgctttacaatggtatattagtttctgtgatacaacgaagtgaatcagctatatgtatacataatgtcctttccttcttggacctccctgccagctcccccctcaatcctacccatctaggtcatcaaagagcactgaagtgacctccccgtgctatacaccagcttcccaccagcgatctatttcacagctgctggtctgtgtatgtcactctctcccgattcatcccaccctccccttccccctctgtgtccacacaccccttctctatgtctgcatctctgttcctgccctgcaaatatgttcatctggaccattttttctagatttcatattcatgccacaatatacgatatttgtttttctccttctgacttacttcacagtgtatgacagactctaggtccatccttttaatagtactttctgggaagaactccagaagggctggcctcacttccccttcccctcccatgagtgtccaggcaggagagttgatcccttgaaggacacaggtaagtctctggacccagcccagcatttcagcaaggagctgatcacaggcttgttttcaccccaggtttcaggctttttaaaaatgaaccaggttctacttaacatcaaaacattttcagttctctcctccctcacaatcatgagttgtgcattcatttaaaaaaattgataatgatccaaatgacacacacacacaaaccctcagtaatgctttaaaataacaatgcatttgatttatccaaagaggaaccacacagatttgaaaaacagctccaggaaggtgagacatagtatggattcagtctctactcagtacctggtacacagattggctgggcaccttactaaggctcagaggctcctctcccagccaccaatagcttccaggtggggatcaaccctggtctacgctgcattgctagcttttcacagatacatgtctcatcttcccaaataggtagcaggtgacttggaggttacttagatgttcccaccctcgggtcctctgacaactggcatgggactaatgttaagttctgatccaactgtcccgggctggttaactgactttgagagcctagaagcccccagtggtccgctttccctctattcaaacaaggaaggacagggagagagaaaaagggacaaactaggagtatgggattaacaaactgggatatagcaaacagatacgcaaccaggatttactgcatagtacagggagctatgttcaatatcttataataacctattgcgaaatataatcagaaaaaataactgaatctaacacaatattgcaaataactgtatattaatacaaaaagaaaaaatacattaaaaaaaaaaaaaaacaagaaacgctgatgcatacagttgccatagggaaacgggcacactggtgccagtcacccctacccatgaccttctggagctgtgatctcgggagatgctgaagctcagccagcccctggccctggcaccccaacccctaccccaccaccaccttcccgcccacccagtgcctcccatacctgttccaagcggagttggaactcagctgcagagcctggcgggctgcctggaagcggggcaggtcgctgagcgccggggagctcatgaagcgtggtctgggcctgcggaaggagcccatcttggggaactcgacgggcaggctgggggcgaagccacgggtcataagtccaggtgagggggcggcttctcctctgaccagaaggttccgactgcccacccaaagggcttctcccagggctgtctttcggccctcaggcgttctcaaaaccacgatgttgaccaatacctgaaaagagaggccagcttttcttgaaaacacctgggctgagcagaccccatcatgggggaagctggttgggacttcctggccaaactaccctaaaaaaaaaaattccaggaccccagagtactatctataacttgcagggtcccattcacaagtgttcacaagcctccttttggttataaccttgtggtcatccccaggtggagaggcactcacagtgagttgaggccagtcctacagagaagtgattgctaagctatgtttgactgtggttcccatgcacacccatcaaagtttgggcccccactgagtctctgtagcttccaccaagttttccattgagatgacttaaaaaaaaaaaaaaaatagagcacacaagagctccttgtctaggcactgaagatggtccatgacacgcctgaccacagcagcccacatgcatcgctcagtatttcccaaagcatcagtgcctcttccctcaggctcatctcctcaccctcccttgcctgccattcattcatttattctatcagaacatatttattagctactatttactaaccaggcttccctggtggctcagtggtaaagaatccacctgctaatgcaggagacgtgggttggaactctgggtcaggaatatcccctggaggaggaaatggcaacccattccagtattcttgcctggagaatcccatggacagaggagtctggtgggctacagtccatggggtcgcaaaagggctggacacaactttgtaataaacaacatcgatttattaaccacgtgagctgtgtagcatccgaagatttctaagaccgagtccctgccctcaggaggctcacggtctatgggaagagaagtttcctgtatttgctcatgcaacaaacatttactaagcccctacagcactttgagcactcgggtattggggatgcatggtggccatggagaatgtggtccctgctccatggagctgttccatgtgaggctgcaggcttttgattgtatctactatttcccttagggcttccctggtagctcagctagtaaagaatccacctgcagtgcaggagaccccggtttgattcttgcgttgggaagatccactggagaagagataggctacccattccagtattcttgggcttcccttgtggttcagacggtaaagaatccacctgcaatgtgggagacctgggtctgatccctgggtgggaagatccccggaggagggcaggcaacccactcc

SEQ ID NO: 32529 - DNA, 966 bp, Bovine  19866880699295
  misc_feature (1)..(1): n is a, c, g, or t
ntttgtagatgtccttgaaaggttttctgttgctgtttggaagaaaaattctcaataaacacaaaataaactagactggatgtggtgggtgttttctaatattacgtaatttatcatttcagataatgtgaccaaaagagaagcctttggaactaattcttcagaaaacaattttacttcaataaaatttactcagagaaatgaaccaaatgattgccgtcttagcaataaagccatctttcttcatacttcatcacaatgttcggaagaggagcaggtaataccatagcacctttatggaagcagagaaaaacattcatcatgaatttaaaacaagaaactgtaagaacataaaaaacactggacagttgctggatcagtaactcacactcctgattttagaaggagagcccctggattactttactgaaaatcgtcattacatttcatgatttcaacagccaacttttatgataatatcaggatctgccatctacagatttttcttgtaattatttctatattttagcttatcttctgttcgggataaaagagtttcctttttataattctatgtgtaaatggagtttcttttactgtcctggattcagtccttcagacttaaagcagaatgtgttatcttggtttttccacgagttggtcaataaataaatgttagatgctctctttctaatcttcaagatttcatagactatattcacattctttctagctatgtttttttaacaatcaaggaatcctagtggaaactgttctattttttttaagccatttgagtttctactttatatctcacacgtcttccctgtgatatggtggatagaatgtatatgagattgtggttttatgcaaaggaaaaacatctccacgttagaagtgtgtttatatacagtgaaggcctataattctttacttctataacttattccagagagacaattaagg

SEQ ID NO: 32530 - DNA, 4598 bp, Bovine  19866880725528
  misc_feature (1)..(1): n is a, c, g, or t
ntgtcttctatggtttttgtcttgtttttcgataatgataggtgatggccaaaaagctggcagttcctttcaaggtgatctgaatcgagcagggaaggtgaaggtgaggcataattcaattttgttccatggccaaaaccccaaaaaagcacaagaacctcacaggactcatttgctttctcccatacaaatttggaaaattcagcagaatttgtccatatgattttttttttaaatggtgtttgattaaaaaaaaatgatgtttgattatcttcaactgtcttggttggctgggttctggatcttttttcctcaaagctttagaaatggaagtggtgcttcaatagagaaacatgactctcactcccctgaacttataccattaagagaaatgacaatataacagattctcaagttttagcactaaaccatcatttggaagataagtttttgctgtcacttggatgtcaaaaaatagctgcagttatgtacttacaagccatggaagctaccatttttaattcctgtgtaaaagccatggtctgataagtagagtggggaagaaagacctaggctgtgttttgaattccaatgatgaaatctaaatttataattttatggtattttgctatgcacatgttttagatcataagcataaaaggcatttcgacatcctgcctttgctaggtctgccagtggtgaaatcattgttttaatttacactctttgatattcacctgagatgaatcagttcatgtatgaagtgttaacattttgttaatctaaaatgtctcattgtcagcttgctgtggaaagcagtattccacgtggaatagtttttcattaaaatgctgctattgtgtctgtaaaggtcatttgctctgctttttacctttaaagtaatcttcagttttatttggtcgaaagagaacacttgattttttgccctgctcacctttcttgtggttacctggggcaggatgattctatctcgaatgaaccttctctcctgctttctttagtttcttctgtctctttggagtttaaagcacaccgttatgagaacagacagacccaccaccatcgctggccagagaaacacaagcaataaaacaaaaacaaaagacggagacactgctttggactgtcttgatggtggtatatattctgggatagaatcaggaacaaaacttttcaaaaactccgcagactgtattttttctttcagtctagagatcttattatggtgcctacaaaatccaggccaacttctaaatttactgctgctttcagatgtctctgggaaagcacagaactctagctgggactcaaaagttaatgagaaaattggattcagttgctcacttgagtgttgtagaaatggattcattgattcttaactctaggtcagatttgcataaaatgatattaatccttttctaggtagacaatttccttgatatagaagatttagacctggatgaagagattaatccccaactgagcaagggtatgttttctgtttccttcctacactgcttgacctctttctagaaactacacgtaagactttagacagcttttctctttttttttttctgggtgggtgggcgcagggtgcaattcttacctctcctttccccaagatacagaaaactggagtcctgcagtcttttttttgttaataaagatttcagctgaaaggtcaaacaaagcttgttgaaggttgtaaagtctttgatcttaaaagaaataaagattttcttcctcccatctcccatttaccatatgattgatttttggataattgtctcaagtagaaccatttaagtcaaactcttatttcttagaatttctgcatcatgctgtaaattgagattagttttgaatgctccataaaataccagttgatcgtaaacattatgagagttggtcataaaataaacacaaaagaaaataaaatccagatctttgcttttatgaatatttattaatatgtaagccaaacacttgaaactaaagctgtgttgtgaatgtttttttctgggctgttctacataggctgggctgagagagcctgctgtccgctgacatgtatgtagtccatgacttttatgaggcctttttcctctcctggttaacatttctgtgtaagcataggtaccctttgttgttccaaggagctttgaaatatgttcaaaatttgagttgttttgaaaactctcattcctaatttaatatgcaagaatatctcaacgttaatgttgaatgtttccatggggcagtttccacaggggagttggttgttggcgtttgttgtttacagtcattaggtggtcataaacagccattgtggtcattattgttggggaggagggcttccttgtaatcacacaggagttaaagtgcaggctctagctggtttgtggactgctgtctgtaaattgtctctataagcctctgctttggcttctctggttccccctgaatttgagaggctttggtaattggaagcaattaacatttttattctgcttccaaacataacactactccactgaagggattatttctcaagcagtctattaaccagtaaactgcagattttttcccccttgcttgcttggtttaagggagatgagggatctaagggaatcacagactcctgggagaggttctcttaacttctgtgctttaggcggctctgaatttctttataagagcaatttaggggttctgattggattagaaggtgttgctaagggtttatgagggagccaaatttgtagagcaagcacactgtttctgggttttgggtagtttgggggaaaggagcagattcctgggtcttgttcccaaaaaagagtttaattcagaaggtcttttgtgacacctagtgatctgtgttattaaccactcccccaggggattctgatacagttcttctgtgggtagcacttggagtaggtacttggagttggcgcttggaattggcatgtatatatttgcaacataaagttactttcacaggagggcacagcagtgcacaggtggagcgtttctgtgatggttccttttcttgccagtaattagaaagtctttataccgacataatcctgcatagccagtgaatttgattttggttgtatcagtattttaaattagtctttacttttcccactacttttatattgtttcctttaaacattttttaaattattttttattgctattaggtctgtttcttttgtttaaaggattgcgtaaaaacgtcttactagtatgatttttccagaaatttgagaacaagtagtttttcatttgtgtataaaagcttcctgaggctgaaccaagtctcagtggacttgaattagctagtcaagaccttctgaggtgtaaaataatgtgaaaagtcaaggctaaaaagcaaccaaggcttcagtgatctatcccaattactgaaaagaccaccaagcttcactgtttttataatgtacagtctgggtcatctgaaagaaaacacacacacacacacacacacacacacacacaagaaatttgccaaatgggttttatctttgggtctaatttgtattacacttcaggaatgtgagcagaaggtaaatatatcagatgggaaatgtgacattttaaataagcaagttgcttgtataattttggcagctgagaggcttactgattagattctgtcattattgtttaaacaacagatttgcctggggcaacaaggaagtgagttgcctattgtttttctaccatggactttatttgttcaccttcttcattttcataaatattctccaagattcaggcctttgatgccgccctgggatttagcttgttgtttcagcagcccaggtggacacactttttccaagaagccaacccagtgatgtgctattgaccagttgtcccaggaaaccttggtcacaaagtgtggtgccctgtgtttatttgacattaaattaacttttttttttcctcttttgagacaagataattaccctgattacttactgtcatgcatatccagaaagattattatttggaatcggtattaattattataggggcctccctggtggctgagtggtaaagaatccgcctgccaatgcaggaaactccggtttggtttgagttgagaagattccctggagaaggaaatggcaacccactccagtattcttgcctgggaaatcccatggacagaggagcctggcaggctaaatagtccatgggatcacagaagactcaacaattggtttgccctttagagtagaaagaatcttctgattgtctttatttccgcccctcagttggcccagcctgttctgtggatgagtgcagaaggtcaaagagaccgttttgaggtctggtattcagaattatactgtattatacacgtttcttgaccagtatatgtacttatgttgtgattgatttcactgaattaaaatgggcaactgatcctgcttgaagattggcagccttatttgattttcattttcaagctttccagtacttccagttttaatgaaggtatcagtttctctccctctccctcttttttttttttt

SEQ ID NO: 32531 - DNA, 1342 bp, Bovine  19866880728308
  misc_feature (1)..(1): n is a, c, g, or t
ntcgtctaacacaaatcacttatttctacttgtttttcttcctttggataggcttcagagtggcagatctggtttcatctagccatgggagcttcccagaatggaacggctgccctgagaggcagtgagcatcttgtccctgaaagggtccaagcagaagccacttctggagtgggtgctggaaaggattcgggcatgaggcagagttgggtgagtgacttctgaggtcccttgacattctggagcattagttgatgagagggtcttcccttacctagtccagactcacagggctaaagtcatagcgaatggtacacatatcttacaaggaaaaaagaaaggagagagagaagatagaagaagaaaacggaagcagaggaggagaagaggaagaagaagagaagaggaagaggaaaaggaaggaggaggagaagaaagaaaaacaagaaaggaggagaaaaaggatattccatcagatcaaagcagtgcagcaatcactagagtttctggtcttgcatgcaaggatccaggcaccagcctggagttgagaagagggctttggagtgactgacgcaaaggagaaccgggtaagcagggtagggtggggaatgagaattgcatgttctcattcttatgactctgactcactgagatggacttttttttaggtcactgatccctcccttccctttataaaggcccctttcctccacctttagcaccaaagcactgacgtgctttccccacttgtcttttggaagtccatcttgtgatggaacgctaaggtgcttggctgataatagttgaacacattacccttggaaaaaaaacaaggggagacagaatcttcaaccccaggaacaagtctcccaagcaggaaatcttagactctgggcaagcaaaagagatattttcaggataaggacatttttttctagaacttctcaaaccatacctgctgtttttaaggggtcatcagagatgggtccctttctctctccatctgtgtttctttcttcatttatattcttcctctattcttccttaacagcttttcctaagcctgtattatatcccaggggacttcccagatggctcagtggtaaagaatccatctgtcaatgcaggagacgcaagttcaatccctgggtcgggaagattcccctggaggaggaaatggcaacccactccagtattcttgcctggagaatcccatggacagaggagcctggtgaattacatggggtcgcaaagactcagaagaggactgagcgactgagcatgcacgattgtatcccaggcattgcctaggtttggtattcgaagataaatcacacggcat

SEQ ID NO: 32532 - DNA, 1646 bp, Bovine  19866880731183
  misc_feature (1)..(1): n is a, c, g, or t
ncatgagattctctaggcaagagtactggaatgggttgcccatgtccttctcccagaggatcttcctgactcagggactgaactcaagtctcctgtagttcctgcatggaaggcagattctttgtcactgagccaccagggaagccctttttgcatttggttaacttctctgacactagctgtcaatcactgcatgcaaatattgtttgcaaatctcagagaattacatggcagcttttcagagataagtgaactctgttaatgaagaaaataaaatgaagcccttcctatgttggtatcaatctcagcttcacttgtgaagaaaacttgaaaaattaatacagatccaaagcccaacaaaagaaaaagatctttaaagaaagcttgcgtatgacctccttacacctgggaattagactggtgttgaaatagcaggcaggcttaggaaagccaaaatttatgaatgccacagaaataaatactttgcatgctgttctcacctgttaaggggggaatgttgtaatatctacttgacaacattgtttctgacattgagtgaaatcacattgtatgtaaaaatcacctcagcgtacatgactcaaacttgtacctctataacacaatagattatgcatattatttgtttgattgtgagcagagtgattgaaacaatgattgttaatttcataaatgccaggaatttgatatatgtattgtacattgcatcatgatcttttgtgaagcaagtgattcttctgtaattttaataggccattcctgactttaaaattttttttatggcttagataggttactgcatttcacttttcttaaaaaaaaaatgacccctgacttcattttgcctttgctgagtgcagtgagtatggatatgctatactctgtagagttggaagagccatacatgtttctagagacactctgctattaccaggcttatttcactgagagagaaaactcagtttagcaaatcattgtttgttttgcaatagatgcagaaaatggtagtgaataatgaactgtcagattggtgctggtctcatatgtcttaccagttagctcttaagcattaataagcagagtgcaaaaataattattttgaggtacagcatatggttgctttagaataatatggtcatttccattccatttcaggcaaatcaaacctttgagctaaaactgcattcttattttctgaatagccatatgtaatgacaagagttacttaattaaaattctgcaacatgacaatgggagaaatgatgaattatccatttctaatctgttcccctgccaccgtttcatcaaatatctagatgggtaattagtaatcacaaattcccctgggggtgtatttgttgagcacctatcggtgcttgggactgtgaaggatacagaagctttcaacaaagtctttacctcatggaatgtaattgataggaaatgacattctcacaagagcagttaaggaatgatagaagagtttaaaattaagtgtcaaaaaattagtagaaacatttttaagtgttcgaaggaagtggaaatttctgtgggtttaggaaatcgaagaaaactggactgtgaagagaggttaagagtgtcaaggataggacacaggataaattcag

SEQ ID NO: 32533 - DNA, 1433 bp, Bovine  19866880797026
  misc_feature (1)..(1): n is a, c, g, or t
ncatcagatccacgcccccccatgtcatgtccacctcccctgccttggttccagctctcatctcccacatcaacccactttaacagcctcaaatcaaaagatcctactgattctttccaaccaacctcaaacctctcctcctctgtgaatattccccacctctccagggtggggagactcagtaactctgatttgcttcacccagtagctcttagtacacaccactcttacaatactgattatactctactgcaatgccatcaaataaaaatacacatgccacaagcataattttaaatgccccaatagcctcattaaaaaggcaaaaagaaattggtaatttttaacaatatattttacttaaccagatacatgcaaaatattatcatgtaacatgtaatcaatacaaaaaacaagatattctataatttttcatattagttctttgaaatccaatgtatgttttccctttacagcatgttttagacactgaggtgttatcaaaaatagttgatctgtatttagttgtcataaaagttacaactgaaaaaagtagattcacacacccaagttgttccaaatgaacttgagagttttataataactgcatcaaatatcaactttatattttaagttaaaattaacatccaaaatcagttcctcagtcacactagtggctaatggctatgaggttggatcatgtagctctatggtaattatttgcatatacatttgtccttcccactaaatcagactatatctaatttacctatatcctcctcaagcataggcttgccacatatatggtgtttcgtgaaagtctgttgactagacaaagaaaaacggacacggaaatcacctgactatagcaacaataaatcaaggaaattcttttgtaaggaatatgaatggcagttttatgaatatacacacacatacaagcacaggcttgtattaaaaataattatgactaagtacatttgaaattggtgcagccactatggagaacagtatgaaggttcctcaaaaaactaaaaataaagttgccatatgatccagaaattcaatccctgggcatatatccaaacagattatacttcaaaaagatacatgcaccccaatgttcattgcagcactatttacaacagccaagatatgggaaaagtgtaaatgtctatccaaagatgaatggataaagaagctgtggtacatatatacaatgggatgctactcggtcaaacagagaatgaaatcatgccatgtgtagcaacatggacagacctagagattatttgtaccaactgaagcaagtcagaaaaagaaaggtaaatatcatatgacagcacttacatgtggaatctaaaatacgacacaaatgaacttatctgtgaaacagaaagactgacagcacttatccatgaaacagaaagact

SEQ ID NO: 32534 - DNA, 1956 bp, Bovine  19866880820777
  misc_feature (1)..(1): n is a, c, g, or t
ncactatcattggtccccgtcatccatgcaaccacagggctttagtgggctccctgcatcccagcactggccaacatgagtgtgccgatctcatgaagctgattagtgggtcaaatgggctactgcttgagagcatgtggcctaagtgaaagcacatagcatgtggtcaatagtggcttgcttccttccacccagggatggtggaggaggtgggattctgagatgcaagaaggcgctaaatcatctgtcccacagagcattagcagggattgtagtgggccatgagccacggatgcaaaccaagaaagtcctcctccaaacccttcctccaccctgcccctggagctgaggttaccgtagacagccctcctcccctcaggccctttctgcccagggaaggtgcagagaacatgcccagcaagagtctacaagccacctgccaagtgcctgtcccctttctccttgttcagacagattactctttcgaggagcggcagcagcctgcttcatcaccctaattgcaggaggtcacaggtccaggatcagaagtcaatgatcagagggcagtcaaagggtctggagtgagaagtcagaggtcaaagattgatgatcatggagtcaaaagaccaaggtcaaaggtctgttgtcagaagtcaagaggtaatggggtctgtgttgaggtcaaaggtgaaggaaacaacagggatttgaaattaaatccagcatgcaatttatccaagagatgaggactattgagagattatgcagaaacctctgccttctctctggaggcagaacattcctgctgccagtgctgccagaccccaagcttgtctcctggggccaaggctctctggaatgaggattctccttgggctgctgtcccactgctttcccattttacagatggatttactgcggtaaagaaaagggtctaacacatggaaatagtcctgggaaaaccgagaccaggactggtgtggcctagtctgtctttgggaactggacgtgacaaagcatctctctggcacatcctgaaatgacaaatgaaaccattctgggtggtagtaagggctgcaggcatctcattttgcaaatcagaatccttctatcagcattcattcgcctgaacgaggcttctaagcagagcccaggcacaaactcactctctcaggcttcatatcaatgtgccagctccttcctggcagattcatctgccaggggcttgcagactggctcctgccacctgttttccccagtcctgaaacgttttccgaatcatagacaacagcattaagatggcaaagttgattgaaaaccacagaggtgagaaagctatgcaaccaggaaggcgacacggctggagctgcatgtcctctcaagcggctgccctctggctccctcctatctcggttcaccatgcggcaggtagtatgtgggtgcccggccccgggagcccctctccatggtctgtggctgtttactgtcagagactaatctgtctcaagtaagccttaggctcagatgagaagcagagcaaaatgccaacacttcctctgggactcagggtaccataatgtgggggatggggcgcagggacactgaagtgacaagagctggagccctggacacgtgtgctcccaggggaaatgtctccaaagccagccctgcctggcaaagccttagttctcccgggtccctggattcagctcccaaactggcacagatttccagcatttaccagacagacagcaccgtggcttcgggggtcaattttgagagcgtcaggttaacaaataacccctcaggaagcaatgtctagttctgatggagaccctggaggcaggaagtggacatttcagtccagggctgatgccatcatttgaagttgcagtgcggtaaccgtgggttgtatgccaattccccataaggccaaagggaatgaaaaggatggga

SEQ ID NO: 32535 - DNA, 1134 bp, Bovine  19866880926525
  misc_feature (1)..(1): n is a, c, g, or t
ntggtcgccggcccgccgggctctcttggcttgcagccgtatcactcccatctccgcctccatctttatatggccttcttccctgtgtctttgtccagattgcccctttataaggatcccaatcattggcatagggtgcactctgacccagtaccagcccccggtgctacagtagtaaagaatctgcctgcagtgcaggagaggcaagagacgcgggttccatcccggggtcaggaagatcccctggagaagagcatggcaacccactgcagtattcttgcctagagaatcccatggtcagaggagtctggtgggctacagtccatgggattgcaaagagttggacacgactaagtgagcatgggcattgagctgacccaccatgacctcttcttaacttgattccacctgcaaaaaacatctttccaaataaggtcacattcacaggtcctcgaggttagaacttgacctcatctttggggcggggggccacgattctactcacttcagtagcctcggcaaaatactaacacaatatgcacacacagtgggtcttcaacaaataatagtttccgttactcttctgaacagttttggaaaacctttgtgcacctttctgactgaattttgctgtattttcaggcctttgaggtttagagtatcaataaaaccagagcatttctgttgttttttggtaacgcacagcttttctttgcaatatgatgctcttctgggctctgtataagagctgccatgcatctcaattacggaatacgtttagcatttggattttgagtgactttggcccagtgctgtcaaggtttgcttcgggcacttttgtcttgcttaacgatgcaaaacagaaaatgctcacaaatggttaccccaaaatgagacctgtcgttattgcttcttttacctccggggccccaaactgcagaagcttattcactgcgagacaacgaggactctaaatctcccacctccatatattacatttcatattgcacttgaacatggcaaaattaattgtggccaaggcagggaagacaggaaaaacctataatggtttatcatattttgcaggcttcgtgaggaccataaatttaaagcatataggaattgtatttattc

SEQ ID NO: 32536 - DNA, 705 bp, Bovine  19866880941957
  misc_feature (1)..(1): n is a, c, g, or t
ncttgccttggaaatcccatggacagagaagcctggtgggttacaagttcatggggtcacaaaagagttggacacaactgagcaacaaaacagcagcaaataatagtactataaccctattgaaagactttatctttggatacattccccaactttggaatgtgctatataggtttatctatgtattctcatccttgttactctggaactaacgactccattatggctgagtgagaggtttcagcagtctctgactagggacaaaaccagctggccccactctggaaggaaattctattcttggcccccttatcagcatcactcactccccagctgagcccagagcctgaaggaggtcagcttgcagcccagcccagcagtgggactgagaaacggaagaacaggtcttctccaccccaccatgaaactgaaaaagcatatgtgctacatgtatgtggatggagatcttccttcctgcatccttcccttcccttcttctttcctcccttccttctcccagcacattcacaaatgaggtgccagtgtaaacttgagcctaacaacgttggtggttgattaaactcttgtttcattcctctgctaatcaactacaaaagccttcaatacacacaccaacctcagagaggttatatcacttaattactataaaacaaccccacaggttaatgcatgctttgatctcaa

SEQ ID NO: 32537 - DNA, 1234 bp, Bovine  19866880970885
  misc_feature (1)..(1): n is a, c, g, or t
ntaatggagcctgagaggaactagctgtccatcaagaccaataaaggggatgtttagagaactggaaaaatgcacatcaacaggtcccaagaccctcacttatgggcagtttattgaattagcactgagaacttctcttctaaaaagaaatataaacaccttcagaaagatcaggggagtagcaaagcgaagggcacaacctaaattagaaacaccttgaaactgcagacttctaaagtatgaaggctctgataatagagacaatagatacacatatcaaagcccctattaaaataagtactgccaggagctgcagagatttttttttttaatcaaattgatcaaataagaatgttcattgttgaaactcttataaatcttctcttatatattttatatagtaactgaacaatgggggcaagtcactttcgagtttaatttttgagttcaattcacttctcttcatgttttaaagagtttttggaagaattgaacacacataaaattagaaaagtactgagcaaagtatctggtgtgccagaaacagcaatcactattgatcatcattattattattctgtttagaattgatcaattactccatccctttcttttttttaattaatttattttttattgaaagataattacagaattttgctgttttctgtcaaacctcaacatgacatttctccagagaagacctacagatggctaacaaacacatgaaaagatgctcaacatcactcattattagagaaatgcaaatcaaactacaaggagatatcacctcacacaggtcagaatggcccccatctctttcttaagtcttcatttcctgttgacacttttgctctttgaacctccttccctaaagtgtcattgtgctcatctgatagagtggctgagtgggcttaggtttcatcaggttcaaatcccaccttatgcacttactaattatatggtctggggtaagtcatttgacttttctgcatctctgcttcctcaactacaaaatggggaaaatgagacctaactttcaaggttaactatgaggactaagtgagactatctatataaaggactttgcatagcagagtcatacaagcactcatgaaagggtagttattattgctgttataacaatattatttcttgattttataaaagtgaagctcttctttcgtgaaacgaggctggtctatgtgtcctcaaggtaaaggtgtaagttgaa

SEQ ID NO: 32538 - DNA, 828 bp, Bovine  19866881011694
  misc_feature (1)..(1): n is a, c, g, or t
nagactaacaaaggtgttttcttaaccagaccctcagtctgctgatttctgatgaccatcaggagaatgttcatccctaacatgttagatggctcactttctgtgctcccagtttaataaatcactcactctggacatcctgacagatgtccaagtgatatttcctttggctacaactcatcccatcctttctagttattgactcagtccttctgtcatctaaacaaggcccagccaacatctttgagttatgacacttcctttccctctcttcccacattctttttcacttggcttctctcgattactcttctttgtgcttgcctggagatccttaatgatcttgcctctagtgaattcaaacctttggactaacaagtgttctgagctgttttcttccttctgggaagccaactggaaagtcacccagacatactgccccaactgtatttcaagtaagcaaccagaggagctgagagcctccaacccctaaggatatatggagtgccaactgcatatctttgagtttgaataataatacacatgcacacacacatatacatatatacttccacagctggtgagtttaagtgacactacattaatagcaataataaaaatttccatccttgtccttgatgatggccaatcatgcaagaacctcagcctctgacaaagacctccaaaccccatgagcatttccgtgggttcattttataggtagacctgcaaacccagtcaggaccacatggctttttccaggcacactgtcaacccacctctgtttctgtctcccctaaggtaccgagtcactcagcgacagcatca

SEQ ID NO: 32539 - DNA, 968 bp, Bovine  19866881029924
  misc_feature (1)..(1): n is a, c, g, or t
naaatatttttaatagtactactgacccttttaacactctcagaaagaaaatgaatctcatacgcattcaggcaggtaactattacaaaaataaatagaagagtcaatcagtgaaagcatacttgagaaactaaagaaacgtacgtaactatacacggtgagaactactttaacacagacaagattccacttgatattagcaagacaaccaaataccaagacaaatgaagggctggaaagcaggagacaactgaagaaaaagctttcagatgttccttcaaacagagctaactgcattgactgtggtcaactctgttggctatcattcaactcttaggcccgaccctaagtcctatgtggtttttcagaggtatttaaaagtttcagggtaagaaaggacacttagtgatttatgacatatttttgcactcacagctcttgtgctctaggaggaattttttcaggtcattagtttataatgtgaactggcgcctaaggatattttgaaagggaaaaaactagtgtgcttggagatgcagtttatgtaacttgcatcatcatttatttcagctcaatttggggcctaaactgaactcaaaatgaagtcaccacatctgcaacagattctctgggcatggaacgagcacacagaaatctgcaaacagaacagactccttacccggaaaaacaaaaacagtgtaacctccttaaaatatccaagtccttgcaagaagttcttacactttcagagtacaaaaataaagtcagccttacaagtaagttccaaaataatctgggttatcaaaatgccactggcataccaaaatgcatgaattctgccagttttatccttgtttccacagcctgccccagctattcacacaaccatgcatgtgtgggtctagaaaacatgaaactaaatcattagactctgagaaggcaagcatcttcctaaatccatgtgcata

SEQ ID NO: 32540 - DNA, 983 bp, Bovine  19866881062187
  misc_feature (1)..(1): n is a, c, g, or t
naaaagtcatattttctgcattgtatcagcctctttgcagtagctggacaatatatttccagctttttaaagctgtctcccaggaggttgattgtttatttcttccaaacgggacataaaaggatgataaagctacaaatccaaagaaactaattactcagtacttgaaaggatgaagtgaattttgagctttatgaatgcatgctaataataagtatcatggatagtaattatgcttacaattttaattagtgaatgctgctgtaaattaaaaggctacgtctccattagaaacaaaccccacagaactctctaaacctgaaacaaaccacagtgtgcatatacaaagattctgaagaacttttaagatgaaaaattcgagtattttcagataaaattccacaggccatcctgaaagtcattaccaggcactgatcattaattagctctatagtttgtaatgagaagaggtgggagtaatatttttcttctttgaaaaacattagcaattatacatttcaggaaaccctagaaatctgggttgtggtgtagccatcatggtgctgtagagaaaaagtcttaaaatgccatttgagtatctctagacccaattagcccaatattctcaaaattctttagtacacataactggaaaaaacagcaactgtatattcaaactgtcatctatatatcccatatttggctggattaatgctcttttttcttaaagtcttggtttcatttgctacaatattgcttctgttttatgtttggggcttttttttttttttttttttggtgggggcaggtgcagtgctgtgaggcatgcaggaacctagctccctgatcagggatccagcccacaccctctgcaatgggaggcaaagtcttaattacttggactgccagggaagtctctggtttaatgctcttgacttggcgattatattaaataacattttcaactcaattaactaaccaaa

SEQ ID NO: 32541 - DNA, 1143 bp, Bovine  19866881150382
  misc_feature (1)..(1): n is a, c, g, or t
natgctgtgtgtctaccatgcaggtctctcccccagacctcatcccacgtcctgagcctgggcttttttccagatttctcctctttcttgatctgcaggtagtaagcactcactgtccagtccagtttcctcctaggctggttgtagggccgccaccacctgggttttccaactgccaacctcgagtgtttgcttttaacagcagcaggagagaagatgaattgttttcaagggcactttttttaaaggatggttctttaatggggtccctgcttctttgaactcttccggtgcttctgttttatagttatcgatttttgcgatcataaaagtaatacatggttattgtaaaaatgtgggaacattttagaaatgtgagacttggcgcgtgcaagcacccacgcttcagagaggacctctgccgacgtctggcatagattcttctgtcctgttggctccttggcgttttgtcccctatatcatttctcccccaaagaagggcgtgaggacccagcctcttgtctggcattgctgcaggcagtgtttgctgctgcctgagttcagagaatgggctggctcaagagcagtgacggaggctggagatgcagcagcgtgtattagggatgtctgggcaccgccatttagggcttcagaggattgggctgagcctcagtgttcctcatctgaacaatggggatgatgagagatgtcctagtgttttagagggagattgggattcaacagtaagatgatggatgggaagacactcagtaagttctaaattctatgtattattacctgattctgagaaataattgctgttgccatcaaatagctcctgggggctccaagtgaatagtcatggtgacttagtcctaagggttaggattttattctcttgtcattgtgtatacatatttgtgtatgtgcatatagtcacacacgtgtgtgtgtacacatatatgcatatgaaaagtgaaagtcgctcagttgtgtccgactctttgcgaccccatggactatacagtccatggaattctccaggccagaatgctggagtgggtagcctttcccttctccaggggtcttctcaacccaggaatcaaacccaggtctcccacactgcaggcggattcttaccag

SEQ ID NO: 32542 - DNA, 1506 bp, Bovine  19866881151354
  misc_feature (1)..(1): n is a, c, g, or t
nttcaatctgcttaaaatttccatggctccctattccccacaggacaagctcagacttctcagctgaatatatctttcatgagctgctactggggctgtcatgggggttgagggcagagaggggtgtaagggcgagaccagaggagtgggcaagagatctggggcatgttaagaagtgtagtctttatcctgtgcacaataggaagtcacaaatggtcagtttcaagctgggtcatgcacgaacagaggtgctctggttaaaagcaaggcttctaggatcaaacttagcttcaaagcctgaacatgccactttagctgtgtgtccttgggcaagttacttaacctttctgagctggtttcttcaactggagaagggagattaagaccccatgagatggatacaattatgacacttaaatgaggttgtgctcagcttactacctagcacatagtaagcacttgactaatcataactaacattaccactaataactctaaatcttcctacacttcctccaagaagcactccatgagccctcaaaactgagttaagcctcatccccatgtattcttttaacactttgtattttccttgttggtaagacttatgagcctgtatcttagttgaccattaatatgtcatttcccccatcagaccatgctctccctaaggctgggaactctggcaagaagttactttgacatttactaattcaacaaataccttagatcacctcctactttgattcacatgatctcttttgtcttatctttatttccaccttacaggtgaggaaatagaggctcagagaatcaagccataagtccgcagtgctacaatcagtgactgtcagagctgtgatccacctctggcctcatatctcacaatggccatctgggcaagaggaaaagctgagagcagtaacaccctctaaaatgaccttcccagagcaggacgagtgtcctcactcagcctcacgaaatggcaaagtgaaggaataaaacatttcagctggaaaaacaatagatagccagaaatcaaccccaattctaccagaagtcataattccagaaaacagaactacatacacaaacggcaatatattccaagatacacataataaaatcaccttggcaatgcctatgcccttgtggccaaaccaggaagggattgaatttaaaagagaaccagtgaaggcaaaaggagaagtgggaggcagaggatgggatggttagatagtatcaccgacttaatggacatgaatttgagcaaactccaggagacagtgaaggacaagaaagcctactgcagtccatggggtgccaaagagtcaaacactcctgagtgacggagcacacagctggaggacttttacccacatgagcccatccaaagaggtgtgcctacccacctacaaggttcagctccctgccacatagccaagagcctgatagtggtgaaacgccagagtaattacaatgaaaatttccaagggggaaagatca

SEQ ID NO: 32543 - DNA, 1103 bp, Bovine  19866881183248
  misc_feature (1)..(1): n is a, c, g, or t
ntgggctgccgtctatggggtcgcacagagtcggacacgactgaagcgacttagcagcagcagaagtttctctctctggagccgagttaaaatggaatacagtcattaaaaggtgatctagtgtaacaagctccccaccaaaggcagagcagaaggttctattcctctgtgagttgttatatgaagtagctcatgcctgacaatcagtgaactaaatccttcgacaacgagagatttataaggacttgtctacagagacgaagtgtttctatagatttgagcagagctgggaccagggaataggaaccttgcacataaatacagtttgtggctttgggattccacagctgggagctctcaacagccactgtgtataaatatgcctatggagttgagttctaaataatgacagtcctacattcaggattcacatggcttccaggacctcagtcagttcagtctgactctttgggacccgatggactgcagcacaccaggctttcctgtccatcaccaactcctggagcttgctcaaactcatgtccatcgtgttggtgatgccatccacccatctcatcctctgtcgttcccttctactccccgcttcaatctttcccagcattagggtcttttccaatgaattggtttttcacatcaagtggccaatgtattggagtttcagcttcagcatcagtccttccaatgtatattcaggactgatttcctttaggatggactgactggatctccttgcagtcaaagggactctcaagagtcttctccaacaccacagttcaaaagcatcaattcttcagtgctcagctttctttatagtccaactctcaacattcatacatgactactggaaaaaccatagctttgactaaatggaatttattggtaaaataatgtttttgctttttaatatgctgtctaggttggtcatagcttttcttccaaggagcaagcgtcttttaatttcatggctgcagtcaccatctgcagtgattttggagcccaaaaatataaagcctgtcactgtttccattgtttccccatctattttccatgaagtgatgggactggatgagttaaaaaggtgt

SEQ ID NO: 32544 - DNA, 1050 bp, Bovine  19866881183579
  misc_feature (1)..(1): n is a, c, g, or t
ncgacttgaaagtaacgaaggctaggcatttgtggagaagagaaacccagacacacttcaaacatgatgtgggcctcaggtggctggaagcctgaacagcgcatcttctctaggcctgtccttgctctgggcctcatcctcccaccgcacacccgagtaagaaaacaaacagcagcgatcaaagcagagccagtggtagaagaaaggacaagcttgacttttttccatgtatttgaaggatgaaccctcagaatctgttgcctttttttctgctctgggttgcagcaggactggagggaatggaaatatgcttgaattttatttctttcaaacagagtcctacaaaggatatctcctagccttagcccatggtctcaaatacaaataacaatatcttggcaggaaatcacagagtggaaaaaggctacagaggacagatgttatcaaacaaaacaaaaatttaaagacttttaaataacagtttcccattcccaagtcgcactctgtggcttttgcttagtacaaacagcacctggaagtcttatttcttgcacaacaatggctctatgagatctttctctttgaaagtgttgttgttgtttttgttgttggctttggacttcagatgcatggattaatcacaagaaatactgccattgggcaatacatgttctatttatccatttacttattacttggaaatggtatataaatatacgtatttgcatagggatagagtttatcacaggcttccctggtggctcagacagtaaagaatctgcctgcaatacaggagacccaggttcaatccctgggtcgggaagattccctgcaggaaggcatgacaatccactccagtacttttgcctagagaatcccatgggcagaggagcctggcaggctgcagtccatagggtcacacagagtcgaacacgactgagcgactaagcatcagcagagttcatcacatgtatattcttaagtaatatattggttagttttgtttttaaacattataaggatgccattctatccattatcttctggaat

SEQ ID NO: 32545 - DNA, 1244 bp, Bovine  19866881189737
  misc_feature (1)..(1): n is a, c, g, or t
nttgacagtaggaaatactgatatatttagtctcagtaaatgtgtgatatgcacgtttcccccaaatgggtgcactctgatattttctaatctgtatcatgaaagattttgggtcaagtccccctgaattcatttcagaggcgccaagataatgcgtgtccagtgcctgtcctttccttgccctcagtgaatatgccatcattctctgtggtcatcatgatcaagattgctctggccatagttaagagaacggatgggtggagttgaatgacggtatctaaatcctgagggtgtggaaggtcattggctcttcatctctgtgtttgtgtcccaggggaggagctccttgctgggcttcctgccttcaggggcacctgggtggggggtgaggggatctatcagatgagctgtctatctggtttccctgggaacgggtttcttctgttttctgttttctgggcggccacatcagactgagtacccatttaccctcagaatggctttttcctggaagcctcagagtcattataagccatccacttctttaaatttttgccatgatcctacttcccttttcagagggttgcagtcttagtacaatagaattcatttgcattttccactaggtataccccctacttctgcccactggcccagcccgtaggctgcgccccctccccatgccctggccctagaagccgggaggagaatgcaagacaccacattcttctccaagatacacattgtggatcccgagtttccaaagtaaccccgtgcaatgagcccggcgggggagcaaggccagtgacagcacccaggaaccctttaactgcctcatgcttcgtgaacgcaggactctggctttccagataactgaaaagcacccaaaacttagctactttaatcattctagaagcgtattttcctaagtgttagcctcattggtccttcatgagtgaacatctactaaaaccccatggtttctgtaactcagagacttaggcaaggaaggttttgtgatggtgacagtgatgatggtggtggtggcagtggtggttgtagctgaattgtgtcccctagaatttgtatcggagaaggcgatggcacccactccagtgctctcgcctggaaaatcccatgggcagaggagcctggtaggcttcagtccatggggtcgctaagagtcggacacgactgagtgacttcactttcacttttcactttcatgcattggagaaggaaat

SEQ ID NO: 32546 - DNA, 1128 bp, Bovine  19866881220598
  misc_feature (1)..(1): n is a, c, g, or t
naatgagtagaggtgggaggaaagtgggtgcccctcctacatgcgcatgctcagttgcgtctgtctctttgggaccctttggactgtggcccccatgctcctctgtccattggatttcccaggcaagaatactggagtaggttgccacttcctcctccaggggatcttcctgacccaatattgaatctgagtctcctgaatctcctgcaccgaaggcagattctttacccaatgagccatcaggtaagtatgcctctcctacaaaggcattgaattcagctttttccaaacatcatttttatcaaaactaacttggttgtgcctgctcactgaatttcacttttgggtctccctgtgtgtgacttttgacactcacatttaatggagttatttgagaattttttccctgagtttttataattccttgtctatgtttgaagtttgcattttccaccttcatattttgccctcttagcagcatgacctgtgactgtggatgctcttgagtttctgcaaggtcaaattgttctgattttctttgtggtgaggacagtcctaatcccaagtgagaaggaaaaaatcatctctgacattgtcagccaatcgcagcaacatttttctctggcaaatccttgtccccatgtctcagataatgggatcccactgaattctaagtggaattcagtgtccccacttgttcctgacttgcaacttcttttaaaacagccacaaaactggaaacctagcggacatttccagccttgagatacagcagaaatgggaagttctgttgcaaatgatatgcctgacagttacatgtaagtgattttatcagggggtctggtggccagttttcagagtggcaggcgactggggtggcgcttgggggaacctgtcctctgtttcatccttggtctcaactgtggtttgaaaactgtatttggattgcattctgtgttgtgattcattccttcttgttggaacggcacagcgaccagcctcgttagctctaatagaccttttagcactctcaaggttatgtggtttccaagtattacaaactcattcgtgtcattctaatttaaacatgatgctgttcttattactgcatctcttttataaactacc

SEQ ID NO: 32547 - DNA, 1239 bp, Bovine  19866881332662
  misc_feature (1)..(1): n is a, c, g, or t
ntattcttgcctgggaaatcccatgggacagagaagcctggcaggctatggtccatagggttgcaaagagtcggacacgctgaagtgacttagcacacatgcacgcatttctcaaaaatcattgttgtcaatgtattgttatacttgatggaaaaaactaaattactggacttgaaactgaggtggtcgagagactgtgtcctttcactccgtgagtgggtacatgttcacatctggatggttttagcaatgttctttcacgcatggaacaataatattttctttgaaatggtccactaaacccaaagggatacaaacaggaaaccgtgttttaaccaaactcttatctttcttatgtgaaaatcaaaccgcatctgtctatatgccactttttgtcttttttcccttcctattcggatgtgtcccagatggggtaggctgaagtgacgctagttagctcactctttttgcagccattgctcccttagcacgttgaggaaccgctggaccatttttacatgctttgcggacttagcttcttttattctagtttctgtggtgtgccaatcaatgattagaaaagaagggttgtgagccaagtaccattttttcccccaccttctccaaatcatgctttgtgtgacttgtagccactcatctaatttctgagtactgattctagttcctaattgtggtgtcaatccagtttttcttgctaatgttgaggccatttctgtattgagtgtgttcctgctgtaattcaggcattgagttggaatctgggaatacagatgaatgagacagaaatatgtcattcttactaatttctgtgtactgggtgttccaaatgctctagatgtatgaaaaagcaatagcaatctgtatatttgtagacattacagttatagattgattgaggagccagtgctcactactctttacatagtgctgattaaacagtatccaggatattgcctttggttttggagtctcaattttaggttgaataaacacttaatatgagttaagaaaagagcaataagaatgtttagaaacagtggattttcagactttggttttttgcttcaaggtttttttgttttttttttttttttacattcaaggatgtcttgtagtactctgaaaaaaaaacgagagtgtgaaagacatgtataatttatactactgtgtttgcattgctctcacacatcaatgtatgagtcctgtgttattacagat

SEQ ID NO: 32548 - DNA, 891 bp, Bovine  19866881423819
  misc_feature (1)..(1): n is a, c, g, or t
naaaaaaaaaaaaatgctccgttcagtgtggtgaatttccctagagaatgtgactgcatttacaatggacactgtcaaaaataagacttgaatataaaaccagggtctaggatattacaatctcaacagtgaggaggacagaaacaaccataggccgcatttctacatattgaaattcctgcagccagatgttcctgaggtttattaaaatgtgatctgattaagggattactgggagggttgtgctataaatcatgctgttagtcacatgcattcaaaggaattcctacaatgctagaaaagttgaatttaacattggagagtgtttacattgccaccaatcgagtaacagagaggaagtgggaaaaaaaaatccacaaaccagagcaagcatgcctcagggagtaagaagattacaggaatttagctgtttattagggcagagacatgctgtaaggattaaaggggatgaaggaaaggggtgcttcaaagtccattagtttacctaatgcaaaacgtaaacgttttctagagaaaataaaattaaaatatgatatgtttttgacaactaaattacaagtatctttgtaatttatatattctatacaaaaaaagcaagaaaaaactgctgtattgtttaaatggaaaataccaggttcaatccctataaaagcatcaaacgcataccatttaggataatatcactgatgcacatttgacaacaaaattacaaagctctttgatatactgtgtgtgaagagtggcaattaaggccaataaaatcaaatgaagaaaaaaaactaattaacactaacatatcattatgacttactagcatataaactcccatgcctgctctaaattgccagcaatggcaattcccaaattcct

SEQ ID NO: 32549 - DNA, 1294 bp, Bovine  19866881528065
  misc_feature (1)..(1): n is a, c, g, or t
ntgccccccagcaagtgggccctgtagctgtggcacacgggcttagttgccccccagcaagtgggccctgtagctgtggcacacggacttagttgccccccagcaagtgggccctgtagctgtggcacacgggcttagttgccccccagcaagtgggccctgtagctgtggcacacgggcttagttgccccccagcaagtgggccctgtagctgtggcacacgggcttagttgccccccagcaagtgggccctgtagctgtggcacacgggcttagttgccccccagcaagtgggccctgtagctgtggcacacgggcttagttgccccccagcaagtgggccctgtagctgtggcacacgggcttagttgccccccagcaagtgggccctgtagctgtggcacacgggcttagttgccccccagcaagtgggccctgtagctgtggcacacgggcttagttgccccccagcaagtgggatcttcctggaccagggaccgaacccatgtcctctgcattggcaggtggattctttaccactggaccttcagggaagtccagttgctatttttattgttgtttgttgttgaaaatacaatcagaaagaagaaaataaaaatcaccaataatccgaccattcagaaaaaaatgatttattatcctttccgacatgttgtatatgtgtttgtatgtatatatagttttaaaacttcatcttatacatggtgaacatttttctgtttcttaaaacattcctattttagtttatcctcagttgttttcaccctaactctttggtcatcatttttattagctttattttctgtagtctgtatatgaagacaagaggcttttccattgtctcctaactttgaatgtctgttctaatactaattgattttttttgaaaccacacaagacccctcttaactgagcggctctccatctagggaggatgcatctacgaccagctaccagttctgcacgagttttaatggctatatggaattctgtatttatttagacacatccaaattcggggcagttatcttttttccgagtttttgtttggtcactagcatcacggtggatggcctgtttgcaacatggtatttgtgcacattcatagtcatttctgtgtattagaaaaattcccagaaatttaaaacccattcgtgtccccagtatcaaatgtccaggagcagaaactgttatctggccctggttcctgcagaatatacaggagctctatagtccagtgcttcatgtgtcatccttatcattttgttaacaa

SEQ ID NO: 32550 - DNA, 735 bp, Bovine  19866881664474
  misc_feature (1)..(1): n is a, c, g, or t
ntttgtgaaatgaattcctaaaaacagagttgatttagtctggtgggtctacacctgctcctaactagctgtgcaggtgttgctttaaagcaggctttctggttttgtggaagtgctgtgtgctgtgcacgtggcccacaggctgggaagccagacagagatgactttaattgagagtggatgcttttgtgccacagttgtcatgcaatacagataaaatgagcaaaaatgggacatcgtgtcccatgggaaggcagcattacagttgagctaataactcttttatgattgaaaccttattgcatgattatagagctctaaagttgacttagaaactctactgcctgtttggatccacaggtttatcaggggccttgaaaaaatgttcactgaaatactcactattattgtctgtaactcattgaggtagatgatcacgtttctgaggctaggagatcagttttgagtaagattgaaatatgcgtattgtacatttgtcttgataaatgtactagtctagaggtcatgcactggagaaggaaatggcaccccactccagtgttcttgcctggagaatcccagggatggcggagcctggtgggctgccgtctatggggtcgcacagagtcagacacgactgaagcgacttagcagcagcagcagaggtcagttaatatgtttgtagtttttgttaggaggtgaaggtaggtattactcaaatttttcataaagcaa

SEQ ID NO: 32551 - DNA, 1537 bp, Bovine  19866881739529
  misc_feature (1)..(1): n is a, c, g, or t
ngaaaatactgtttctactgcacaatttatcttgcttcgccactccctgaagcacaattcaagcaaggctctttccagggctctattttcgataaatgaagcagcaaaaggagaaattactccagccccaactctgccatttattagctgtgtgatctaaggtaacttatttcacttctctgagcctcagctcctttttccgtgcacagtacaggctccataatttgagggcccactgcgaactgacaatgtgaggtcatttttcaaaaattatttaaaaattcaaaaagataagtgctgggcataaaagcaagtctggcacgcttcggagctaagcacgaatcctgtgctggtcacaggtccatgaatctggccctgctacttacagctcaaaggagatgacacgtgagaaaatgtgcagtgcagagtctgacacacaggggcgcaggaaatgttggacgtgctccccaagttatgtctgccctcggtcctccagaccgtggcccttcccgaagcagcgacactggtgatgatgcagacgggccctcctgggaccttgggttatgaattgagccagcacctgcattacacacggtaccacggcaggatgacagacccagcactgaagacggttaggggcttaggaacaagtcagcgccagcatctctgggtggtcctcaccggcaagatggcagttgtcatttatctttcccatctgcttcacagagcgattgtcaagaggcactgcaatcacagctgcagactgcaaacttcacagggccctgcagacccaaagggctgtggagttttttattttttaacttgtcaactcagaaagtttcatctgaaaggtcagaggaagcagagggatggggaagccagcactcttagttttgaagatgagggaccagtgtgaaggcaagcaataggagtctggcctggaaatggaagttttaattacttaaatcgctgtgggtcagagaatggttccacttgatcatgctgaaaccaaagtctgacttcagccaaaaccagaaaggggaaacccaaaaccacaagtcacatttggtttctgtccaaggcagccctccaaacccttcagcatcccaccatggtggcctctggcttccctgggaccctgtgggtcacgtccatgcagccaaagcatcgacaacaatcagctcactctaatgggcagccttggaaaagtggaaaaccccacctcgaatgggaagacttgcaagaaggggctgctgcaaacttacctgaatcccctacccccagtaggagggctgtgctgaaccaatattgaagacattgctggtgtactgacctttcttcagccttagacccttccaacctcataaacttttccaaggaaaagaagtcatatgcgagcatgtgcatacacacgtaccacatatatgcgtgcatatgtgtaagtatgagtatatccagatcatgtgcatgtgtgctaagttgcttcagtcgtgtctgactgtgtccgaccctatggactgtagcctgccaggctcct

SEQ ID NO: 32552 - DNA, 964 bp, Bovine  19866881852016
  misc_feature (1)..(1): n is a, c, g, or t
ntgtgtagcccttaggttagaatgagagcgtcagtatagacccagtgtacttaactgctaatgaatgttagctagttcacaactgtaactttgatgtacacacctgatatttgtacagtaaatacttcacactgtacatagaaaaactgttgatgtttatgagcattcaggctatcagagctactgcaagagcaacagctgtagtgcttttaaccactttttctccccttcatgagatgaagattcgttttcattatttaagctaggatctttccgtgcctgaggtttaatgacaggaaacgatcacgactcttaaactccgagtgagctcataaaccaaaagcctttcatgctgtctgtttccaaaacagattcaataaacatcattttgtacattactctgttcccgggctgtgtgtcttgattgaatttgcaagcgtgtccatttgcaaattctgagtctgagagcgtccgttagacctctgcatcctgtctgcacactcccggtgtgaggaacccgccttcccggcttctaggtcccttttcctgttgcctccacccctgggttaggcagcagcctgacctcagccagtctcccctgggctttgcttgccatcctcatctggattggcaagtcatttcctggaggaacagcctgtctgcggaggagcttggaaaacaccgaacagagtctgcaaaggcaaggtctcttctgaagccagcctggtctctttcctgagtgtttgacccagagggagcctttgtaagagccttcagagaggtgtatcatgaacggattgaaaaccctggaggaggtcaaggagaacagtcacacttttcactgagccttcagaaactggcacagtgaactaggaatgccgagaggtctgccttggtagatttcacgtcactggcgcactacctgtattcactcatccagccactcatcttcctaccaaatatt

SEQ ID NO: 32553 - DNA, 1412 bp, Bovine  19866880143189
  misc_feature (1)..(1): n is a, c, g, or t
naaaaggcagaggaatcagagattaaattgccaacatccactggatcatggaaaaagcaagagagttccagaaaaacatctatttctgctttattgactatgccaaagcctttgactgtgtggatcacaataaactgtggaaaattctgaaagagatgggaataccagactacctgacctgcctcttgagaaacctgtatgcaggtcaggaagcaacagttagaactggacatggaacaacagactggttccaaataggaataggagtacgtcaaggctgtatattgccaccctgcttattcaacttatatgcagagtacatcatgagaaatgctgggctggatgaagcacaaactggaatcaagattgcagggagaaatatcaataacctcagatatgcagatgacaccacccttatggcagaaagtgaagaggaactcaagagcctcttgatgaaagtgaaagaggagagtgaaaaagttggcttaaagctcaacattcagaaaactgagatcatggcatctggtcccatcacttcatggaaaatagatggagaaacagtggtagactttattttggggggctccaaaatcactgcagatggtgactgtagccatgaaattaaaagacgcttactccttggaaggaaagttataaccaacctagatagcatattcaaaagcagagatattactttgccaacaaaggtccatctagccaaggctagatgtttttccagtagtcatggtttttccagtagtcatgtatggatgcgagagttagactgtaaagaaagcagagtgccgaagaattgatgcttttgaacggtggttttgaagaagactcttaagagtcccttggactgcaaggagatccaaccagtccatcctaaaggacatcagtcctgcgtgttcattggaaggactgatactgaagctgaaactccattactttggccacctgatgcaaagagctgactcatttgaaaagaccctgatgctgggaaagattgaaggtgggaggagaaggggatgacagaggatgagatggttgggtggcatcactgactcaatggacatgagtttgagtaaactctgggatttggtgatagacagggagacctggcacgctgctgtccgtggggttgcaaagagtcggacacgactgagtgactgaactgaactgaagcaacttagcacgtgtgcgtgcacacacacacacacagagcactgtatgttctgattggatatctgtctcaacctaataaaaacaactctgtgtcacccttatcaaaaatcattccacttagataataaatgcttgtaattatattctcttcaaaattacaaaataccactttgattagataaaataggcttaccagggaaacctctacagccacccaaacccta

SEQ ID NO: 32554 - DNA, 1129 bp, Bovine  19866880355825
  misc_feature (1)..(1): n is a, c, g, or t
ntctgtcttaatcctctttgctgggacctaagaagctttgtaacgtacaaaataattacaatctttgaaattacaaatctcattttaaacttatattttaactttttctaaaaatcctatcatagattttcttccaaaagaatgcatggtatcgattaatgagtacttaaagtcctgagttgctaaattaaaatgtttaaattgctaatgataacatgaacttcttttaaagaacagtgtccatttatcaaaatgacttcagatatagtttttattttctctcatttgaaaaatccttcttataagtactgctgctgctgctgctgctgctgctgctaagtcgcttcagtcgtgtccgactctgtgcgaccccatagatggcagcccagtaggctcctccgtccctgggattctccaggcaagaacactggagtgggttgccatttccttctccaatgcatgaaagtgaaaagtgaaagtgaagtcactcagtccgactctgtgcgaccccaaggactgaagcctaccaggctcctccatccatgggattttccaggcaagagtactggagtggggtgccattgccttctccttataagtactaatgaatgacatttaagttacattctaacaatctctttaagatttatttccccccaagtataaccatatcttaagaaatgaccgctgtcctatcccatcatctcaaaaaagttatgctaggatttttgcagatttatatttaaccactgtacttctagtactctatcaatttcaaagccaacttaatacaagcattcaggcacatacgtatatacttgcccacacaccaacactggactttttcttaacatctgccaactgttaatagtttttaccagcgtctagccgtgtttatttgtacctggtttctaataatttttcttcttctaagacatgccatagaactgaggtaacaaatactatattgaattttaagaattattctcacagggataaaaagcaaacaaacaaactgcaaggcaagtaaaattctattacctctaatgcaaatcagcctaatgtcattcaggtagctctatttttgctctgctacttctcctattccaacatcgccacctctaaacta

SEQ ID NO: 32555 - DNA, 1631 bp, Bovine  19866880379882
  misc_feature (1)..(1): n is a, c, g, or t
ngctgcaagaactcaagtcctgagatttgaaaccacctcatctgtgctatagagaattttttcaaagtatctctactttaaatcaggcgtgtatctttcatgaaattggcaggtggcccaactcccccagattttttatccctttccctgacaactttgctggataagactttggccaatttgattgctccttcaactttttttcttgctctttttcctgaccagcctccttggtagttaacacattccttctctggatatttatgcctttgattggataataaagtgaagtcgctccatcatgtctgactctttgtgaccccatggactgtagctcaccaggctcttttgtctgtggaactttccaggcatgagtactgtagtgggttgccatttccttctccaggggatcttcccaacccaagcattgaacccgggtctcctgcattgcaggcagatgcctttaccatctgagccaccagggaatctccttgattggataatagtaagctttaatcctccctctttgggcctgcaaagaattctgtcactttagagtaacttttacctatgttagttcttatctatgctcattttagaaagattattttccaaattctgcttgtgcttcacagggtctcttcattcatcttcatacttctctgcttaggcttcactctcataggattaggaagttcacttaatgttgtatgtaccatgggcactgcagttctattttagtttgctctgtaccattgtaattccttacattgtattggcacgttggaggaatcagggtatggtcaactttgtagccctgggctgtagtaaattttttacctctaattgcttgcttctttctcattaacatcaaagtggattatatgtctgttttcttgattattgattttgggagtggtgttagatggaaatctcttggtaaagaaagagtgtaatctgcttataaattgagtattatagtttgactttagtttacccctaaatgttcatatttatacttggccttacgttccaatgtaattttcattatgttttagcaatgaaggattttgccagaatatcaattgagaaattctcctaaatgtttctttaattgagccatgtgaggtataattaactatctaccaaatttcataatagttttaattcaaatagttatgatgaaacaagatctcctttttggcataaaaacaactgattttaacctgttctctcaagttttctttaatatctttgaaactaaactgcaaaagcttttaagaaggacactatatttaatagttatatttaatagttttatatttttatcatggtttcatacttgattgaatgcaatcatataaggtatgaaaattatgtaagttgaagttatgcttcaatggattttaattacatcggggaccctcatagaagagcggcttaaaaggatgtttgaaataattaaacattacattattttattttataggagcaaagtaatcctttgtacagtagcaactgacagcgtgttttggcacctgtgttagggatgaaaaaattatgtctttgcatatcctttgtgacactggaatccttatgctataatggacatgcagaagtttacttgtgtc

SEQ ID NO: 32556 - DNA, 848 bp, Bovine  19866880389694
  misc_feature (1)..(1): n is a, c, g, or t
nccaggtatacatgtgttccccatgcctgaaccctcctccctcctccctccccataccatccctctgggtcgtcccagtgcactagccccaagcatccagtatcgtgcatcgaacctggactggcaactcgtttcttacatgatattttacatgttacaatgtcattctcccaaatcttcccaccctctccctctcccacagagtccaccatccatcagtacatgatattattaaaaaattgaaactgtaataatatcatgtactgatggatggctgtggctaaatcttacaaggtgagaaatctgtcatgtctctgtttaattctctaggggagttttattttcctaaatcaagacataaattttctcccaactgtcatatgatttgaatttaggcacaagctgagaatttaggataccttgacgataatatttgtttgtaggaggaataaaaatccttccacatcgtctttgatcagagagaacattaaagctcaacttctgtgttttatttgtttctaaagcaggtttgatacctgctgtttcaagctttagcataatttactaacatctgttgaaatctgctgacttatatgatttttcttagagtgaatgatatagtacttaggtcagagcaaaacatgtaacctttttttcatgtaacttaaaatttttccaaaagaaaaaagaaaggaaaagaaaattatatttcatcaaccagagctaagaacttagattttttaatgtgtacctttatttatatatgtatgtatgttttaaaaatgaaacttgaaaacataatgagcataatgtgtcgaagaagatattcttcagtagttatgcacatt

SEQ ID NO: 32557 - DNA, 3854 bp, Bovine  19866880400955
  misc_feature (1)..(1): n is a, c, g, or t
ntgctgctgctgctgctaagtcgcttcagtcatgtccaactctatgcgaccccatagacggcagcccactaggctcccccatccctgggattctccaggcaagaacactggagtgggttgccatttccttctccaatgcatgaaagtgaaaagtgaaagtgaagtcgctcagtagcgtccagccctcagggaccctatggactgcagcccaccatgctgaacagcaaataaagtgcagtcactttcttgaataatggtgatactaatgaatatatatcgcaacacttttcagcttcaagaacagaaaactccagacacatcaaaatggcacatatcaaactctaaataacaaaattatttaacaggtaattgcaaactctctgctcatcaaataaacaggaactcattttaagattaagacaagtaataagtcagttcaggttgaatttttagatgaaagagcaatcatgagcaactttctaagccaggatcttgattagattttttcctaacattaacaacaagattcataaatacacagtaagtttaagcaaaaaataaaattcacatatatttcaaggagcaactgttttatataaataatttatcattacaaactacctgaataaaaatcaaaagtgaattaccagcagtcagtaaaagtaactccccagcaaaaacttctgcgtatatttctcaacatgaagtaacatgaaagaattcactcatggctaatatatttgtcaagaaaaaaatggttttttattactgcacctaaataatttgaaggcacatcaactgtaattcatgtggtttttttttgttatcatttatccagtggtatatttatcagttgtcatatcaaggctctgccaggagagtttttaaacatttattaagaaacacagtctatagtcaaaatgagattatgcttattatcttcaaagaatctgaaatagcctattatatatttattggctcctaggacatgttccagccagataatgatcttttgtcaaaataagagtgatccagtaatatggtcctcttcacccaggctgacagcaactctcagaaagtaatcaaagcaaaactattcacctaagtgcaagtgacagaactagctcaaactgcttagatttttacttttgtttaaaattttagccccttgaaatgtaagtggagctaatgcacaggtattaaaaagcagcagacttataatcaataccttcactaacagctattccccaggctatcttaaataggagcactagagttatgcaagatggaaaatacccaattaggttttcctggaccaatttaacttgtctagctattgaatatgttgacaataaatacgtccacgctcttgagtatgtgagagaaaaatcagctctttaatcaccagtaacactagtctagaaacaagccatctggcttatctctgatatactctggggattgtatcattctatcttttaaaataccatgcgtaaattgctaacctcagaacaaacttaagtttcagatctctttacaaaaaagtacaagaaactgtttctttcaagtatctgagagtgattctaagagaaagtcatcaactgctctccctgctaaccactttcaatagtgccagaaacagagaacaaatctgagctccttgttcagatacaagccaataagagaagcatattttcacccagatgcttgtgtcacagtcagccagtactgaaacactgtacaagctgttgtagctagttgatttgggtggttaaatattgtctttgaacacatgtgaacaactcttttgaacctgagtcattctctttctcttgctctcgctctctctctctcttgcctgcagtgcaggagacctggtttcaatccctgggttgggaatatcgcctggagaagggaacagctacccactcctgcattcttgcctggagaattctacggacagaggatcctggcaggtgatgttccatggggttccaaagagtcaaatgtgactgagcgactttcactttcactttctttcatgttataaaggactcactgggctcctctggtcaatgttaactacaaatgtagctccacaggcccgagtaactgagcatacttctgtaaagaatatgttctaaagtcaagggcacagagttatcacaagccaactcaacttcagtctactccacagccattaacttaataggttctaggacaagaaacctctgggaaatgattgttgttaagctccatgaggattggagggacagggaacccttctgtccctctagggttccccgctatgtacatgtggagtagagagttaagaacaagttccatcctctctgcctaacacttcagcagctccttcctggggaaaaatcacagctgccacactaagtcacactttaagccttctgggtggagttactgttccttcaagacaggaactcaggttccctcttcctctactcttcccatttctggtgttgaagaggtgcacatgcatgcctgggctgaatctggacctctatgactactctgcctgatcactttgtgtaattttttaaaaaatctgatctggccttcgtctcctactctgctccaattctccacctacaactggggaggtaagtgtgactgaggctccctggaacagaaaaacacagtttagccttcaaatccctcactggaaaagccagacatggaaggttaccaagcattcatccagctaggaagcagcacttcatttccctgctggtggggaaacaagtcattgttcagtccagaaccccacagaagggctaaaagtgaaagacaaaaacatcaaaaatctcaccttgaaatccctttatccaaaagccctcagcaacaggcaaaggaaaatttgcaccaagttttttttctcttttttcatgtgtcttgacctcagtctgaccctcctgaagtcctccccgcttctactaccacatgttcaaattcatgaattttcaatgtgtcatcttctcaaggaaatcctcccagcctgcccagttagatttaagcatcaccgcctcatctatcctctcatgtaccttatttatatctccattaagcactttattttaattagttatttaaatatagctcccctactaaatcagctgtgcatctctggccttgagcacattgtcaaggttggtccctgctataaggcacactcatcgcctgtgaactcccacagcactttgaggggctcctactcagcccagtagcactcgatcagcactatcccctcaactccttttcttttttttttttggaagaaatggagagattggaaggattttgtatcatagataagcaatctgaactaatatgactgcccaaccaggaagagctaaaggagcaatgttttgtctcagcggatcatagctccatttggcccagagctatggaaattcttaaatcatcaggctcaaaggaagatccacagagagcagaaatcagtcatgactcaatgtgaatgaagcactaatggaaaaatcaggcaggataggcggaaggttgggtttctggtggcggaggaagtcctcagtgacaaaatgaccttcagcagagacctgaaaggggaggaagagaactgagtgggtggtgtcccagtgtaaactgtaaccaaatcttggatttctactgcttatactcttcaaactaaatcaattgcctctaggagaggaagatgctgatgaggaaaatagcaggagaaagagccctgttcttgacattcagggcacattaggaaagcagttcccaaacccccaacaagacacagagcactatcccccgcccaccagggtcctcaaccacag

SEQ ID NO: 32558 - DNA, 695 bp, Bovine  19866880571070
  misc_feature (1)..(1): n is a, c, g, or t
ntttttttttttgttttttcccttaagggcaacattgctgaacttcgtttgtctccatttcttccatactctcatatgcctccattgttttgccattgctatcagctggaatatcttcccccataggaagcagttcaatgtttatcacttttgtatcctttccccttgtttccctgaacattttatacatgcctctaaatatacatttacctctaataaaccatatttatttactaatttgttatatttctggaaagcaaaatccaagccttattgatcttcacatttcctatctcttcaggggaactggcaaacaacagatgctgaaaaatgtttctcaaaagaatattaaatgaatgcactaaccggtgtgctctgaggatccagagacctctctgtaggcagtgtaggcagtgacagcaatctttttaaaatgcaaatctaatcatgtcacttttctgcttaaatccatccaaaggcttcatgcttcacttagatcccaagccttggtgtgaaatccacagtcttttctggcctgctgcctcttcctcctcctccagtctgtcgctcctcccctccccccacttccctggaaactgtcctcagctgccccagacccctctgcaggggatagtcttccctgggcaccaattagctgttagctgttcctccctccaactccaggtctaggtgtg

SEQ ID NO: 32559 - DNA, 1087 bp, Bovine  19866880612376
  misc_feature (1)..(1): n is a, c, g, or t
ncatcacacactaccagttttgccatctcaccttcccaggaggccccaagcagatattcttaaagctattctcttttttaagaacattgttttaaaatgcctatcaagacggaaaaccaggaaaacatgtgaaggactaccctgtagctgtattttctttcttctgtaagaaaaaaaggaatgcttcaaagtgcatcccatattttacatttgcattgaaatttaattttaaggatatgatttctaataaactgaaatttgcaaataaatggtttctcaggtttaaacatattttgggcaaaagatgagaagtccaattctaccatttgaggcaccaaaatatgcaaatattagaaaactaactgtatcatcaaaagaacatcattttaggcaataaacctttccacttcagaaggcttggctttatgactttatatccagtcatccacatgagcgttctgaagtttttcagtgaataaaaataagcatctttgagggggaggggaacagaaaaaaggacattttatcaaaggcatgcagatgatgtggtttatacaggactttaaagtagaaccacaaatggcacattttaattttccctgtaaatttctgggggaaaaatgcagttgtacattcttatccaggatgttcctcatctattgatacctgtctctctcattctttctctccttctctctctctctctctctctctcacacacacacacacacacacacacacacaaatgtgcatgtgcactcacaggggagttacaaggttcctaattgggaatgtttttctctgctctttaatccactatgaatgtttatcactaagctagttctcctttggcttcaggaagcagccagtatcccagcaggggagaaagagaatcagaaaatcagttctggaaggtctccaggtgaggattaaaaagatttttcccaaaaggcatcagcagcactgcatttagcatcagtgagtttaggaattcacctgaccctcttcatatgactctgctacaggtatgaaagagggcattcacttgagacaaagcaatcccactacggagcggcataaggctcag

SEQ ID NO: 32560 - DNA, 1075 bp, Bovine  19866880639386
  misc_feature (1)..(1): n is a, c, g, or t
nctatattagaaatgttttattgcactgcactacagctatgaagtgcaaggaaccatgaagattgaaaattacaaatgacagatgtgtctctttcttcttattttttagccttctttgaatcctggggggagccaggtgcttttgaaccattggaaagtgaggaattttgaagtacaacgtggtgacattgtgtcattagtgtaagtaaatcagaaacatactatattcctatataagacaatttagaattatctgatttagctagtaattccctgtttataccatattgtcaattactaaattaataggttcatgtaaaatgtaatacatttttcaaaatctattttgaaatgtaacaatactatgaaagaagatttttttctatgatacttaaaatttatcacttgattgacatacttggttttggcaaaatgtttttgatgaaatattgattagaaattattatattgatgatctagagtacatgtatctggtattttgagttattttgaaatattgcattttggaagcaacttgtatgttactctcatgctttattagctgtgtagctacaaaatatttctagaccattgtaagtgtgacatgaaattcagtggcatttatatatacgtatcagtgatttaactgaaaaaaggaagtttggaagatggtagactggaggcttttgtttgggaccaaaaggtggcactgtttctctgttaaagtattacgactggtcaggaacaagaatttcattctaatcttagtgtagagaaggaatgtcaaaatgtacatgactgcacaatgatattcctatgtttgaatgatttagatttgagatttgtttgtttattttaaaagtaaatttacactgagaagactgcaaccagaacttgcctaatttctactcttttcagctacttatacaaatgttttaacatgattccctgttaagccagttagtgcattagggaagcaattaatgtagtagttactgttatttgttttaatgatagtaaaatcctactgtttggtgaagacttggaacttataagtagattctgaattagaata

SEQ ID NO: 32561 - DNA, 1844 bp, Bovine  19866880689425
  misc_feature (1)..(1): n is a, c, g, or t
natagtaaaaattgacatattaaaaatacttagcatataatgctcagtaaaaaaagaatataaaatttaatttttgttataccatatatgtataattataatattttaagatatatgatagggtactttaaatatcaatttattatgaatgtaattttgtgtatgccttttattgtttacatgcaataaacatttaaacatatgtcatattttaatatattttcaaagctcctaactgataatttctattctttgaattaaatcatagagaagtcttgtaggtcaaatccctcccaaatacaaattcttgcttctttacaatccaatatcaagtttctcttttaacactgccttttaaaatattttggttgtttaaagttccttcttaattattgacctaatctctttctttgaaaaatctgcctctttggtttcagttcttttctctgtgattttaaggaaatgcttaaacatttcatgtgttatcaagacttactcatgaggatttatgctggagtgttaaccctgggagaagattacctcacagcatagtgaaatagttattgaaagcgaggttcccttctgtgtttgcgtgttcagatttgtttatactggattaaaaatttcatttggtgtgtgtatatctatacttttccaattcaggagagcctgatggactacagtccatgggttcacaaagagtaggacatgaaggaggactaagaactcatactttccaattactaattgcagtttatgtcttccttctgcccttctcatgtttgctgcatattttctaatttctttccactagagtaaaagcgacaagtttctacaacagtgtcttatatatattgggtgagccaaaaagttcatttgggttttcccatacatctctataaaaacctgaacaaccgttttggtcaacccaacagtaagctcacataaatatttgttaaataaataaaaatgatttaacatttttcaaaaaaaaatctccagaagttctgagatgtgtttgactattagaataatcactgaggggttaaattatattaaaaatcacatgattaattagtagaaagtcatgactagaagctgatgactctgataactattgctagaatgaattcattattccaggatgcagtcttaggaaaattctaaagtatgattaatgtttgaagtgatgatcttaagtagaagtattaatataacaggtaaggagaaatgagtatgcattgtaagagtactgcctggtgaacttttgccaggtggttgccaggtaaccaccacacagatgaatgcagagaacatcatcttcctcaggctccctctggtcactgtctcacccaaatgattattagctccatagattagttttgcctgttttaaaaggtatatgtaaattgaattatgtaatacatacttttttgtatctgacttctttcactcaacaatatgtctatgacttcatccccactatgtgtagagaaagttcatttttagtgctatgaagtgtttctctgtaagattactggacaatttatatttcagctctactgttaatagacatttgggttgttactgattttttggaaactgtagatacagcttaaattttctcatatatatatatatatatatatatatatatatatatatgaatgtctcttggcttttgatttaagaatagaattgcttgggacatagggtatatggtatgtctagctgtcaaagatgtagctaaagattattctaaagtgttgtattatattttatgtattagaatatggtgaacattaggggatggggttttgataaaataagaatcatagtggcag

SEQ ID NO: 32562 - DNA, 772 bp, Bovine  19866880729130
  misc_feature (1)..(1): n is a, c, g, or t
ngaaaaaagagcatttgattcttatacccttttattacaaatacttttgaagttttctgtcttcttaacaaattctttggtgtttaagcatcccctttatttagatcactgtaactagactgcaagggtacattctgcaaactttccagttcaatgcaataattcagttactacaaaacactactattaaatatgtgtgtggtgttccctgctaataaaaacagatattgagatagctattcaaatgaatagttttaattatgaaatagatgatatataattaatgaaatattaaattgagataataaacatgtctacatattaacaagaagacagattactatatgtaatccaagtcagctacatagatatgtctatgtactgacaccaagatacatctatacaccaatgaatcttcaacatcctcatgaaactgaataaggctttcttattcactgctatgtccttccccattgcccagaagaaatcacgtttccctctgatgcatcctcctgacctaaaaagaaattcatggtaaggtatgtagcaacatcaagaagttggctcaacagataaaaaagattttagaagggtgctggaattatttccccaggcatacgtaactgaaaagtccaacctcccaaacaggtacagtgcaaagcaatctagtcacttcactttacaatatcagtgaacaaatctgtgaagataagaccatggattttagatcctttagctcttcattgctgaacctgatattgaaccatatggt

SEQ ID NO: 32563 - DNA, 1245 bp, Bovine  19866880749536
  misc_feature (1)..(1): n is a, c, g, or t
ntatatatatatatatatatatataaaagactcttcttttactatctaatatacttctattgaaaaactcttcaatcttttcagtctccaatagaatctaggcatctcttgttaccattcaacccaaagctgcaaataatgaattttaaataattgaaagtatgttgctgtttagttgctaagtcaggtctcactcttttttatgacctcatggactgtagcccgccaggctcctgtgtccacgggatttctcagacaagaatactggagtgggtagccatctccttttccaggggattttcctgacccagggatcaaatttcctgcttggcaggcagattctttcactgagccacttgggaaacctaactgaaagtatatcacatctgattttattacttcatagggatttttttttccattacaaattttacctggaactcactacatgaaacacttgctctaaagtcttaaaattccaagagtatatattctgaaatcagaaaggtttcctagaccaggcagcaaatgaaaatgtaactatctcacacagcaacttggcccactataaaatgcacaaaggacaaacatcaaagtactgtctagattgtatataatctacttaggcattttaaatattttaaaccttttttaaggcaaatggatagtcacattacctttaaagagcactctgcctctctaaccaactctaacaaaattctagcatatgtgggtttacttcaatgtatcatatctacaaaatgtaggtatcactaaaatactcacatgtttaaggagaattaaatgatattttgtttagaaataaatgcagttagtgcttactgctcagtaaatagcaattaataataaaaaaatgtttatccatacatactcatgcaattccacaggcactttttaatctgggtcatgaactagagtaaatgtaaaccagaattcattatatcttttaggtttagctacaaagtcccaattctcagttttactgcattactgaccacttcagagtcataatagtttttcatttgctccctttcagatccaaactccttacttcactgctcacccaagactggcactctttacagagttcactagcaaagaccttaaaattcttttatcatttatccgttagtggccgagaatagaaatatcactggaccttcacctcaaataatcctctaaaaaaatactgagtgacgagttgggccagaagttcagactcaa

SEQ ID NO: 32564 - DNA, 859 bp, Bovine  19866880756434
  misc_feature (1)..(1): n is a, c, g, or t
ntgtggtatggtgcaagggcacaaatcttgaaaggattaggctagagtgtgatttcagaaaaaagagaatggacatttactgatcagctcacaaagagccaggtactgtgattggtgctgtgccatctttggagtcaggatacccacaccctccatgtgttagttcccttactgtgtgaggtctttaacctcacagagcttcattcttcagtcctacaagaaaaatgatcatcatcattactcccccagcaggttgttgggaggaagaaacgtcatttactctgtatacaggatagttctagaggagtcacgattactgtttttttttttttttttaaatttattctcctttatttccccaaagttttaaagtcagttcattactattatcttagcaaaatttggagagcacaccgagaaagaaatttgctaagaagaaaaaaaatagggctgtgaaattaaggcattagcttattgtctacagtgcttctcaccctaacgatggaaatggaaaagtaacgcagaatgggggagatggcgagatgaaggtaggtataactattctgagcatctcctctgtgaggtgcagaagcaaaacatgagaatggacactgcatataaagaggacacctgtaagtgccttaaaatattacagttaacccagtaaaagaggattggagagtctcttcagaattcctgggaactctgaattatagtagaagaccaatagctgaataggtgaaggatagcagcattattattaagatgttttaaaaccagggcaagggtctaatttttatgactcattacagaatacagtagactatatcccaaaggcagattatgaatttgaaatatt

SEQ ID NO: 32565 - DNA, 1070 bp, Bovine  19866880765900
  misc_feature (1)..(1): n is a, c, g, or t
naatattgtattcgttttgccatacatccaacatgaatctgccacgtgtgtacatgtgttccccatcctgaaccctcccacctgcctcactccccataccatccctctgggtttttcttgcactgttttttatgttttctttttttacctttcttggggctaatctcatatttgtttttattgtgcttttaggcatggcgcagtcccaaggctgggtgagaaggtacttcaaggccttttgtaaaggcttctttgtggcggtacctgtggcagtgactttcttggatcgagttgcctgtgtggcaagagtggaaggagcatctatgcaggtaaaactgatatgactcctttctttgaaatacacgtttggttgtttctcaagcactagaaatgagatttctgtatattgtctccatgctagaaactgaaaggtttttgaaaggccttgaatgaaattttaatgttactaaatatctttataaggtcttctaatgcagtcatattataagcaatggtgaataaaaataattctctgatagttctctatatctatagtttatcaccccccgcccccttaggaatgataaattgagattctaaagaaattttacaaaataatatcactttctgtggctgtggcctgagattttaagtttttttttttttttcaattatccatatatgactgagatcacatttatgagttcagttgcaggatgaatttgtctccaattcagttacctgattgttttacactctcacacatgcactcacacatttatgcgcacacagaattctgataggtggaaaagtctacagcactgatttcagatattctagtatgttctttaagcatgttgctgattaagaagattaaatgccatttacattggaagaattttggagtggagatttccaaaagttatacgcaagtagtctccagtaactcagagaaaacttgattattctaatgctgatgtctgaaaccctagctgtttcagtaagtttatcaactaaaaagaatttgcattttgtaatataatttgttttcttccattattttgggtatt

SEQ ID NO: 32566 - DNA, 993 bp, Bovine  19866880768933
  misc_feature (1)..(1): n is a, c, g, or t
naatttttgtaacaaaatatggaaaaaataaacagtaagtagcagttaagctacagtgctctttataaatacaaatgctagactggcaatataaaatgtaagtaagaaagaagaaatattagctcaaaaaatctctagtcaatgaactttacattttaaatcctagattaggttaaaacatatgaaatggttagtatgttgcaatttttaacccacaaaaatgccagttttacatagttctacctaatatattaaacaaaaggcaccaagtcctcaaaagtagatacaccagaggaatgtgtattatggaaattttggcaacacacacttcttcaaattttaccaaaagcagaaaatttgaaaggctaatcaggaggtctttcagagtcccccacgctggtgacctgctctccaggagcagaggaaacaaactgaaagtcgtgacaaggggagattaaaccagtcaggtggttcaggaaaatgcactcgggtacagtttctgcaacatgtcagtgctgtgtggatggggtatcctggaacttttgggaagatcacacaatcagcagagagaaaccaatccagacaaatccccctcattctcatccattgtcagatgcaactgcagccttctgccaggatggtgtggaaaaacagaaaatgagctggaggataaataacgattattctctgctcctgagttatccacaaataatcgataaaatgcagggctccgtaggaatctttacctttgaaaccccgcctcaaagtgcttaaagggccgagagggtcaaaacgttggccctgtagtcactgaggctgagagagatcactgcagagcaggtctgagtggggtggagagggctgcggggaggccccagggtttagccactccctcctcagtgcatttaagaatagcagaggcaaaaagacaccgtcttcactcttggatacctcggtaagcaatccgggcagccatgcttctcctcaaggatc

SEQ ID NO: 32567 - DNA, 1330 bp, Bovine  19866880779524
  misc_feature (1)..(1): n is a, c, g, or t
ntcctgactcctcccgtgtcctctctctgtccatcctgggactgtgtcagctcagcacccgtaattgaccaagcattttctcctggtttgacacctacctcactccttaatccctcgctctctcactgttggtatggttccttctaaagtgcaaacctggtcactctttcatttaaaacatttaaatggcttgtaacaatagcaaattaatacagaaatttttattacatgccaggtcatattcaaagtactttacatatattcagtcatgattatgccctggaacagcatatctagaaacttaccagtcatcactttggtatgtaataataaaactgatgttaattgagcccctatattttaaacacataattacaatattaactcatgtaatcctaacaacatcccaagaataaggactctgaaaattgtgggaccttaatgattatataagggtagtatattacaaggagcttgtccaaagatacatggctaatgaatagagagcattcacactgtaatccatgttctgaagcactgcaccacgatggttcctaataagctccctaggtctagagcctagctcacagcgctcacctggctcttttttccaacctccattttctttgacgttgcattctcctgtctggctgatctgccacactgaactaagcaggtgctctcttaaatgaagtatcacctgaacaagcttgattcactcaatctctctattccttctgtaaaagttgtctgagccctgtgacccaggatactcaccactaaaaggttatactctacaatcctatgtactttgttcccatcagctaaactgtatgcctaaaaaataaccatcagttgtggttattaacatgcatgtttatgctagctatacctattatcataagcatctaatttaattaaatgttacacaaattgatgaaatgtgaacaagaaaggaaaaaaaaaacagtcaaatgttttgaaagactaacttataatgagttttcttttttaaatggttgtcaaacgtggtgagacaactgtgaaagcctggggaaaatttgtaaatgtctagaaagattctgtattcagattttgtcacaaataatctttacgttttcactccaacataaagaagctaaaactgggaatttaaacagtgtagcatgagtgtggtttgtaaaacacttctgagaatttcaatttgtggacttatacccaaagagaatgacatctcaaatgacggtgaattaattgggcattatattttgtatagtacaatgatatgactaataaaatgaatatatgatatattgggtattatctgtgc

SEQ ID NO: 32568 - DNA, 2012 bp, Bovine  19866880806328
  misc_feature (1)..(1): n is a, c, g, or t
ncttttaaagatattagattcattttttctcgggagagctttaaatagggatgaaagaataggacagagctcaggggcaggccaagggagagaaaaatgaaagtgaaaagaggctgagaaaaaaatgactggttatacagtttcaaggaagctaagagaaaaaaattctcaatatgttttaaagaggaagtggtcaactatatagaatactgttgaaaggctaaataagaggaatacatgggaaagatcactggttttggcaacatgaaagtaaccctgacaaaccctaagccaaacgaatgaatcatctcttcaaagcctaggcatctagctgggctgacaaagaaaatgatcgaagaaaggtacaatggtgaaaaggaagaggatgcaaagaaaatcttagcacagattcagactcttagcagcttttaatcttaaactgtcatacaagaacaactaacaataagattaaaaacaaaataaatatcacatactaactggaacacatattaaatcaatctaaatatgaatcttagaatttatcagcacaggataaaaattttattgctccaagttcaggagacataaggagacttttgaaaagacttctaattaattattgaacaaagaatagccaagcaaaggtctactaatacagtgcatctggtgggaagtactcctggggaggacttatcactccccactctgttcagggtgaagctccaaaaacctgatgattaatatcaatctcccatttgttaaacagcccaagtcaccctttgtcatttaaattgtactgaatttgaatctgcatagactgcaagaagagaaggaatcctgaagctacataaaataacctcacttcagtcttaaaacagaatacattaatcttttctggcactgcttccccaccaaaaccacagaactcagtgctattccttggtgagtcatgctgtaaaatttccagttgacttatccacagagagatggcaccacatgaaatagagcccatagaaacttgggagagaagtaaggcttcatgtcttcaaccttctgctttggctctgacttcagatatattacaccaaaaccaaggctgaaatccagggctctgagctgagcaagttgcaaggatgaaccaggactctttcatactcagatcctaaaccgattctccagattgcatgccaagatctgcatttctcaaagcagtgttctctggccacattcacctggtgctttaaaaaaaaaaaagcaaatctcaaagccccacttcacacttacacaccaaaatctgtaaggggcaggtaaagacatctgcatttctaataagctccctttagtgttttttaggtatgaactcttggcctaatttgtgtactatggatgattatacaacatttttgcagggtaaggtatttcaccttttggttcattctccaactcattttacagcatactgtcagattagtgttcctaaattgctgttattatcatttctctaccctgcccaaaagccttctgagtgcttcacagcccaaaggataatgttgagacttctttgtgtgatactcaaggttcttagtcatggcttcagaatttgcccttcccacaactgagtttccatcaaaatataaaattgctcaaatacccagtatatgttgtatagacttccacctccctgcttctaacttgctctctacttctagaaagttactttctcatttgctcagaagcccaaattctgtcctttctttgaactcatggaagcctatccatttttttccagccagaagttctgtgaacatcatagtgctttatctctgtctcttgctacagggtgtatgcgttctaccttttattctatgacagcgtggcctattcgcaccctgcagaaactgggaacaacaactcctttctctacactggtatcagcaaaataagatttccatgggactgttaggggaagcacactgacaaactgcccacccggccaggcaccatagtaatca

SEQ ID NO: 32569 - DNA, 1369 bp, Bovine  19866880811639
  misc_feature (1)..(1): n is a, c, g, or t
ntcagaaaaagacaaatttgcaggtttcagttcatttgacgtccaataaatttttctttctgtttctttccctttactagagtttcttggttatgtttaacatgagctgtatacagtattctgtatacagagtggtaggatcagtgatcaatgtatgctctttggcaattataattgctttttaatcccaaattagtactctggagtgtatacgcaggtcttaccaaacattttaaaacataggcatccttatcttaatatgattattgaatactatttcaggttcacttacattaagtgtagagttaggaaagtattttaatgtattgcaaacgctaatgactcagttttcaccaaattcctttactatgcaagtgtaggctccagaagaaaaaactgaagtttttaaatgacatagaaggatgaaaatatcactaagtttagtatctttggttcattttttgttatactgaatggcttttatctagctgagagcagtggtgtaatattgttacccctctttacttgtggttctttcaatcatcatttgattggattaaaccctttactgagtcttagtttcattattaagtcagagtttgggacttagctggctcctccttaagctgatttctgggtacaggctctatatatttatatagggtattagatatatatttaataaagtgttgcttagagaggcctctctggttttctctcttctttataagtgaaaggaaatatttcagggagagaataactgtcttctcccttccagatcttcataactggtgctaaataagctagggaagagagagatctgctgaatcatggcattgaacttggtgtttcaagcactgtaatttctgatgaatggtgtctccggaggcttctgtaaaatgatgcatcctgacatccagtgaccttttaaactaatatttctattatgtaattcagttgcttctgtttcctggaggtaatagcattagtttgtactgaggtagataatgattttgttagcaatttcctttgtggtaagtgtttttgctgtaatttagtttgaaggaagaattgtttgtacaaataaaatctagaggaactcacctactagtagtacactgtgatcaagaaaaaggtggtccatcacttctgggacaatattcttgacactctgggtaaatacagtcacattggctcaatttcaggggaagattgttgccaactactaatttttaaaaattgtataacacgcacaatgctaatgacaaagtattggggctgtggaatcagacctattgctaactctctcattgatgggtaagcagtgttacaaacttgaatttctttatttataaaacaagagtaataa

SEQ ID NO: 32570 - DNA, 940 bp, Bovine  19866880857593
  misc_feature (1)..(1): n is a, c, g, or t
ntttattaaacaattgtgatatcttcactacttttattcaagacaacacacacacacacacttttaacctcaaaatatcacattctgggaaacacagtcagtgtgcatccccatttgctctattaagcaaagaaatctggttgtattgattgtagccctatgtcagcaggctgatgtatgtgcatatcttgataaaagacttccgaaaacttaagaaatcacaaatgtaaactttcacacaacaataccaaattcttacctcttgatacctggaaactccaccattaaccgcagcatctataactccattcaggcacatggttaggggattaatattctgcatctgtcttgtctgacactgactaatcagagtcttcagctgctgattcttattctccagcacttcaatggcattttccagaggactcatttctacctgagaacaaatgagcataaatatatattggcttttgtgacactgaagaagaaagacaaagtagattatccacattctgaattatctgtgctcccctcaacatctctaccaggggccatcagtatagaacagacaaggatatagaagacaaattagctgtttgtaagccctgggaagagaaggtgattatattcactgtctgaaatgtggttcaaataatcagcaatcaccgattatacattagcactaaaacagttaatttaatccttgaaacaaaattcaagcctatgtattttacaatttattttttcttttcttttgaagggtaaatattcaaggacccttcatattcttagcatctttctagatacttaatgcaaagtaccacaggagataacaaatgcatttacagatcctctgatgtcaaggagatttcagcccagttgggaagatgggacatatgcccatatggaccccacatgcatacataacagcaccataagg

SEQ ID NO: 32571 - DNA, 891 bp, Bovine  19866880861707
  misc_feature (1)..(1): n is a, c, g, or t
natgctcttattatgtaaagaaagggagccagttgttgattcatctaattatactgcagtcccacacttctccatgttagaagccaaagcagattttttcataaataaaatacagaatatttataaaatctttttctaataatagcaaatagttcacgtgaatctgcctacaaataaggccattatgtccatacattttttttttccatatgcccgaataacatcattagtatcattaacagaactagaattctgggatagtctttagaaactatgaaattagcattaaactatgcatcattggccataggtgtcctccttgtagaaactgagctgctgctatctacttaccggctgacttgccttctatgggttgtgatatgtgaaagaaaggaatatttatttttctgtcctttttatgtatacatagcataaattcctaaggacctgcctagaatgaatttaaactagcaaagaaatcttttcttcatcaaaaatcctttcaactattttcttccaaagtagactgatttgggtgtgtactagttaatagtttataagcttggtcttccatgctgaacacatcagaggctttcccccctcatgcccagattcagtttcatgcaattttagtagtgcaccataaggaaaagagtgatttttgagctacaaccacattatcaaaacagaggagcctcctagagccctaattaccagaatcagaacagagaatgactatctccattctagttttctctaatatttaaggggaaaaaaaagattaactgctaatattgagaacaatgttaggttaaaaatatgaatgagcacctatattgggcagaagctatgtgaggtactgggatggtaaccaagccgcaggaaatgtta

SEQ ID NO: 32572 - DNA, 1188 bp, Bovine  19866880865686
  misc_feature (1)..(1): n is a, c, g, or t
ntgcggtagtttgagcattctttggcattgcctttcttagggattggaatgaaaactgatcttttccagtcctgtggccactgctgagttttccaaatttgctggaatattgagaggctttctaacccttttgattttaactcgagggaaagagttcagtcagactgaatacagcaggtaagaatcctggggtgagacaaaccactcacaagagaattaaaaatcaacaaaggctaaaggcattccataatcctaagtacttgatgacctaagatgctcacttcatttcaagcatctacatcaaccctagggccacagtgagaatttaacttttcctctatttccttgcaggtcagcttcaagtaatccctcttttccagaagctgtccaactgactcttccacccacggtcctggtccacggccacttctctccctttagtatcaattttgtggactaagcctacagagcataaaatatggactaaaaccagatacagcctcatcatttcctagtccatgctttgtttcctagaacatgctttattaatttggcattatcaaatggaaagagatgcttctgtcacattttatcatatgtattccatttttcatagatataaaatgtttcctattcatttcctattgaatccagcctctccaccataatatctcccataatgtatctcatatttgaaaatggtttttaaaccattttcaggccaggagctatcaacaggggaagagaaagcaacagattattcaccctagttcttcgtatttgatggaaccaaagaaataaaagccaactgtgcttctgtagaattgaagatgatgagattgtatctagttctgtctacgtcatatgatctacaggctttgtccacacagcgtgatactgttttaaagcaaagggtattattgattgcccacttccttagtctaacatttaagtacgaatctcattcattcatttactgaatcattcatgttaagttggcctgaacttatatgatcccaaaatcttgagtgaaaagttggcatcaagtctttggggacagagcattcaaagaatgttccaaggggtgacatgtttgctataaggggctgccatagtctactaatttttttgtccctccccaccccaaccccgtatctaggtgggaataaaaagtagaaattagcaagt

SEQ ID NO: 32573 - DNA, 1001 bp, Bovine  19866880875611
  misc_feature (1)..(1): n is a, c, g, or t
nttttaaaattcattttactgtcttgtttctcatgatcaagtatgtatctctaatgtaaatgaaagccttgctaaaatatcttaaaagagaaaaagtttggtttggccttttcaaaatgagtgagactgatgaaaaaggcacttgagaatatttaatagatcttgattattttacaacttaagtgtttatttttgatgtgccttaaactaaaagataaggctgaaaatgtcctagaagatacctagggaccatttctttctcattcagtgtatattctcactctagtttgtacattctcattgccaccatttggagaaaaaggctgctaatctgaaatgaaacggcagactccccaaagggaaagtctaatgttgttttcttgcccatcttcctctcccccttctatgttctctgcctggtctttgtagatgaaagcacctcattgatgtaacgggaaaaagtagcaaggagccaatttctagctcccatctaaacaagagcctgtaccttcagtggagatcgcccagcaggcgagggggatactgacgccgtgtgtcttgctggtgaagctgtgaagagagagagagagcatttcagttcagaaaaccagataactgactacctgaaaaagccctctgtgtgtacaaacccgtacagatgatccagtgcacaaggatcgaggcaagggggaggggcgtgggtggagagtctaaatggtgcccacccaaaatggattccccacaaaggatggcagctccaagacatgggtaatcagggaaaagtcaccagagcacacatgatggtttaaccaggtgactggtccagcgtcctttccacttcctcaaagcccagatgcttctctgcccttggtctatttcaaaaggtgcttttacacatgaggtgccaggggagcaggctttgggctgagcaagaatggaaagacccaggtcacccaggcagctcagaataggtccctggggaatgtactgacatcagtctc

SEQ ID NO: 32574 - DNA, 1333 bp, Bovine  19866880885737
  misc_feature (1)..(1): n is a, c, g, or t
naaaactgaagcagactgatattgtttacctcctgctatgatgtgctaaggttgtattactttcaaatgcaaaacctcaatccaatcatgaagaaaattagaaaaaccaaaattaagggacatcatacaaaattcaaaaaatgtcagtgtcatgaaaaccagttcaatgcaacataacaactaaaggcaacatgtgatgctcaactggattcttaattaagacaagcaaatggctatcaagaacactattagaacaactgatgaaaattgaatacaaactatacatttgataacagtattgttctgttaccaaaaatcctgaattggacagctgttgtaggattatataagataaaatttcttagaatttaacactaaagggtcatcatatctacaattaatttttatgtaggtcagcaataatgatagcaataaaaatgacaatatggtgtgttgtctatatacatatatatgtatatatagagagaaagatcaagcaaacacacaaagatgctattaattgttgtgagtgggaattcactgtaatattcttataatttctaagtttgaattttttttaatttttttaaattgtgtttttgaagtaagtttgttttcattcaagcctatatatttgttctgatcaaagactatgttctcagccatactatcacttcattgccattttcgtcttagaagcatggcaaacagaaatgagaaaccctatttatcaagtctatccacttgccactgcaagattattcctcatggcatcatttccactactatttgaggttcacttttaggaggctcaaattctggggttccaccatccccttgagaggtattaatatcttctgttaagtgttgtttgctgaaatataggtcgtcctgaaatgcttattaataatcgtgttaccaactatgttgcaaaatttgccactaaggaagataatacttatttccaatggtctgtgcatcaaccttctttaattattaacctttggcttctgcacagggaaaatagaaaaatgctgttatttggcatacattattatgtgtaaggacataattatttcctagcctggctttggcctgtccttaggaccctggacaatatccaatctctgataaccaaccactcaaatagcaaaaacttttgtgcagaaaacacctcctagtttctacctaatgactttgactgttgaactattgtctcaataaacaacagagctgaaagggacctcagagaaaaccaggtttaattctctcatttttggagataaagcacaggggtccaaaaaggttgaatgtcctatccaaactaatacag

SEQ ID NO: 32575 - DNA, 880 bp, Bovine  19866880903607
  misc_feature (1)..(1): n is a, c, g, or t
nattctgtgcattttgttgcttttgtcagatctcacctgctttctgttgaggtccagccattctttactctcaacccaagcatttctttaaataaagccttctttgtcccctatcttcagttaccccaagcccaggttcgtgtaatttgttacagatattgctagctctgcatttcttttctttggatcataccttatttcgtaattgcatacttagtaacttgttttattactatttgtctgtctttctcttaaccattaactaaactgagaaagagatatgatatagcattatagtatcttcaggtctcaacccagagcttggcatctgagtatttggtgaaaaaaatgtgtggaaatcaatggatatatgtaacactacttcagcctgaagttttctatgaaacagagctagcattgtcccatatccattttctttgaagataaactatgaagtttaaggtttcttgaaattatacaacacttttatgaatatattaacagtattatcaaaactgcttttaaaataagtacttcatcttattgaccttccttctgaattttttttttttttcattattcctcaaatccctgtgtggtttagagtatagaggaacttgctaatgtttaagttcatatcagacctcagtagatgcttgtaaagtgaagaagtgaattatttacaaacaggaaagtatccttcatgtgtattaaattggttgtagaatgattcattgatgaggattactgagcaccaggtactactccattttcatcatcaaaacagatgccttcagcactcctttctcttttctttgccattgtaaataaaggtcttggtgccccatttagctttttttttttttttgctttctatttg

SEQ ID NO: 32576 - DNA, 1527 bp, Bovine  19866880911810
  misc_feature (1)..(1): n is a, c, g, or t
ncaaatgtttgcagctaacacactttattgttttagaatttatcacatgatcccacagggacaatttgttacaaaagtgttattattgtagtatcactaaaatagtttgcttttcccttcaaattgccttgacttctattcaatattagatttttaaaaatcagtttgggaagaaattaaaatagaaacataatggaatgagaattgctaaaaatacaaggctgaaatattgaaaatgcagctaaaacagaaatagctaagtgtaaagtcagtaggtaaccaaaaggggtaatttgggaccagggagaatattattagataactttgaaaataaatgagaataaaaactctgtcctggcctttaaaaaaatgaagttatagaatatgtgaaaacatatgtccaaaatacccgtaagccttggatagacagttaaccaacatgcaacaaagcatacatgttagttaaatggtaacattcccttttttacttgtcaaagctacatcaatatttccatctagaacactgtaactttcaggatctatttctagatgctgatatgtcctgggggcatcaactccagaagctgctatggtaatcacttttgtatgatatcaacagccaatgttttttgagttcttgatttatagcaggcatttgtggttttttatctttttttaaaaaaattataaaacattttatttgaccaaatatattcaaaatatcattggtttaacttatgctaatataaaattattaataaggtattttacattttttccaactacactcatattgttaactggcctcatttcaagtggacagcagcacagtattaaagagtgtcttagtggctcccagcaggagatggtcccctgcccagctacctaaaacaagccggctgctctcctaccacattacttattaatattttgttctctttacagccctcactaatacctcaaattatcttatttccttgtgtattctttgtcccttaagacaaggactcacgttgaatggtgccctgaacagcataggctttcataagtgctcaatgtacactgtcccatctcctccagaaggggacaacagaggatgagatggttggatggcatcacagactcagtggacatgagtttgaacaagctctgggagttggtgatggacagggaagcctggagtgctgcagtccatggggttgcaaggacttggacacaactgagggactgaactgaacggaactgtacaccgtccctgactgaatccatgttcggtcaggcccctggatccccttagccccctggagctgctccttggcacacgtggcccacccccctcccttttttctccaggtccattgccagagtatggatcatggagctctgtgtagtggagctctgccagaagacctaccatgacttcctgtaggctctgcattaagttctttatggtattaattcattgaatctccccagtgaccccaagtaccttaggatgcttattttatagatgcaggaactagggca

SEQ ID NO: 32577 - DNA, 968 bp, Bovine  19866880967751
  misc_feature (1)..(1): n is a, c, g, or t
ngaggcagggtgagaatagtaattttattaggggttaaaagaattgtgagagaccgtaagggaatctggggtaccatagaaggaaaagaggggaggatatttctaagaactaaaagaaactaccttcttagggtaaaccaagccaaagaggtacagagcagtggctagagaaacatagccaggtaaggaggaagagcgtgcagggccagtagatccaccaaagagaccatttaagacaaaagacccttagagttgctcagtttggtttccaaaaatttatcagagtctcagaataagacagttatgctgttattacaatgtcatgattgtcctttcccctattaggttatcctgggaaagttttattctttgtaagaaaattcagaggtcaaaatttacctacttgcaagtgttttagatatagaacaccaaaggaattccttttcaaaaattacaactatatctcaacctgtgatgcattgtcttgctatttttagttggccgtatatagtcagcaataactataaaatgtgttcaggtatgtctttttaaataaaaactgagtatgttgaggctacaatttgccagatgatttacccttttctatcattctttagtataaatatatagcagacatttttttctagtccataaagttttattgcaaatactgggaacccacttaaaatggaataaacagtgtctacccacatgtgtttttccttacaggaagccactttgattctgggttaaaagacattgattaatgtgagaaggctcgcctgcttctgtgagcactggtcctctaattctgtacacacacagaatggactctaatctctccagctgtcatgttgatgctctgggtgagctgtacatttcacaagctctggaaccactctgcaactcaaacacgatcaacagctttcctcaaaaccagaacagcagtgagagattattaaatcaaa

SEQ ID NO: 32578 - DNA, 4866 bp, Bovine  19866880990466
  misc_feature (1)..(1): n is a, c, g, or t
ntcttatttatttctggcctggttccgaaaggatttgaggtagtatataaaatataagcacagtgccagagagaaaatagagcagaagaaagggaaaattagagtggagatatgagatcctgcagagttgtccaagatggctcattgattgggttgagtttcctataggtcaaaactaagaattaagcaagatctctgttccaattacaaaattaatagataaaaaagccccccacccccaaacttagaggcttgagtatatagttttctattgctgccatggatagaggagcctggtgggctacagtccatggggtcacaaagagtcagacacgactgaatgactttcactccacttcatttcattgctaaagttataaattataacaaacaatgacttaacacaaatttattgttttaaagttctgtatataagaagtctcacatagatcttaccaagttaaaatcaagtcagatcctgtttctttatgcagagttctgggagagagtctgtttctttgccttttccagtttctataggttaccctgttccttggcttatagtttcttatcttcatcttcaaaggagtgatgttgcatttcactgatcatacttctgtactctccctctgactctcttctgcctctcccctcctcttttaaagaccttgtaattacactgaccattggataatccagaatattctccctatcttgagggcagctaattccaagcaaacttaaaaccatctgcaaccttaattcctgctttctatataacctaccatacctgtagactcaagggggcaggatatggcaatctttgggcaatggagggcacatttccatgcctatcactcaagaataacaatatttattttgttcatgcatctgcagtgtggacagtttaatggaggcggggtcacttcatttttgtactacctggcattagccagtttatgtggaaagttggggctggaatcgtctctgtgttttctcactcaaatgcttggcacttgatgctggaaagactcaaagagcagagggtgggatagttgccatgccttgagcatctctatctgtccatatgatccttccatgtggcttctgcagcacagaggcccaggtagctgaacttctgtatgatgactaaggtctccaaggcctgggggtgggagaggaggagacaagaagggaaggaggtgaggaaggaaggagcaaggaagagagagaaggagaaagaaaatggtagaagctgtgttgcctttcctatcctagcctcctaaatcatgcagcatcacttgaatcactttctgttgactaaaactgagacaccgaagcaaagccaaattcaagagatgggagttagattgaaggaatgtcaaagaattttcacacatgttttaaaactaccacagccccttaaaatatttacagtgtcccctgaacagcttttctgggggataacaagtaaatattttttttcatgggtctcataaaaggacactatgtgtgatgtaaaaattgatggcctcacaaatgtctgcacgcacaaaaaaatgatgataaaattcatagagaaatttattatagcatttctgggtgctagtaccaaagtacatttttggggaaaaaaattctacaagtttctaaagcctttattccaaagtctctaatggactaaaaagaatccaatcaaaaacttaaagactatagaaaaattaatggactatccttcagctgatcttctatgaatattatattttatgataaaacatttaaacgacttaggcagaaaagagatcatgaatatatttcttggcaagaaccagaagtaaaaataatctttgtggccagttcacggcaggtttttaggtttttaagttagtttggtgttgagttcttagatgaaatcaataaattgtgctcctcctcatgtaatcactaatttcagacagaaatcaacacagaccatttttaatgtctgtaagataaatacatatcaacttgaagatggttattttcaaatttcagtggaacagccttttagcagatgtccatttgctactcttgagctcccatccttgcacataaaatggttatagtaattggcttttgatcattaatatttctttgcagatgtttgaatctgatgtgaaatatatttttttaatttagagtaagatttatgaataaaatgagtaagataaagtgtggaagttaatcaacttagttcttagatgatctgttcttaattcacatttttctaagaaggcagtaaaaatttttgtggatgatttttgtctcctttatattgtcttcattaatatatatattttttctctcaagaattgagaacagggtcactcactcaccttatacatttagcagttagtatacacagggagcggtctactcttttctctgcaattaagtaatataggacacagactgtgaaatgaatgagtgaataaaaggtaattacatggcatacttaatagaaagccaagttcaccagctttttaatgttctttcatttaagtatccatactcaattattgtgtttttttccccctaactgctacctagtaaaacaggaaattacaaagaacttctgaatgctgtcaaataacctaacctatttctatctcagacataatgtcactagatctacatggaaattgaatatagccatctatgctaaaaatctatagcaaactggagctatgggagtatttgaaggctggaccctttggggtttttcatttttaaagataccttctcatatactctttatgcctagaaagactgttgtccttgtgtgaagctatgccctgaagtgagagttgctgatcaaggccaaatataaaaaattatgtataactccttattttctgttcattcaacctactaaaaacagcatggtttacatgcttgaatagctctgtacagaaaagaaaacctgatctttttttactcttgattgtttaccccaggaatacaatttttaacaagaacttttccctgccaagtcctattctttgccttcattatgatgtatagccataaatgggcagataagagttaaattttttcaactgttccttttgctttctttctcttaagaagacaatcttttgtcgaatgatatatgaaagactctggggcagtgtaggggcagaagaacagaaaaagagcatttctccaaattggttaattgactgtatagcagttctactatgaagtaataattatagcatagagatgggatcaaaagtgaaacatccgacaaccatcttcatatttttctcaaacttgagaatcctgttctccaggtgaggatcttatgatctcctgtttatttacattgttaaagtatttgatatttagaataaaatcaatctgtttggtttcccacagtgacagaaacataaatgtgatacctacagccagagggccctgtgacacaaggcggatggtgcccttaaacatcttctgcaggcctcctttggcaaagattctgccaaattgtaacctccagaggccttctaacatcccagagatctttttccctgagattggatattgattctaaattatttggggaaaaataaaaatacataaatcctgatccctacctacgcgattttatctgcctgaggaactacagatgttgtcaccagaagcctcttctcaattttgcttaaagtggattgtagaagcactggggagaaagagaaacagttctgttcctgtcttcatcagcctaaacctggcttcgggctgataaaggctgactgttcaaataaagcattgttccatgtgagatcacaaagtgagggaagaaaagttttagatagaaggcagaatttaaaataatcctgtgaactgttactttgtcacacacaagactcacttaggtaaacttgccaccaagtgacaaggtgagctgggtgctcccttaaagccacagagaagggtaggttttacctcctttgtacatgcatacataggggactattcctgggcaagcgtcgacctgaatttctattgtccatcagcaggaataaggctacagtgtgaaatactccccagtactttgggatattgcactcgcattaaccttagttctgggaaatcagtttcagtctacctcaaaggatagcttaaataaagactgtaacactacaagtgataagaaatagtgttctaacttaaaagtgagatcttttgagtcataatttagatcaaattaacaatgtattagcagtatatttcagttatgagtcccaaattgactgtggccaaaatatttgcatgaagttgacttgatagacttaatgaaaaagtaatgcttaaatatatagtgggcttggtgaattattattaaatgtcccagtgttacagaactaaatttgggtttactcacccatgcgcagtaaagccaatctactgacctgggttgtggtgaaggaaagtgcagcatttatgataaggtcctatacaagaagtctggaggaaggtacagcaacccactccagtattcttgcctggagaatcccatggacagaggagcctggcaggcttcagtccatagggtcacacagagtcagacacaactgaagtgacttagcacatacacacacatacaagaaatcctgagcagctagtatgcaaatgacctgaactccctgtgggtttcagcggagcatttttaaaggtcaagtaagggagggaagacccaggctgtgtgaccagcttgtgcacacttccctgctttgttgatgggtgaggtaacaggggcagtgtcatagtgggtaacattatcagtccttaagctgcaataggcctgggggactatgtgct

SEQ ID NO: 32579 - DNA, 1945 bp, Bovine  19866881017648
  misc_feature (1)..(1): n is a, c, g, or t
ngtaaagtttaaaaaagacttttgatgtctagtgattgacatatgtgtcttcttcttatacagcctctttttcctgccaaaaatagactattcagtaattccaaaccattctgtacccccttcaaacgataagagatataaagtagtttttcaaataccttattaattattttctctaagtcactgcattcaactccctaggaatcctaagacaacaaactagaatgtagcattaataatgctgtgttgaaaacaaagccataatgccagagaatttcaaggataaaaatatgaaatcctcttgcctgagattgtgcattgcaaaaacaactgtatggatcagtcagcttgactaagacattttgacatcttatttcaacatctaaaattaaaactacatcttcaatttgcactaaaagccttgtgtttcatctaggttaaactcagataaagatttactatgaagaagattagttataagaatattatttgtattcccctctcaaatttgaaaaaagttcaataatttgtaaatctcccagagtaatacgataactgttttgaggatgtattatgtttacaatttaataacattttgagcagaaaaaaataaagtagaaatttcactaaaatgacagcaatcacttcatctcaatagacatttcataatgatgataattaacagaacttcaacttctattttctaaatatatttgcttattataactctattgctgttacttattttccagtaatctcaaaagaccagattaatgtaatatctcttgcttttaacagaaataattatatgggtcagctggaaggaggttaaggtgtttctcagtcttgtgcctgtaattgcaaataccacagatcagtgagcaaaaaagaaaaaaaaaggaggcttaaacaccccatcctggttacagaaattgtcgtaggtcctcttcattttacactgtcctttctttttactctgcatcagtttactttcaaatgggcttttatgtttgatacaatgccttccttatcattcctaccacaggtgaaggtctctttggttctgacctttgatgctgtgctcatattctctacaccaagagctccaactcagaccccggcgtagtcctctacgcagggctcaggcagctttagacagccccctaaaaggtagagagacattgcaggaaccaccaggagaacagacccaacagaaactgtgtcaaagaaaacaaccacagaacagaaagaaaggttcctgacttcagaaaaaaattctcaattaaacaaaggcttattttcccaaagcaagaaacccacttaaccatatctttgggacaaactgttattttgtgaaatgaaagagacaagaatctttaacgcctttagactcatacggaatattgatcacatgcaagttacagctattcttaaactgtttgcttttctattttttcaaatctgaggcagcatcgttattctactattatttgagctcaaggtctttctcagaagtaggaaaaatctaataattgtctacaagcacattatgctgagaggtagcaagacaattttcattgctacagagccagcttggatgttcattaaaagtaccaggcagagcgtgggacccagtattaatgggacacagtgttgttagcaggtctcagaaacaagcactgatactgaatgcaaattgtgcatgataacataaactggactctctagactgttcactgacaaagggtgaaattgggtgtaaaagatgggcaccgaaacacagggaagtttctaaagaaaagaagtatttaacctcaggctgttccattgttaagaccttaaaaagcagacacactttcaataatgactaacatatagcacttggtatgcaccagccacaattctaagtactgtgtgtgtgtgtgtgtgcgtgtaagtctctcaa

SEQ ID NO: 32580 - DNA, 1166 bp, Bovine  19866881049251
  misc_feature (1)..(1): n is a, c, g, or t
nccgcatccatagagatttggaatcacagtgcagaggagctaattttgttcagtccatgtttcgtgttttgctattccagccaaataaacaaaaataaattatttaaatatttcctttttgttcttcctgttcattagattcaaaagtatagggggaacaaaactcaaaataatgagaaaatgattggagaagctattgaatccattttgtgttactgatcccacatatgttctaaattctaatccttttggacttgagatgcataagaatatttaatgtgtttctgccccattttacagtggacagttttcatgctaagtgctttaatgtatgtctgcactgttaatatatcacttgggactctagagttcaaaatgttgaatatactttatgaatttgaaatttactgacctagtgtttattttaatgaagatatatttatgtttataccattttgaaaaccaggccactgggacaaaggcaaatttcaaaatcttaattcttttcttagatataatttgataatggactcgttcactctagttacttctgcaaatgcttaagcaccttctctttgccaatccagatataatccaacttgcattcagtaactcttacctaaaaattaatttccccctaaaccccatttcttaaaagaagacttcaagcaacagtattctcgtatttgttaattctataatatgtctagtgaagtcatgtaaaatctgatttgaaatgcactgtgaatgacaaatttattatgatgaaagaaatccaggaagctataaagtagcatgaacatattcatgtgggaatatatgtcaaaagtctaattaaactaaattattctagattagccttactagttatctaaaaataaatacctatagagaactgatcctgctttgtaatctatcattaattttcatgcagatttccgatgaaaggattttaaggagaggagctatctctttttatttttagtcatttcatctgttgcttatacattgagaacatataactgtcaattgaaatttttgaagtacctattctgttgagaagcatgtattatactctttttaatccttctgacacggatattcaaatccaaggctttaaagtctaaagttaactatacgtgtaaaggtgctacttttttctgttt

SEQ ID NO: 32581 - DNA, 2661 bp, Bovine  19866881177811
  misc_feature (1)..(1): n is a, c, g, or t
ntgttctggaatttaagcttttaacacttgtacaagaagtaagggagacaagaatggccttcttacagaaaaagtagaaaactggagcagcattttagcttcccttaccttctctttttaatggatatcttaaatatttaaaacatttgataaaatgatacatattcttatataagaacaattttaaggataaataagtatctaaattgtgatataaccctggggagttctaaaaacccaatgacagcaagaaaaggcaaaatgtctatagagtagaaaacaccaaactaaatggcaaatggacaggaagaaaacatttagagcagatgtaacagataaagatgaatatttactatatagaacaactcaaataaaaacaggcagagatatcaatatcaactaaaacaaaaacaaattttaaaaatgtccaacatcacaaataatttaagaaatataaataaaatcaagatactcttgccatgaaattacaaattgaagatttttgtaatatctgttattagtgagaatatggaaaaagaatcattctcttaaaatgttggtgagaatgtaaaattaaacaactttactagagggcaacacagccaatgcccaccaaaattaaagatctacataccatttaatttccatatctaactttctcttattctaaacaatcacacttgtaaattttcatataaataaaggaataaaggtctggaataatacgcagcaaatggataatggtttcctatgggaaaggaattggtatggtgagtaaaaagaggaaagagctacttgtactttttaattcaatatattcttacctgatgtttgaatttttatgtcaagaaatggttgcatgcatacttgcataatttccctaagttatttttttaaaagaccacagtaaattaaagatatcatgtgtgattagaatatttcagatacttttagttataatggcacttttcaacatattctctagtctcagtgtttttatactttcctttgtgctttcctatctttgtaatctatctttgattttggtatggattccacaataatatcttccagttcaaaaattctaacagtaaattgtctaaaaagtttatcctatctataatggtattttacttttagtgacatttttcatatctacaatttctaattagttttttttttttttttaatatccacacattcttatttggttccacctgtctgactacataatttctcactccagtccagtgaaagttattttatcacttaccctatggggaaaaaaaggatatttattttaaaaattttaacagatccacacattaacctaattttattaacgtataaagcaaattcatgtttgtgcaactgatatagctgtctttctcaaaagtagatttcttcatgtttttatgtcatttacagtgaatacggtaaagtggccctgcagatattagatctgatgagttagaccaaataactgagaatggtgccaaaaacagatcagcaagtatcataaatgtttaattttcattgttccaatcttgcttcaactccatttttaaattttcgtgaagttatttaaaagcaagactacatgcttattgcttcctttgtggctcagctggtaaagaatccacctgcaatgctggagacctgggctcgatccctgggttgggaagatcccctggagaagagaaaggttacccacaccagtattatttaagtttggatattcaggcttcagaaattttgcagtactttctttattaagatttatatattaggattaaagtgctaaataatgcaacaaggatcagcaattgtcagtcaagtgaaacaggttctttctaagcaagggatcatgaagagaaatataagatattaaatagttcattttaacttagaaatataaataaacattgatttgtcaatcttttgatgttatttaaagatacaaaacaactatttaggaatagctaatacctactccagtattcttgcctggaaaatcccatagccagaggagcctggcaggctaaggggtcacaaagagttggaaaggacttagccactgagcatgaatgcatgaacaatagaagtaattagtctaatcatcctctattattaatttattcctgttttccatatgtcctagcacatactctgcactatttaaatgaaggtcttaaataaactattcacagagatgggtagatagatggacagataaacagatgaatggaaatgaatcaactattcaacagaaagcaccaatctcatcttaaattagtcatacctagtatgacctagttacgcatcagagaaatggcaaatctgatttcaaattagtcaaacctagtgtgacctagttgtgatcagagaaatggcaaaaccaagtagcaagtaggtgagatagagcaaggtgagaaaatggaagaagtcaagagcagaagcacagtaaaagcccctcatggaggaggcaagccctcaactaaggtagaggagaaggctttacaatcaaatgcacagcggcagaaatgatgacctgtgggccacagtgacatcttagagtaggagagatgcgtggaagttatgcatgactaagaacagaagcaaactgtgcaagaaaacacatgctcttccttttaaccacat

SEQ ID NO: 32582 - DNA, 986 bp, Bovine  19866881197897
  misc_feature (1)..(1): n is a, c, g, or t
ngcatggtttcgtacctcctcaacccagtattgaacccagccccggcaacgaaagcactgagtcatacttaccagatcaatgccagggaattcccaactttttgtattgattaaacaataattgcaagatcatattagataggaagtatcaaattaggatgaaatgtgtaaatatacatgtatctatgtatatatttagataaactttaaaaaatgtatatatttatataaactataaatattgtatacatagcatttatttctattaaaagtcatatccaatatatcaaatcctactcgttacaatgctaaaacaacaagaaattgctcaagaaacagataaactttaaatgagaaggtcctaacctttgtactgctgaactttaaatatgtaatttagtataatattaatatcctggagtgacatttacacaattctttatttctttagttccctgtacttcaagatggatgtagagaattaagtgattatgtgaaactattaagcttctaaaacacaatctgctataatgagtatttcatttgttgaaaacacctcacgttcatccttttcaatacctgcctgagacaggtatcaatactgatccagttcatttcatcacactagcagctattggatgtcctacaacatggcggccaatcctgacactcatgaagaaaagtgtctcaaatacatgaaggactataaaaaacacaaagagaatgaaaatgtcatagattttgaaggatgtatcttaagtcagagaaactcaataaataaccacttggcttaaagacaaaagaagaatctccaactgatttaaaaaccacaattaatcaacttagaaagacaataaacctagcacccagattccacattccgtttctcactcaagaaccatagctccttggagaaagagctgattccagggatgcgcagcaaaggtacacaaggaggagcctggagcatcttgttacaccagaaa

SEQ ID NO: 32583 - DNA, 1622 bp, Bovine  19866881313822
  misc_feature (1)..(1): n is a, c, g, or t
nacacacagtaaatgctcactttcagttctaaaacttcccaattgtatataatcagtccagaactacatacagttccataaaagatcatttttataacattctgaaaaactctcttaattattacctgggaatgtgggccagttctttgacttcccttagccttggcatcttcacgagtaaaacaagcatagtatagtttcaagggctccttgtgatgttcaaatgaaacagtgaatatataaagcccaaaatgagtacaaggggccattcttgttgttataccccagactctggactaggaataacatgtgatggtggtaagaaaataatgtagggtctaaatttccacaatagtaggagacaagggttcaatccctgggtcaggaaaatccactggagaagagaatggctaccaactccattattcttgcctggagaatcccatggacagatgagccaggggggtcgctggagagttgaacacaactcagcgactaaagaacaaaaacatgcttagtaatccttcacagggaacctggaacacagtctgggatgtggggaagcatttctttctccttaaaaattaacagaaaaaatggcatgaagagcttaaactttggagttaaataaatttgagtcaaatctggttctgtcacatactaggtaaatggatggaatcaagcaaattatttctctaagcctcaacttaattatctgtaaacagaaaaataacaatatctgcttcatgatactgtttaagaaaaaagagggataatgtttaaaaggtatttagcagagtatctagaagattgtatgtgccaaataaatggtagtaactgttgttttaaaaaaaaaaaaaaagattaattttactttaaaggaagtattctgtggcagttacagtttgggacttttttctcctcctacttacaactctcactgctcgtattcactttaccattatactggtgattttagaaaataagttttcaccgatgacccatgtttacattaaaacaatatatgctgaatcttgagttcatgcctgaacttgtttggaattatagagatgagaaggtatcactaccattttaaatatgattattggctattatcttgctttccttttaagacaagggcaaaacatttttactatatgcagaaacattcctgttgacaatttattcatcactgtttatgacctgcagttttctttcaaatcaagcaattagattttacacaaacttccataaaatagcagcaaaaatgacttcctcagcatatttagtatttttttaaggtttcccagatctaacaccctccaattaatatttatcttcttcctcccaacatcaatgactatgctgcctaagggaagccccatgccacctaaggcacttgaggttagtaataagattgggctggatgaaataatacattgcattataaagaatgaacatctcatccaaatgaaatatgctaggagactaaagaggctaggagacaactaattgtaataatattaagaaacaggtaacaagtcattctttctcaatgcaactagatctactaactgccatagctactttctacttacattagtattacctcaagggatcta

SEQ ID NO: 32584 - DNA, 1938 bp, Bovine  19866881409682
  misc_feature (1)..(1): n is a, c, g, or t
ncctaagaagatcccctgcagaaggaaatgacagcccactctagtattcttgcctagagaattccatggacagagaagcttggcaggctacagtccaaggggttgcaaagagtcggccttaacttagtgactgaacaacaacctgaagaagctaaggtggcaatcaatattgcattattaggatttaattttgctcttatgaaagaaaatatatagaaagaattgttttttcccctccctctataatactatattttttgagattagttgttgactaaagtaaatataaattaaagtattaattggtgcaagggtattaacattgaatagcaatcatgcaacatagggttcttcctgttgattgcaatgactttgtgtcttttatctatttagtgaactcctagtgatctttcaagttccaggtggcacatcacctccatgaggtctttttctctctgttaagcatagttggtagctctttctcagtggtccttttactgcgctgaattatctattatgaatatgtgatgtcagttgctcagttgtgtccgactgaaatgcttcactggctgagtcaccagggaagcccccgttataaatatagatatctgttatatctactatagccatatcacaatgtattataattacttatgtctttttttcccagaagatagttttcctggacagagatgatgccttagtcactatcttaatgtcagttccttaattaagaccccatatatagtaggttcttttgctgggaaagtaacaaacaaaatttcttgcctctacctagagtttatttgtaacaatccctgctttggggcctgaattagaattcggtggtgtaaataaagccactatgtctgaaaatcttacatggattttctagataccataaagagactgattaaagatcctccaagttaaattaaacagagttacactctccactgcatcgtaagtcaatttaaaaggattttatactttattcagaaaaggcaatatcatgagtcctgttttattaatacctaaatatgttatatactttgaagtattcattggttggttttgaaaggttctgtatgatggaaaggatattgaaggaatcagactagaaaggtattttatttatttatttatttttttttagaaaggtattttaatcttctgtacttttccctgtaattttgtaaggttgcatcccatacatgtcagtaaaaataactctatccctttattaaaacttcagtgtcttcatttatatttagagtggtagcaacataaaattgaaaacctgagagttgtgaaggatataaagtcatgttttaatagggaaactaaattgctccttcaaagagcctataaaactgaaaagcattcattataaatgtaataaagacttacgagtcccattttattaaaactacacccagtttcctgtaggggctggatcatttagaggtaaaccagtgacactttatgtctagcaacaaactttccgtgagataagatatctactgaaatgaggttggtggttttaacatgatccctaatggatatccattcatgttaaaagattagaacttttgctgtagctgagtttgtagcttctgataataatgcacccagaccagattaatgaccagtaaatttcttactactctaagtttcttgaagaaacagaacaattgtgaaagataaagcttatgcctctactaattgctgtgttatatcatcctatcatactgtaaaattcttactcaagtcaaattatgtagattaacactgtcacaggataatgactttccactggttacctttggcctctctttttcctttcaggtacaataatgtttttaatgtggtacaggagaatcattctcttttagactttagctgcttttcaaagattttcggttacattttccacag

SEQ ID NO: 32585 - DNA, 1914 bp, Bovine  19866881434085
  misc_feature (1)..(1): n is a, c, g, or t
ntttttttttttgagtgcctattatgtttcaggcactgctctaggtacttgggataggtcagtgaacaaaaggattagagatcctcccctgtgaataacatgaatggtctagtatctcctagaagtatctctctaactcagttccactgccaattattctattagtgatttaagttgttttaagtctgtgtggaaagacactattagttttatatttccaatgacctatacattttatcttatgttctgcttaagccttccttttaataaagtatttattgatttcttatgctatgtgtgctatgtccagaagaaatgaaggatttatttcttgactaagtagcatttgggcattttgtcttgctaataaggtgtttcagtcactgattaagctctattaatttgtggcctttgtgcagttggtctgtttgataagatttcatcctttaatactatatcctcctttttttcctactttgtttttttgtccctcccttttcttcagttaatcctgttttccaaccttaaccctttcagcattccacaaaaaggatcttctaatttgagctttaaaaagtatttgaaaatgctcatatcttgagtgcacttgaattcctattctctatttgtactttaaattgttctcagtcttcaaattgtgcttctttttattcaccataaccttgtatggtgttgttcctctgaagcctacaacagtttaagtgtgtgtgtgtgtgtgtgtgtgtgtgtatgtttgtgcttacacacgtttgccagtggattagctgagctgcaatagaaatgtgtatgtgtgtttattaatagatatataaacatgcagattgtgttaaaacgtaagagaaagagatagcttacagtgaaccatgtcagattcgtgatctccaaagacttagcttcgggaccagagaccaggcttgatcacttaaaggtttctgtgtagcagcattttattaaagtataaaaagggacaagagggctggagggctgcagtctgtggggtcccaaacagtgggacatgaccgcgactaagcacaaaaagggacagagaaagcttctgacagagacatcagaaggggtgtcctactctctggtcttatcaaggccttatatactttaatggagaaggaaatagtaacccactccagcactcttgcctggaaaatcccatggacagaggagcctggtaggctacagtccatggggttgcaaagagttgcagattcactcccactatatacatcttaagttaataagattagaactaacaatagaaaggtctcacccagacccactcccatataagataatcagattagtcagaagtttcctgttaagatggagaaacttttctttgagcaagatacttgttatataattgttagtatagagcttaaggaagaatatacccttgagcaagatgagttgttttgttgtgtaatcattagctctgggcttaaagaaagttagtcttaacaactcagagtttaagaaaaaatgtcttatgtgactaagacaaagcaatgtagaaaaacaaattcatgagtctgataatagggaaacagagaagtaaataacaagcttatttcttccaaaggataagggaactgtttttttttttttttaaataaaactactgcatttaaaaattactttcatgttaactaaggctatacatttaatgttgtatgatttatagagaagtaatttgaaattctgtttaaacatttttgtttttcaaaattggatactgtcaagatatatatacagtattctttacagttaaattttcacacatataatgcatttaaattatatgtgtgatataatggatagaaaatcaaattactcctcttctaccacatccccatttctttccactgtacctctgtagaa

SEQ ID NO: 32586 - DNA, 1496 bp, Bovine  19866881481865
  misc_feature (1)..(1): n is a, c, g, or t
ncttaagtctcagttttacaaatgactcaatgttgagcataattactgcctaactactgatgcaagcctagaaaatatccccttttaggttcagccacatttctgtctactatgtaccatattctttcaaaagtttttttttttttttccctctcataaagacatgcatctgtgtatccatgggttatgtctaacagatctaagaagtaggttaggttagtttgaaaagcacaggatatactcaatctgtgttagtcatcaagcctcttgtctgaaaaaccttggtgaaagcggaagtgagctgatgacaggaaaggaaattaacaaatgagaaagctgacttaagagttgtggggaaaggatgcattaaagaaaaattttcagcattctacaaaggtagaggatggggtagtgttttttgtttgttttttcatggtctcagtgtttttacgcatccctcgactctcaaaacaaaggcaaagaacgtctagtatgtcactgcttatttctattttgtcagcacttttactaaaatgatgttttgtttttctcctatgtcagtacgttattttgtttctgagaccactgaatatatcccctggggagcctgagaaagccttcaggaacttttctgagtaaatgcatccagtgaatggaacacaagacaaagaaacctgagatcagccttggatctgtgccttctgaagaggcacatctattcttatgatcatcaggaaacatttctaaaatgtttaggatgttcttaaataaattttttgctacaaatataaggctgctgatgtcaatataaaaactctcagtcacaagaactcaagctttcacactttaaaatctccttttgagataaagtcagcagcaaaacttagaaacagtgaactatatcatactacagaatattaaaacctgtaattgctaaacaaattaatcattttgcattgagtattttaattcaaattaatcaaggtctttatagtggtgaggtaagggaattcaggaaagcaaatcattttcaaagggaagttagatttatgtgaagcattacaaagggaagaatcagtgaagtggcaatctgtaataaaaagaaaagaaaaaagtgggtcactagggaaagaagcaaatcagtgctaaaatcttcaaaacctccatcttcttagtggacccatttttttaagactgcagtaaaaagaattctatttgaagtattttaatacataggcatttagaaattcaactatacatagataattcagtaaaaaaaaaaaaaaaaatttatgccctagagataagattttctaatcactctgttgttttgacttttaaagtgtccttttctctctttcagctactcgttaaccatgataagagcttccctatcttaaagacatttaaaaatacttcattttgaagaaaccatcaaagggacttcagctggcatatatgctggcatcagggcacaccaaaggcccaagtaacca

SEQ ID NO: 32587 - DNA, 1050 bp, Bovine  19866881493733
  misc_feature (1)..(1): n is a, c, g, or t
nctagaaaagagatggtattcagtgctatctctggggatgcaattaattctgtgtgggggcacagaaagagctacagagaagaggtgacagattaaccccttataaaaacctcaaaaacatgaaaatgacctcaaaatatgaataataaactcctattgtagataatggactttgcagcctttcatatctgagtttcaaccccagttctaccctcctgttggccatgtaaaatggatcaagttgtttagaaatgtagaaaggaggtctcattctgccaggaactgtgatcttaggcaattcccttcgcctctctaggcatcaatttcctagtctatgaaagaagtcatgaagtcatgctttaagatctttaacttgccctctgattctaacatgagtctatattatatattatagaaattcctatcctctgttggatgtgttcatttagcaactatttacccacaatacgtgagtacaactaagtacccacaatatgtcagtgttctagcacatggaagatgccagtgaatgtaatagtccaaaatcacatgacaatcacagaaaatatctattgaataacttataattcaatagatattgagttatctctatataatttatttgctttgttgtctccttgctcacaatcatttccctgcaagtatgacatgtgtatttaaaacagttaacactggtaaacaaaagaaaaaacacaaacattaacacaaaaagagaaattgaaatgaagatgaagtatagttagtaacactgccatcaagatgatagtttctctaaattcacattcaatcagtgagccttagcaacctgacaaaaaaagacagtatgttaatgagctctctaaccaatttagtatacagccatcttttcttcctcatttaaactattacatagtttcttaagagctatgatataaccaggtaagttttatttaaagataaataaaatctgtatatggcaagcaaacataaaaatctacaatatcactttttcagatatttcacttctctatctgggtatttctggctttt

SEQ ID NO: 32588 - DNA, 1063 bp, Bovine  19866881496594
  misc_feature (1)..(1): n is a, c, g, or t
ngaatagaggaactgcagcatttctgagcatcacaaatacagtagcagatctcttgccgactctcagttagccagcctctccatttatccctttgaaacatgcaggctggagcccttgggcagccaatctttaccacataccacttttctccctcccaaccctctgagttgtacactcaaagggtacaactttgattgttttgttcccatacttattatcagttgttcttgttgctatgcaaattgctcataagctgatgaaatcaaagtgcaaaaaggcaagaattattgtaactaagaaaaacaagtactttgcgtcactaaaatgtaataaagatgaatcactaaaaatattggggcttcccaggtggtgctagtggtaaagaatttgccttccaatgcaggagacataagagacatgggttcgatccccaggtcaagaaaatctcctggagacaggcatggcaacctaatccagtattcttgcctagagaattccatggacagaggaaccttgtgggctagtccataggttagcaaaaggttggacatgactgaagtgacttagtgcacgtgtgcacacacacacacacacacacaaattaatataaacataatgggtatgaagaagcctagactaggtaattagaaaaaagttattcaaatctaaaaggattccacgctcagaatgctttgtgtcttaaattttcttttttaataaaccaaactaatttattgcagataacacattggtgtctgtgccttacacaagaatgattatgcaaaattccacagtttttaaaggaaagagtttcagccttacaacagaaactggcaaatagagataagagtataagttcaaggaagcctggagaagattctttaatatttatcaatactaccacacctctctttcatttgactccactcattagatgggattactgccatctgttcttaaggatgacattgagcatcatctcctcatccctgatctgccataagcattgcctgcatactcaggctaatgtactccggtttccagcgaaggactcagcaaggt

SEQ ID NO: 32589 - DNA, 699 bp, Bovine  19866881563319
  misc_feature (1)..(1): n is a, c, g, or t
ngcctagctgggcatgatttactatttactaaagaatgaatgaatggatagatacctgaatggatggctagatggcagcatgaataataaaccttattttaactaatttagtatgaaaccttttaaaaaaaatattgcttgctccagaatgcagctgggattcagactccccccaccctaggctcctttaattttaaacatctcatggttgataataggcatataacaagttcctacagtatctgtgtatgcgtggtagtctcagttgtgcccgactctttgtgaccccgtggactgtaggccaccaggctcctctgtccatggaattctccaagcaagaatactgcagtgggttgccattcccttctccagggcatcttcctgactcagaggtcgaacctgggtctcctgcattgcaggcagattctttaccttctgagccaccagggaagcctacctgataggacttctggctaaggttttccccaataaacacaaataaggaaaaatgcataaacagaacaactgcttcagtatcagttaccaaagtctcaagcagaacgcattctttaaaataaaattcaatataacaaagtctattacagccagaaaaattgtgcaattttacttttttttcatcctactacctgaagcaaatcatttgaattcctattccaagtagttagaagttaatgatat

SEQ ID NO: 32590 - DNA, 804 bp, Bovine  19866881801793
  misc_feature (1)..(1): n is a, c, g, or t
nctatgaatatgataattgtaatatggctctctgtgcttttagaggtcataagttacattgcaaagacttgtgtatttggattgctgcaaagttactgtagagtgttaacaaccccaataggaaacatttaagtgttagttgtatgtctcgtgtaaattgtactatacaattaagtatgaatcatcaaaatgttccaggttattaagaattcattacttctactagaggatctttaaagagcagtaagaacttgaagaaataataggaaagctttggtaacaatgacagtgtgttaatcgagttgaaagaaggtaaagaatgtattaacagaatggacacaaatttggcaaaaaaaagaaaaagatatgtaataaatcaacaggagaaatcagttaataaagaggccaattatcagtgaaggaggggggtgtatttaatgattctaaatgaaaggttaaactgcttctgtgaatttctgtttaacaaaaaggaagaaaagcaatatggataattagacagtaataagatcataccaaaaaaatcagaaaactgccttaggtgttaggggaacattggctaatgaacttcatctgctgcagttatcttcaaatattcacttttggtctaggaatggagagggtggggattttggttattttcagggaggaaatagcacatttagcactttaattttattgtggatttttaaaatggtagcaaataatgaaatggataaaggatttctcatgagaagcatatgtaacatctgtcacttgttaaaatactgtattttcactatatat

SEQ ID NO: 32591 - DNA, 992 bp, Bovine  19866881514546
  misc_feature (1)..(1): n is a, c, g, or t
naaaaaaagaaaaaaaaatggacattctaaggaatatagaatataagctttgatgtcatagtcacttggatatataatcttatccatctatttatcctctgacaaaagtgaaaagaatctagtcagacttgaaatcaggataacttgaaaattagaacaacaaaaaaaccagtgactatacaggccaatcagtaatttgagattcatgactaagtttcaaccaagctcaccctaggaaggtatggtttactcagtatgatggaaaaatatcagaatgagaggcaggagacctggattctagctcttttctgctcctcgttagctaactagatttgtaagaatggtcacttcatctttcttgcccaaggtgatcacatcaataaaataatgggagtggactagattattgcaaaaatctttccagcactgaaatgttaagcaatacattttagtagactgctgtaagatctctaaatgtgagttgatgtctcttagttgagtgcctcagtgggagagcaacaattattcagaattaatatggatgagaataatcccctcaaagctttttagaaaccccaatagattcttcacttagtttaagtaattatccttattgttaggactgataataagaacatgcaacaaattcactctcaatcacctataatatctatttgttttcttttacactcagggtaaacacacttttagataattacaaatcttccctttttgttcttcaaatgctcacaattacaataattcttttcgatcttcttattcagagttctttttaaattctaacaaacaaatcaactgtttcatctggaagtatttctaatcaatcttttaactgctcaaaggaatctgtatttagacagtttagaacatctcatgcctctcacagttgggaggctctgagcaatcacatgtggccggaaaaacctattcaggcaggctagaggacttccaagcgagtttgtaggttgaaa

SEQ ID NO: 32592 - DNA, 1001 bp, Bovine  19866880542114
  misc_feature (1)..(1): n is a, c, g, or t
ncccagtccagctacactcatctcacaggtccctggcccacacttgagctgacttaccaacacttgaggctccagccacaaatgttcacaaacatatttcctactttgtcccctcctggcttttgtgctcatccctgacccttcactttcatttttcacttttcactttcatgcattggagaaggaaatggcaacccactccagtgttcttgtctggagaatcccagggatgggggagcctggtgggctgccgtctatggggtcacacagagtcggacatgactgaagcgacttagcagctgacctattgtgctcatccttctggcccctccctgccaggttcacagagttgtcctgcgtttcctggtgtctgcagctgtaagcagctgcaaggggccaggctgagaccagagcctgaggcatcccaccctaccccgaagggacacaggcggcccagtgcctcccacctcagtgatgttcttagtgactttcgcctccacgtcgtatctctcctcatccaccttgtccacacgagcgtggagctgtcggcacaagtcctggtggaggaatgcggtgtgtgtagtgaggagaaaacccaggggtttggactcctgggtctgagggaggaggggttggggacctggaggagtagattgaagccagaccctggggaactttagagtcagaggttctgagaatctggactggagttgggctggaggaaccagtctctgggttttgaggttgtaggcagctgcaggccacatttctgaactcctaagggtgaggattggcaaattggacacgaacgtcctgggaagagtgggggcatcggtaagtatacccctgagtcccaagggacgcaagatcggacactaggaacctgggagcccaggctgggacggagtccctggttagaaccagtacctggagctccgcgaagcccagcccggccaactccagaggctggcaccgtgtgctcagagcgcgccccttctctc

SEQ ID NO: 32593 - DNA, 1020 bp, Bovine  19866880639011
  misc_feature (1)..(1): n is a, c, g, or t
natggctgattcaggttgatgtatggcagagaccaaccccagcattgtaaagcaattatcctccaattaaaaataaatagaatgaaaaaaattagtccatctggagggacttccttggtggtctcgtggttaagactcttccttccaatgcagggggcatgggttcgatacctggttacaaaactaaaatccccgcatgcctcacagtccagctccccgccctcctccaaaaaaaggcaacgagcaagacaacagtgagtagactgtggctctcatagtccactcacgctagatcccctcccaactcgcataaccaatctcttagacgcagccaagcctgagattctagtgacggaagccttggttgtgaccatctggtcgacccctatgctgatgaccctgtggtttctgggtctgcgggaggggtgggagtggcctgtgtgcagctctgatccggtgcatcattggaggtttccttcggctgtgccagtcttctgccagaagccccaccaggagaattagaatcacagccccaaggcatatccgggccagattgcccttagtgtagtgctggagggcaagacctggaggaacaagaagagacaggagcagatgataaaagcccagctccaaggggacttcccttgtggtccagggattaagacttgaccttccaatgccagggatgcaggttcaatccctggttggggagctaagatccctcaaagccgaaaaaccaaaacataaaacagaagcaatacaatgaagactttaaaagtggtccatatccaaaaaaaatagtggtaataatcttgggacttccctggtggtccagtggtttaaaatctgccttccaatgcagggggacacaggctggatccctggtcaggggactaaggtcccacatgccacaagcctgtgagcttgactactgagcccaagaaccacaactagagagaaaaccacatgccacatcaaagacgcctcaagctgcaactaagacccagcccagtcaaaaat

SEQ ID NO: 32594 - DNA, 937 bp, Bovine  19866880689726
  misc_feature (1)..(1): n is a, c, g, or t
ntagctgtacttggctatatagtacttggctcccaaggggaatggatcttcaaaggtgatgatacatggttgacatggatcctgaataaatgacataattgggtgtctgggatcctgggagatgatgatgtcacagttttggtgtatcccagttgatgatggtaccaaggttgaagtggatcccggaagatgatgatgttggatgtcatgggtcccgggacaccatcgactctcagggatgctggggcctggtggcatcatggctgaattggctcctgggaggtgatgacagcatggttaaggtggatcctggggcatgaagacattgcggttggagtggatcctgggagatgatgacagcacaattgtgggggtctgtgggaaactggggcatcatcagtcctagtggatcctggtagaagatgtcaccatcggccatactggattctggaaggtgatgacatcactggtcatggtgggttctgggggatgatgacatcatcagctgtggtgaatcctgggagatgatgacaccatgttggtggagaatcatggatgatggtgacaccattggctctagactaccttagaaggtgacactatagttatgatgaatcttggatgagaacgagaccctagctgtggtggatcctgggagatgaacacgccgtagatcatagggaaccctgggaaatgatgtcatcaccagccatggttaccacgggaccccaggtgcaatgcggccatgagtggtggaagtcttgtggtgccgatgatgtcagtagcaggcacaccccaccccccaccccaacaggaggccaggactctgcagagttgatgatgtctgtagttgtggcagagagatgtggggccgcctaagagtccccaggactctaggagcaatggagcggcctccttgggagcagaagccagtctg

SEQ ID NO: 32595 - DNA, 2079 bp, Bovine  19866880696449
  misc_feature (1)..(1): n is a, c, g, or t
ntatttattgagtgcctatgaagtgctggccccaggtaaggctcagaagcagcaccaagaactcatggtctctgggggtgacccagagagtagatggtcccccccccccaggtatcccagcatcgagcccccagcccccagagaaatcatctctaagtggatgtgtatgacgaatttaattcccccttctccatctcacaaaggtttctcacatttttgtacaaaaacccagacctcctttccccctccctgcccaccccaacacaaaaagttaatagtttaataaataataatatgctcctgcccaggcccagaggggtgggggtcagggagaccctgtggccagacttattagagacccatgaatctgggggccaagttccctcctcctcatggaccctggagtccacttgcctcccaccaccccctgttaaataaataagtataaataaggcacagatgcccctctgcccaggtctccgggacggatcctggagggatcgtctctaactaggagagaatggagtggggggatggaaatcctctgaccgccgcaactccatcccaaaataaataaataaataagatctggctttgaatggcgctggtggctctgggcggagggtcacagccgagtcttcagcagcagcaggccccgcacggcccagtcgagcgtcagctgcagcccccccaggatggcatgggccgcccggatgcccccccaggctgaggctgggggtgccagggggggtgccggagggtctgggggtacctggggcagggccaggcgggacatctgccaggagagaacagagggctagcgtcaggccaggggtgcagcagggtgtccaagtagggggaggcgtttgaggcctgtgctgaaccagggttggagaagggccagggggcctctttctacagcgtctcggggctggaagctggggtgtcaagggagagagtcctgcaggatgctgagttcagaagtgtgaggatggggttccagagtcaagttcagggggctggggtgggtctgtaaggtcagggctgggatcctggggctgaggtcttagatgtgaggtctctgggatcaagctcagacactcatggatgagggctggggcctccagtctggggtctcagagctgagaatcggagtctgagttccagggcctttgggctcatgtccaggaactgaggactgaagtcttaccacctcagggtcttgggtctggggtttagaaaggcagggtcttggggtcttaaggggtcacaacctaggtctgagctcttggggactcagggctcaaggtctgcggtcttcttgttggagacctcaggatctaggtccttggggtctggggcttgcagaggagggtctccaggctggttttgagtcagagatcatccttataggatctagggtcttaaggtgtcaggatctcaggggcagggtgtgtgtgtgtgtgggtgggggggcgggtctcagggtctggaggttcagaattccctgggcttggggtctggaatcttcctgtcttggggccaaggtctccaggtcttgggatgagggtttggactctcaaatcttacgacttcagagtgggagactcggagtcacaagatcatggggtctgagtctccaggtgagagtttagagtttccaggcaggacttcggagtccaggggctcagggacacagagggagggtctcagagtgggcctggagtctggggcctcagggacagggggagggtctcagagtgggcctggagtctggggcctcggggacagagagagggtctcagagtgccctggagtccagggcctcagggacacagagagagggtctcagagtgggcctagagtccgggggctcagggccaggtcatcgtaccaggagctgcagccggcgcagcagccggtccagccgggcctgcagggtgcccagctcgggctccagggtccgcagggaagggcctcctgaacgtcgcagccactgcacatgcctcaggtaggagaacaggtctgcccgcagccgtgtcaacactcccgggagctgggggcccggcggggggcggg

SEQ ID NO: 32596 - DNA, 3481 bp, Bovine  19866880834127
  misc_feature (1)..(1): n is a, c, g, or t
ncccctccctgctcctctcctccgtctccccctgcatccggccgggcctccgcgcgggtcccacaggaatttctctaaaacactaatcggatcatgtgactctccagtttaaaaccttttcaatagctcctcagtacactcgtaatgcgtccggccttcagcctggactgggaggccggacgtccttgctcgtgcggctctcgccatgcccccatccaaggccccacgtgtcccctcaaggcacggattcccacggccgccgcctgcacatatggacagcacgctgatccctctgaaactgctttccctcaccttcattcctgaattcgtttctttcttttatttaggaaaaaatactttaaggccttaaaatatatataataaaataatagcacacacacctaggtatgtacccaaaagaattgaaaacagccattaaaacaaaaactttacacgtaacgaatgctcctaacagtactgttcacaagagtccaaaggtagaaactacctaaggttcatgaacaaatgaatgggtaaacaaaatacagtaacccatacatggaatattcagttcagttcagttcagtcgctcagtcgtgtccaactctctgcgaccccatgaatcgcagcatgccaggcctccctgtccatcaccaactcccggagttcactcagactcacatccattgagtcagtgatgccatccagccatctcattctctgtcgtccccttttcctcctgcccccaatccctcccagcatcaagtcttttccaatgagtcaactcttcgcatggaatattactcagccataaaaagaatgaagcattggacacacagcacacatacgtggtgacacatggatactaattggcctgccaatgcaagggacacgtgttcaatccctggtctgagaagattccacataccatggagcaactaagcccttgaaccacaactattgagcctgtgctctagagcccatgaactgcaactactgaagcctgcatgcccagagcctgtgctccgcaacaagagaagccactgcaatgggaagccagtgcaccacagcaaagacccagtgctgccaaaaataattaaatcaaaaagaatgaggtgttgacacaggctacacatggatgaacctggaaaacactgtaagtgaaagaagccagtcataaaggactgcacactggatgactcaactgatatgaaacagccacagtagacaagcccatagagacagaaagacgattattggttgccaggagctgaggggagaagggaatggggagtaacagattaatagatctgggtttctgtccagggtgataaaaaagtcctggaactagacactggagttgattgtacaactttgtgaatgttcttaatttcactgaattgtacacagttccaattggctaaaatagtaaatttttattttttattttttggctgtaccgcaaagtatgtgggatcttagttcaccaaccaggtgtcgaacccacaccccctgcagtggaagcccagagtcctaaccactggaccaccagggaagtctctaaagtggtaaattttatgttatgtgtattttaacaaataaaaatatacacacacacacattcatatattgactactagttttaaaacataaggtactcctgactgcatagatctttcccctcccctgactgcctctcccttctcagaggtcaccctaccccaaatttggtgcttattgtttccatggatgtgtttagacttttgatccttaaaatacagcattatcgacccactatcatctctctcatctctttgtgagatagagacttagacccaccactttgaaactctcaggacctcactttactgctctgtgaaatgggagagtaatgttacccacttcctaacaggctggaagggattgggggcaggaggagaaggggacgacagaggatgagatggctggatggcatcaccgactccatggacatgagtttgggtgaactctgggagttggtgatggacagggaggcctggcgtgctgcaattcatggggttgcaaagagtctaacatgattgagtgactgaagtgaactgaactgaacacgaagaggaacaaatgggtttgtgtttgtaaagcacttacattgtaagtcatcgtttattttcatttcatcccatactttgtgaagtgtggaacacattcactatggtttcaagttccaaaagtgcaaaaggagagagtgtaggcactttcagtcctgggagttagacaatgttgcgagctctttgctctcctcccggttctcccagttcacccagacacagcctgctgataagtgcaaacggggcaagctgtgctccgtcttccaaatttttctctgttatcacttggaacctttccatatttttacacagcaaacttctttgttctttcttttatgaacacacagcattcttctgggtagatttatcactcaaatccctgaccaatgggcatttagttcacttcccctgttttgaagcaaggcacaatactgcaacgattaacctgatacagacacctctcctggcatgtttctgagtagcgctggtatatttctttcctatttccatttgctcctcttcccatttctaactcttggttttcatcctgcgggtttcagcagaaacactgttgcctccaggaagccctcaggggtcactctcactcagaggcgagtctgctccggtaatcccacggcatcctgtttcctgccttggagcacactctccaggagggcaggagggcctgtgactgtctcctgctccgtcagaccgggagctccctgtgcactgggtccggtggcctctgtcttagctacttcagctccagcaccaaggacagagctagctcatagtaggtgctcagtaaacaccggtggcttcggatggagtgaaagtacgtagcacaatgagtaactggtttcttagcgtcaagtggatagccacgggggggttaatcacggagggcgagactgaggctcacagagggaacgtcgccttctcaggcagccgcgtgacggctgcagccaggttcccgtcccgattgcggagacttttccgtcgcctgtcactcagggccgcattcaccatctttcccggccacccgcctcgccccgcacagtgcctggcgcagacaggacctgatgaatgtgcatgtgttgaaggaatgaatgggtgtgtgtgtgtgtgtgtgtgtgggtgtgggtgtgtgtgtgtgttgtgagaggtgggggctgacctcctggaggcagaggacgggccctcagccccctccccttagaggacccaggcgtccgagccgccctgcgtccccgcctcctgggtccccccgtccacccgcttccggcctccccgccagccttttccccttccaggcgcggacgaggagccgggtttccggggggaaggcttaggcggcgacaccgaggcggcct

SEQ ID NO: 32597 - DNA, 1250 bp, Bovine  19866880838614
  misc_feature (1)..(1): n is a, c, g, or t
ngccccggcccctccgcccccaccccttctgccgcagcaccagccctggctccaggactagcgcagacccagggtccggctccggcttcagctcggtctcctagggacagctgcgagaacctcaacaacttggactcaggcaagaagggtgagtggtggggacaccccttcgagggaacggtccttgtcctcgctttccaggcagagaaaaggagactctgaaaaggaggttcccgaccacccatcacgtgaacgctggaggtccctgaccctctgggcccttcgccctgagtcgtccctttctcctggtttcccgcctgtagagaaattctccccgatgctcatgctcagtatcaacaaggagctgcaggcacgcctggcccagggcctcacgggccccagccgcgcagccccggggcctcgcgccccggagtcgcagctcagcccgcactccagcgcctctgaggtctgcgcctggctacaggccaagggcttcagttcagggtgagtgtggcgtttgccggctaggaggctagggttatacgcgcgttagaggcgaagcgctcccaatggcccagtgggagtggcagacccgggggcctgggattggttcaggacgggggccttgtctgagtgcaactatgaatgtcaggctgtgattggcctgttttcctaggctccgattggagtcaccacggaaacctcgcgctatggttgatagagcaggattcaggaactttcagcagctgattggacaaaggcctaggggcgggcgtgacgtggttggcggggctgacattcgagctgcgattggccggcaggcctgaccatgccctcaatgcccctgctcaggaccatcgcggcgctgggagaactgagtggcgctcagctattctcactgccgaaggagaagtttcgggcgcttatccccgaggagggggcgcgcgtgtatagccagatcacggtgcagcgctcgctgctggaggtgagccgaaaccctcgtccccaggtccgggccggggagggcgctgaggatgctacggtcctgatttccaccccttcctccaggacaaagagaatgtgtcagaacttgaggcagtgatgaagaagcaaaagaaaagaatggaaaacgaggtagaaacggaagtcttttgatcctttccctcccctccgctcaaagtttcgaggcagcctctcgggagatcggactctgcagactgccctcgccagtggaattagatccctccagg

SEQ ID NO: 32598 - DNA, 1054 bp, Bovine  19866881089863
  misc_feature (1)..(1): n is a, c, g, or t
nacgcccctccgcccccgcccccacccccgcgtcggcccctagtcccgcccctaccgtggttgatgaaggcggcagggccgagccacagctgagcgctgcgcttgcgggttgagtacatgatgctgaagtcgttctccccggctctcagcagctcctcgtcggcctcccgcagctccgcgatgcagcccaccagcagctccagcttctcgttctttttcctgccaagaagccggctcgctgtgggtcagtgagtacctccccaaccaccagcgctggggacaggagcctctcatcccaggcctcctgtgggaagaactgatgccggccagcgcgctccactgcccaaacgtctctgaaagtcccactgttgccctacacccacatatgcctggcgtgcatcctgtcctactctcggctcctctggcgcccactgcctcagcttcccgcggtccagtcctgcctggaagccccccgccacccaggctcttcactagacccatcagtcattttgtgggtctcagcctcttctcaaaatccccaggcaggctcaggatgcactgcgcaaccgtggtcagccctgtgagcgcgcaccactaccaccccccttctcactagactgcaagcagagggcagtgttcttcttgctcactgtcctgccctcgtacccagcagtgactgctacttgaggaggggggggtctggtggagatgagataaaggacagcagtgcactcttgggcacaaggtcagtcctttcccagcagcccagggaagcctgggtcgctggagggggggtctcatctcccagagggctgtggtaggccaggggggtcctgggggccaagccccgcgtcctttctctcaacatcgacatcttcgtggctctgtcgccacagtgctgggtctcctccacaagagagggagtgtcttctcccagcagtccccggggaaagatgcctcctgtaaggcctgggctgcgagtcctgccctcttaccatgcgcgagttacacaatctggctccattgtctccaggaataacgggtacagggcaag

SEQ ID NO: 32599 - DNA, 697 bp, Bovine  19866881159580
  misc_feature (1)..(1): n is a, c, g, or t
ngaccgcaagagtttgtgggattgaccgtccgctgggacagacagctgccctgctctcgatgtccagcagatggcagcgaacaccctgctctgaccctagggggccgcgaggacgcaattccaggagtgtgtcggaaagcaagcatgccaaaaaagaagaagaagaaggagaaaaaatagggaggggcgccgcttcctaattcgcgccctagaggctagcagccccgcccgggatggggcgtctgttacttacatcgaagtccacacgctccccctctgggatctttggcgggatcagaggaggtaccacaggccggctgcgtggacagaagggaaacgctgagtgccctgaccttccggcggggcagcatcagcctcacgtgggtcctgagcgcctgccgtgcggccggtccgcatcggacaggctgccgtgagatgcacgccctggttccacagactcggtggaacccacgaatgtaaaatgtttcactaaggacgtttatatggcttagtgtcccaacgatgcgatttccagtacaacgcgttgagtaaaatatgctattgggattcgttttacccattttactttttcaaatgcagctagcaaaaaaataataataataattcagttacatatgggcttgcgttgtattcgtattgggtggtgctgctatgaggggctgccctaatttccagc

SEQ ID NO: 32600 - DNA, 1361 bp, Bovine  19866881246611
  misc_feature (1)..(1): n is a, c, g, or t
nccccctcggctttcgggacggctcttggctgctctgccgtctgtccgcctctgtctgggatcgtccgcttcccacctatctgccgcctcggtccgggggtctctgagcgagcaccgtggccgtccgcacctgtccaccttcccgggccgcggcacccacggctccctttgcctagctgctcttggttcacgctcccctgccacaaatcagccaggccgcccctgctcccccttctcgcaggcctcccctccggtggagcccaagcagcaggggccatcgtgggcgtgcaggcggcccatcccttcggttttgcagggctctcctgagcacacctgtcgtcctgcccgagtctctcctctcctgagcgccctccactccccacctcaccccctctgccccttctcccaccagctgggtctgcgccctcttggtaatgcgttttgtctttctcacctcagctactctctgcaaataaagtccttctggtacttaggtatctgtgatgctgttggtctgtcagcctgggacagagaaggccagcgtgtgtgtgtgtgtgtgtgtgtgtgtgtgtgtgcgcgcacgtgcgtgcaagtgtcccctgaagggcatgttgtggaggagagagactgtggaggagagacagagacagaggagggagggaagcgaggcagagacaaggagaaagggagagacagagagaggaagacagacacagagaggcaggaagaatggcagacagtggtccctcctgtcgtcgaaggagatgctggctctgtgtgtgcgtttgtgagtgtgcctgggggtgagtgtgtttgcacttgttctgcacagaagtgtctgagaaggagagggattaaacagcggagctggaaaatgtctggctattttcgggcaggaactggagcgtgcatttctcaagttcctacctgaaacttgtgtgtatttgtgtgtccatgagcacccatctgagcccgtgtgtgtgtgcaaataatggtgtgtttgtgagagacagagagacgtgagggttgagtgtgtctcactccgcgtggacaacatgagttgcgtgttttgtgcgtctgcgagccccccatgtgctcagggaactgtgtgaccacgtgtgagggtagagagtggagtgcaccttgctgtgtgcagacactggacccgtgtgtgtgcttcaggccttgagcctgcgcgtgtgtgtgcgtgtgcacgcgtgtgtgtagtcggggaagcagagtcccaggtgcggctgccagtcagcgctgggccccccctctccttcacacctcaccctggccccttcttggcagctaccctgtttgcaaacactctctcttcctctccgtggcctccttgg

SEQ ID NO: 32601 - DNA, 1378 bp, Bovine  19866881406822
  misc_feature (1)..(1): n is a, c, g, or t
ntctgctcacctccccgccagctgcctggtccagcggatccccttctccctacgcttctgaatcttgacacccccagcttttaactcaccttttttttttttttttttttgcactttaagttctttgtgggggtagctggaaataactataatccctccctgaaagagtgggaagtctgtgatgttgtataggctagcagttaaagagcttagggtcatgggagcattcaggttcacgcccaggtgagtgcaagtactgcattggccccaaagtatggagaaacctggaggaagtgtttggtccaccgaatagaatggaattcctcaggacatgagctcaggccagcctgaccgagtccccagtgtaattatacttctttcttgctctatgacctttacatcacggtttctctcctgtaaaatggagataataattgggtctctgggaggagtaaggaactaagaggttcaaactcatggttctaccaagggctgtcccagtatcaagtcagctagtgtatataacagactttgagtagtttctggcatacagtaagtgctatgtacatgttgactcttgttattattatgcttatcatttatgcatgagcccagtacatagcagatgctcaataaatagcagctgtctctagctgtatgatctgggaaaagtgattttatttctctgagcccgaatgttctcatctagaaaacggagctgatgctagtactcatatcatgtgcttactgcatggtgcccagcatgaaaggagcacagtatattcaaactggcattgcagtgtcaaacctctgttaacagtattaacctgccccctcccctcggccttgaccccctgcttggctttaactccagctcacaccaagccctaaggcgcagcacagtgatgctggctgcctccttacgccccaactcttccccttctcctcagtcacccagacgaggaaccagaagctgagccccaggggccggagccggcgggaaagtgggtcctatgtaattatgacttccaggcgcgcaacagcagcgagctgtccgtcaaggagtgggacatactggaggttagaggagtaggggtgggggcgagggggtggagtccacccaaccctcgctacagacacagtctctgaaccctacgctgtacctcttccaggtcctagatgaccagcgcaagtggtggaaggttcaggaccagagggggcaggagggatacgtaccctataatatcctgacaccgcacccggggccgcgggggggccgcagtctggtgagccggggcagactcctgggtcctgagggaagaggaattagggggtcagatcctgagaacaaggggcgtgggggttaaggggtcaaaat

SEQ ID NO: 32602 - DNA, 507 bp, Bovine  19866882143417
  misc_feature (1)..(1): n is a, c, g, or t
nctgaccctacaggcggcactggggcctcacatgggcccagagggcctgagctcggactgggaactggcccaagggagaggtggtcagggggtggttgatccaaggggtgggccataggagccagatggtccccagatgaccccacaggggtcacagtggggtcaggggctgagtgtggagtctgggtaggtggagaggttacttcggggctctggcttgtggctgctttgaagttctcagtggacggtatgtccatgcttggggcaggagacaggctggactctgaggctggagatgtggaggggcgaggggcccctgtgaaggtcaactgggggtgcaggctgggcttcactggagagggaggttctgttcccaagggagttagaacggacttggcagtgaccgtagaggctgaggtgaggtcaggagtcatggtgtggtaaatagtggtggtgaggtgaggagtcgtggtggggtgaggagctgtagtggggtaaggggcggtg

SEQ ID NO: 32603 - DNA, 1493 bp, Bovine  19866880357204
  misc_feature (1)..(1): n is a, c, g, or t
ntgaccaggaatcatatactagtttggctgcaaccatgtcttccaccgccattcctggaatggacagaaatttggtttaacttttgtcagaacaacttttccccaaacagcccaggtcccagaaccagcagttccctaatacagtgcccatcagggtaacaaggactaagcacccagaggtgagttcaggcttgaagagtctgtgaagggtaaaacaaggcaagcaatgctcaccaaagttcagggggtcagaaaactttctgtaaacagccagataataaatacgtaaggctttgcatgccagttacttgcagttactcacctcggctgtagtacacatgtgactttagacatcaggtaaacagatgagcctgactgtgctccaagaaaactttctttatggacactttagtttgaatttcttataatttttatgtgtcatgaaatattcctttcccccccagtcatttgaaaatgtagacaccatttcattgtgggctgtaggaaaacagatggtaggttgggtttggcgcatgctctgtcgtttgttggacctttggtccagtccaaaccctaagtccttcagcaattccccctttatcttagagttttgggcaaatatccttaaccttgaatgggaatatgttcttaaaggcaggggctggcttttatttttgtaactaccactgtacacagtatggagcttgatacatagtaggtatttaatacgcatctgctagatgaagggatgtgccagtaaaccaacccccaaaagtgagaaagtaaaaattgctcaggactgtagatcaggtttccagtgctgtgtctcctgaagggggccagctgacctctgatctgctaaggaacaatgaaactctttcatactcaactagatcagtgtgatgtctctgaaccaggctctagataaagcttatactgtgtttgcctgtctttctatgcatgaaaaattaaaaatatatttaacagatggtaaggcatagatatattttgactggcatgggtgctgggtgggcagagtactcttaatacactgtcaagcgttaacactttgggtgcttgatcattaaaatatatgtaacgtctggcttggaaggaaagttatgaccaacctagatagcatattcaaaagcagagacattactttgccaacaaaggtccatctagtcaaggctgtggtttttcctgtggtcatgtatggatgtgagagttggactgtgaagaaggctgagcaccgaagaattgatgcttttgaactgtggtgttagagaagactcttgagagtctcttggactgcaaggagatacaaccagtccattctgaaggagatcagccctgggatttctttggaaggaatgacgctaaagctgaaactccagtactttggctacttcatgcaaagagttgactcattggaaaagactctgatgctgggagggattgggggcaggaggagaagggaacgacagaggatg

SEQ ID NO: 32604 - DNA, 1672 bp, Bovine  19866880410129
  misc_feature (1)..(1): n is a, c, g, or t
ntttgactgcttctggctgttgctcgcaggctgtgtcagatggggctgccaggcagggctgccgtgtcaggagaccttgggggaaggagcagatcccaagctgtagcagatggtgaatgctgtctttagtctttaacatttaagggaaaaactgggaatagacactcggctcagtggcagttatgatgcatttaaataagtcttgcaaatcatttacagaaatgcagatgcctccaaagttcttaattgcttgtggattttgtaggaacttcctctagttcatctttctatcctcagtgtctagtagagagtgtgggtgtggagtgagccccctgcatgctggagtggagaggggggctgcccactgaaggaatgcatatcctgagatgtaatggcattaagtgacagtgaattattgatcatcttcccagggcagtctgaccccttaagagcaaaaactgcattttatgcttttttatatcctccttatatccacccccaatttattcagtttcttgttctatccaaactaatgttgggcaggtacatagatgtcaactaccctatcatattttcctgaaaaacaagaatttctgaataagggaagtaggacttgggaaggtatctcagtttgcttccattcccaatgggaagatgaataccaacttcataaggttgttgtcaacattaagtaaaatcacacatgtaaatggccccagtccatgcctgatacctgggtggtagttataaaattataggtctgaagaagcagtacgtcatggtggttttgatcatgaatcttgtgttcatagagccctgggcttatattgtccctctgtcacttactagctttgctaacttgacaacatatttaacttttctgaacctcagtgtcctcagagaaaatggcactactaacagtgtctaactcacagagttggtgtaggattaaatgcaataattaaattaaatgcaataattgaattaaatgcatatagtcagtgctcgaaaaaagacagtactcattaatgtcatcgttggttgtttgaaattatatgggaaaatttgggttgggtgagtatatatagagaattctcaccctcccagttgttcaagctaaaaaacttggaattattcttaaatcttctgtttttctcactccccacaaccagtcgattagacattcctgttggatctatctttaaaatagaggtagaatctagcatcttctcaccacctccatttctaccactcctgtctgagccaccatcacctcactcctgggcactacccagtagctggtctccctgcttctatccttacccccaacagtctttcatcaacacagtagccagagggatcatgcttaaaaacacaagtcagttccatttcgtctctactcaaaaccctccactagttccccaactcccccagaacaagaaccaaacaaggccctgtaggtctctccctatgtgatctgctccctcctttgctcctctctgtcctcacctcccaccactccctttctcactccgttcattccagccacactagtttatctgctgtttcttgaacacaccaggcatactcctattttgagcactttgcatgggttgttcctctgttcctggaatgctcttctcttagacatttccatggttcatctctccca

SEQ ID NO: 32605 - DNA, 1900 bp, Bovine  19866880429950
  misc_feature (1)..(1): n is a, c, g, or t
nagatgatgctaggctgttagctttgcctccctgggattgtgacattagagccgaaatagaacatggcacacaggggtctgcaggcagaaaatagagggagagcttctaacagggggttttatgtgcaccattaggctggaggaattttctcaaatgctgaactgtgatttctccaaaagcttctccgtgagagggaaactcctgccacttgcctgaacaaaattgttctaaaaacagatcactgcatggtttctgttttctttccattccttctttgcctctctttctttgtcttccctctccctttttttctgcctcccattctccctccctcccctccactctgcttccctccctccctcctcctttccttctttccttcctttcatttaatgtagaagataaggcctcagacttttgactcagacacagaccttgggcaagttactaaatctatctttgcctctgttttcccagaggcatcattgtgataatgggatcattgtgataattaaattagtttatacaggtaaataacttagcacagtgtctactcaataaacaaaagctatgtcttttgccagagaaacagttttgggggttttccttttataaaaacacaaagctgtggttttgaaaagcagtgcctcgctctgcctgtgtttacacaatcccttccagtgtgctttgttttaatattttttgtaataacgagttactgttggatttttgagatttttgttttcagcactgacttgacattaaaaactaatttgggcatttccaacttaaatagtaatttaggtattgaatatagttaaggaaactaaatgaagagaaaggaggctaccccgttgtctttgcctcaggattctgcaggaacaattctttacttagttcatggttcatgcactccagtttttccttattttaaggatcatgtaaaagtgtggttactttctgttattacatatgatgtaccatccattagcctgtgtattccagttcggtcctggtgctctattctcagggaacatttattgagcaatgaaataagaggttccagggcttagctagcccttcagatagaggaaaaggaaagtaaccatcttttacccatcagttgtttcctcatctcaagtcaaagccaaggttctagggtagccatgaaagtcagatacataaagagacctgattatatggcatctctctcctttactgcctgagttattttaggcccagacagactttatttagatctgaatggctcatttgacttgtttgaaatgagcatcagaagacaatatggtgagaaactaatagctgtaataacctaacaatttaaggcattgcctatccagttattccaatgtttacacagactgagtataaattttataaggactgtccttggaaggcatgctgataaatttgaccttttagatagcattgactcttatctaaagtttcaccagaaactttgtaacttgtgttgcaccttcttgtccagccaaacagatggaagagttcgctgtggagtataagatcattaatcccaaggctatcaccatggggcagctgtatgggtgctttgatcaagtgagccacgaatggacagatggtgtccttgccaatgctttccgagagcaagcatcttctttgtctgatgaccgcaagtggattatatttgatgggccagtggatgctgtttggattgaaaatatgaacactgttctggatgacaataaaaaggtacctttctgataccacttttacatggatggggaataaactcttttactgaagtgagtgattgatcacgatatataatgtatacacttatttacactgagaataaatgccacataagaaagtaacagttatcaattcataattata

SEQ ID NO: 32606 - DNA, 1912 bp, Bovine  19866880521834
  misc_feature (1)..(1): n is a, c, g, or t
ntttgggttttcctgtaagatggtatggaaaaacctgaatgaacatttttgccaattcaatatataaggatgtgtgttagtcgctcagtcatgtttgactctttgtgaccccatggatagtagcccaccaggcttctttgtccatggaattctacagacaagaacactggagtgggtagccatttccttttccataggatcttccctaacccagggattgaacctggatctcccacattgcaggcagattctttaccatctgagccaccagggaagcccatagaagatatatataatgtatataatagttttcatctgtgggatagttggcttaatagaagttactggctactactggaagtgaaattctattcattattttaatagctttaataaaatggctctttcctagtgatatctgaatatgcaatttcatctaaccaagagttatcttgggtgcactgcagtgcacaatagatatgtattgaaaattccagtgagggatattagtattccattttactacagtgggttccaggtgtaaagtttctttagactgaaaaagaaataattcttattcagagctctatgggtatcacatcttcttgctagcatgggctagaaacttcaggtttcctctctcatccgtgttactgtatgttcaatggaatagtcgacttaggtttattgcttatgaattaccctcttgattcagattaggtcaagaattggctattgtcctcaatctgaccccatgctgggccacatgacaggtcgggaagtgctgatcatgtacgccaggctgcggggtgttcctgagccagacattggcatgtatgtggaaacctttttgtattcaatgcacatggaaacccatgctgacaagctggtctgcacatacaggtgagacattatgttgcttatttattaagctgcctactgcccatctgtatttctgctgtttagaatgaatgcctgtaaactcaacctgacaactctgtcacacggaaacaaatagccgtcagggttcagatatcagaaataaggcagatcacatttgtatgaagttaaccttttgcagacatgatctgtagcctttgcatttcaaaaagaacacattcattcctgtatccctatggttatttatctccttaaaacaaaaatattttaccaataatgatgctaaaaagcatactccccccaaaagtcatttcaatgaaaatgagttggtgtatacacagcattgtggatatatgagctaattctgttgaattaatgataatcttattttttctttctcctccactttctctctccttctttgacaataaagtggaggaaacaaaggtaaattgaataccgctattgccctaatgggaaagtcctcagttgttttcctggatgaaccatctactggcatggacccagtagccaggcgccatatgtgggacacagttacagggatatgtaatagtggcaaagctatcgtcatatcttcccacaggtatgacccattaggagacatgggtgagagtcagaagtgtataagagagacttagtttgagtcagggatatgtcagtgaacttgtctaagtacgtgaagtacataagagggaccgtgagcaaatgctgattcctaggcaaaatctagaatactcagttaagttctgaaatgtagttccttatataataattacacaaaacatacacatttattaatgcattaaaagcaataactgcctaccaaaaattttaggttatgactggaattcaactggtaaaatattatttaactaataaaatatttaactgatagcaaattttatctgcaatagtatttaattttatttaactgataagacttggtaaaaggtaggaagtcagggaagtgtttctcttggaatttagaaat

SEQ ID NO: 32607 - DNA, 1874 bp, Bovine  19866880532608
  misc_feature (1)..(1): n is a, c, g, or t
ngctgagcgccgaagaattgatgcttttaaactgtggtgttggagaagactcttgagagtcccttggactgcaaggagatccaaccagtccattctgaaggagatcagccccctggggattctttagaaggaatgatgctaaagctgaagctccaatactttgaccacctcatgcgaagagttgactcattggaaaagactctgatgctgggagggattgggggcaagaggagaaggggacgacagaggatgagatggctggatggcatcactgactcgatggacgtgagtctgggtgaactccgggagttggtgatggacagggaggcctggcgtgctgtgattcatggggttgcaaagagtcggacatgactgagtcactgaactgaactgaatattacttttcaattcaaaaccctcttcaagttaaatgttatgaatggtctccagatagaaaataattaattatccaggatttaacatcctttcatgttagatcaaaagggtcctagactttgagattcctttaaaggcaaaagtatagcaatgaaaggaagacaaatagatatcctgcctggaaaattgactaactcaccctgagaaggaaatggcaacccactccagtggtcttgcctgaagaatcccagggacgggggagcctggtgggctgccgtctatgggttcgcacagagtcggacacgactgaagcgacttagcagcagtagcagcagcaccctgagaaacactgaatatacatgggttatctatactaccttaattaacatgataaaggaaatcctttctaaatactttattttcttctcttttagggacagttctaattccaggaaccactcagatgacccaaaaagatatcctctaccgactacaatcttcaaaagcaaagtgcattattaccaatgaagttttagctccagcagttgatgctgttgcatctaaatgtgaaaatctgcactccaaactaattgtgtctcagagccccagagagggttgggagaacctaaaggagatgatgaagtgagtaaccataattgttgtagaacagttttccaaaaagaaacacaacattgataagatagtcaaccctggattaaccagaaaaatgaaaattaaaataatagacaaagggaacaactggtgattatagtgcaaagctctgaggcaaggaactggtggtgtttttcacaggttgggatctcaaggaagcacaccataagacagacattagttgtgtaagttaattaagaagttatcttaggaccaatacctgtgaagaaaagggaacaatgtgggattgggcagctgttgaaatttatcatccacatacttcaaaaaagccatcagtcaacctacggggatcactggagtttagataacccttcaaagctatgtccagctaaagcaagaggtccaatcagatcagatcagatcagatcagtcgctcagtcatgtctgactctttgcaaccccatgaatcacaatacgccaggcctccctgtccatcaccaactcccggagttcactcagactcacatccatcgagtcagtgatgccatccagccatttcatcctctgttgtccccttctcctcttgcccccaatccctcccagcatcaaagtcttttccaatgagtcaactcttcgcatgaggtggccaaagtactggaatttcagcttgaacatcattccttccaaagagatcccagggctgatttccttcagagtggattggttggatctccttgcagtccaaaggactctcaagagtcttctccaacaccacagttcaaaagcatcagttcttcggcactcagttttcttcacagtccaactctcacattcatacatgacca

SEQ ID NO: 32608 - DNA, 1538 bp, Bovine  19866880615942
  misc_feature (1)..(1): n is a, c, g, or t
nactgtttatatcatggtctggataatcctttgttgtgggggctgccctgggcatcataggctgtttagcagcatcctttacttctacctactagatgccagtagtaccccctatttgtgagaacaaaaatgttctcccacttcgccaaatgtctgttgaggtaacaaaatggtcctaatggagccataatcctatgctttttgcattttttttttttttttactacatgaggcatcaattactcaaaaaatttaaagattcaaagaagagaaaaagcctagctgagaggaacaatggtctgagaaaatggtctaagacaaaggtgataaactagcagtcaccaggctatatctagccctggctaagatgcttttgaactgtggtgttggagaagactcttgagggtcccttggactgcaaggagatccaaccagtccattctgaaggagatcagccctgggatttctttggagggaatgatgctgaagctgaagctccagtactttggccacctcatgcaaagagttgactcattggaaaagactctgatgctgggagggattgggggcaggaggagaaggggacaacagaggatgagatggctggatggcatcactgactcgatggacgtgagtctgagtgaactccgggagttggtgatggacagggaggcctggcgtgctgcgattcatggggtcgcgaagagtcggacatgactgagtgacagaactgaactgaaccctcttaaagttttttttaaaaaattgaatgagttatcaaaatttaaaaatgggtgatttctgggacttccctggtggtctagtggttaagagtctgccttgcagtgcaggggacacaagttcaatgcctgatcagggaacagagatcccacatgcctcagagtaactaagccagtagaccataatgaaagatcccacatgatgcaaagaagatgccatatgctgcaactaagacgtgatgaagccaaataaatatttttttaaatggatgatttctacctttctggtttctcttgaagaagcagataatctggtcatcctaagatcacattatcaaatggcacaatacaaaagagctgccctctttaggccagaaaagaagtcttatgttgtcccagccctgccttagtctgttaattggaatgcccttcaaagccatttgagtttgagattcctgctcaatagagacaagctattgttatccattaatattcctcacacaacattctacccttacctgccattgggtctgcacctggagataacacgaatatcaacggtgcacagcagttggaatcactgtaggacccctggagatcaaacgtaggggcttcaatgtacacacttcccatgtgttcagcaatgaacccccgaatggctggaatcattttgtcaggccgcaaacatcggaggatcaccatcctctccaaaccatgaagaaacttccaagatccaggggaatgtttcctcatggggccaggctgagtcatagatgaacttccattcattaccatttt

SEQ ID NO: 32609 - DNA, 1057 bp, Bovine  19866880690610
  misc_feature (1)..(1): n is a, c, g, or t
naactcgatgcacatgggtttgggtgaactctgggagttggtgatggacagggtggcctggcgtgctgcgattcatggggtcgcaaagagttggaccaactgagctactgaactgaactgagtgtatatctgttaatcccaaatttcaaatttatccctccctctcctttcccctttggtaaccataaatttattttctatgtcagtcagtctgttttgtaaataagttcatttatgtcatattttagactctacacataagtgatattatatggcatttgtctttctctttctgacttattaatacttagtatgataatgtctagatccattcatgttgctgcaaatggcattatttccttctttattgtgactgagtgtgtatatatatgtatgtgtgccatatctgtcagtggacatttatgttgctcccatatcttggctattataagtagtgttgctgtggtcatcacggtgcatggatccttttgaattagacttttccctggatatatctcttatgagtaagatttctagatcataaggcaactcaatttttagtgtttaaggaacctccatattgttctccctagtgaaaatcagccacatttaaagtcatttttcaattgaagacttcccccaagaggcagtctttttatcctgctcacctctgatctatttattgcgttgcctgaatactccagtcatgctgccctaaaccatttcattcatatctttgctttcaaacactgtctatagtatggctacagcagagaagttgctccttcactggttttaaaacctttgggttgtccaaagagggaagagaaagttcagttgcacttgcttttgccactttctaaattgatgcattctcatcaactgcatataccccatgtaactcagtaaagcattcagaagaatcttttctgagacagatcactaaaatccttcttagcagagagggcagtggaaagcagtggacccccaacaaggacttgtagcctacatgagccatgcaactgagaacattctttagaagtacacatgtgccatt

SEQ ID NO: 32610 - DNA, 2033 bp, Bovine  19866880715472
  misc_feature (1)..(1): n is a, c, g, or t
ncaaaagtttgaggacccctggaataatgcaagaattaaaactgttcaattagaaatggacagtttattttatgaacttgtagactaaaaaaatgtaccaccctaaaagttgagttctgttttattcagcatacattcttaggatgtcaagttagggaggcagcatctcaagtaagcctgagaaaactgttggaggttggaggggagccaggatatttaggagttttgtgacttctgaatgtcaaaagattactgttaatgaaagaaaaccagatagcacaggttaaggaatttattgtttttctatgtatgagaagatgcaagagtctgggctcactgaaaatcagtcctttgatatccacctcagctatctggggccagtatcctgtgttttcacatcctgagtttcctcaagctgcacctttgggggtgactgcagcttgtaggcaggtattctttgtctccttcctgagttccttcagggttcaccttcaggggatacagggtggctgcaattgctggtggctgcaacttctttaattaatgacatgacaggcaatatcttatttctcaatctaaagtataaatgtgtcagttgtctcctgtgaagttgtctttcagaaaatgtgaaagaaatgtatgttaaaaagtctctattgtcccttttttgaaacatacacttctgagaatacagtaaataagtttaaccaatagttaaagaatattggcttgaaggtgtgcaaacctttggcctccctccagccctttgctgagagaaagctggcctctgcccatggtccctccctccaggcttggttaactgtcctctctgtctgtctcaacctgcagggcatggtggaaaaatggctcctgcaggtggaacagatgatgcttgccagtatgcaggaagttattaaacttgggattgaagcatatgtccaggtaaatgaaaactggggcacacatgccagggtgttggcacaccaagaaaaatgtgggtgccaaggttaaatggaagcccatcttccactaaaacccatccctctcctgataaataacacctgacccctctgtgcctctcttctttttccatttaaatcctggggcagtatatatagttctgaatatgaaaggtttacaattacaagcagcccataccagtatatcctatgagccagaaccctttgattgctgtgggccagtcctttctgtgaaaataattgatggcaagaggtttatttagagcctcttcctgattaagcatcccctcccctaggtttttcatttagcattgcacatgccctgtttactttaaaaaattgcacaatgtgaaaattgcaaggtaagttttatttggggcaacaagaagactgtagtctgggaaatggcacttcagacacctctgagaaattgctccatagaggtagggggcaggtcagtatacatgtaattttggtgaaaggggaatacatgcaatcaagcacatattttttcaggtttctgctagtcacaaggagcactcatcaccatgaagggtattggtgcttttctagatggaaggatatataagaattgagctgataaaaatggctcctgaaaaatgtctatctgaagacccgtgctgcaagtttttctcagagcacagagtgcctcatttctgctctccaccctgaattccttttaggggatgctgaaaatcagcagctgcagcagcacatgatttaatccgtatagaggtagatggcaagtggcaatttgtagatgacactccaaagggcacaactcatttagctcccaaagctttaggtgacttgtataacagaaggcgtaagggaaaagaacctgtcacaattactcttaagtttactgttggcagactagatcttttcagttcagttcagttgctcagtcgtgtccaactctttacgatcccatggactggcagcatgccagtcatcaccaacttcctggagcttgctcaaactcatgtcctattgagtcagtgatgccatccaaccatctcaccctctgtt

SEQ ID NO: 32611 - DNA, 1139 bp, Bovine  19866880783034
  misc_feature (1)..(1): n is a, c, g, or t
ntgaataccagcaccaccaaagagatcatgatggccagtaaactcaaggggttgtgaggctcaaaagaaataaatgaggaagtgctttctaaacagataaaattctggaaaaattcaatgtgcttatttggcaactattagatttcttcatatactgataacatatttatcttgcacttaatggaatagaagcttatcacagtgtgtgagttgcttctggagacacaagagagtaaatactacaatccccttctgaacctaactactgttactacaaagtaacttggcctgatccatgggctcaacttcatcccaggagaaactgggatcctccctcaggcaaaaaggtgtggaccatgtctcaacatggaaaatttggcatatagtacatagttaaaaatacttggaaatgaatgaaggaaaggacaaggaacaaaaaattaaagaagcaagaaagggagggaaggagagaagaaaggatggaaagatggaagaaaagaaggaaggaaaataggaggggagggaaggaatgtggaattacattaaccagaaatattttatcttccatagacagtaaaatgaatatacagcagtcctacaaagggaaattcggttttgctgcaacttaaaatagaagaatttggtgtgtccagatccaggccagtgccttacccacaaataccactgctttcttccctatgggaggcccaaaaaggcctttccgccggcgatccagcttggacatgatgatatcctgcgtctgattggctgaagttctggcagagaaattgatgcagttgggcagataagtatttttgggaaggcgaagtaggaagttgttggtgatgaccgatttgcctgtgcccgtgggtcctacgaacagcattggaatctcatggtccaggtaggttttcaagaagaaggactgtcgggctgtctccatggtggggatgatgagttctgagacctgtgccacaaagacatggtaagtcttgatactgggaccaggagattgtgtcttggtattcaagagacttgagttttatccttactatccattcagctctgtctcttatttatctttataattttgagtattttacctctctagcagcctagtttcttcatctatgaaaggg

SEQ ID NO: 32612 - DNA, 1832 bp, Bovine  19866880817530
  misc_feature (1)..(1): n is a, c, g, or t
ngtttatcagtcaagtttatttttgcaaacaacaaaactcaactccaattaaattaagcagaaaagcaattttgtgtgtgtgtgtttaaggaaaaagaaaagtatattccctgcttatcactgacagtagattcttatcaattactgtgaatcatttttaaactcactgggtctttgtacacacaagtgtacaaatgggaaggaagatcttacctcttactaatgaggggatgctcactaatattactcacagtggggaataggcaagtttagatgctggccagctaaagtataaacatcccacaatagcagtgttttttagactgggttgtgtcccattagcaagttatagctgaccttgtctttggaggggcaaggaggtgagtgatggaatagaccttaacagttcattgcagatagtaaggtaagtattgttcaaaatgcattttgtatgtgtattcagaaataatttaaattattgaatagttgcactgagggaacatgaaaaagtggtgaggaaaaaccaatgattcctttccatattctccatgactgtgtttcctattatcttctatctcaatagcatctaacttcttatttttgcattgttcccctttccttctttctaatagatgtccatatcagacctgcaacttcgtttaacttgacatctactgtgttttgacatatttgagtgaatcacagagtagtcattatgagattcaaaactcatgtaaaagcattgagctgtaaaagaaaggatgtaatctgaaaaaagaaattgatatgattgaagaatatggattgttgagggtgactaggggtggagatggaataagaggagatgtagtagtgagagatgaggcttgctgctactgctaagtcacttcagtcgtgtccgactctgtgtgaccccagagacggcagcccaccaggctcccctgtccctgggactctccaggcaagaacactggagtgggttgcctagaggtaggtttaaactttgttttgcaggctgtaaatgccatgctaataattttgggtttattctgtaagcattgaggaactagagggttatagctaattctctgtcctaaggattttgcttcagtttcccaaccaaaatatcaaagtccttaagttatagtccattagatcatagcactttgatctttcttcactttagtctttctttgaaatattcatctattcttctccagtttacccacctcttctgtggataactcctgcatctttagctttgatgtcccaaattccaggcctacattttctcagctgcctgatggatgttgctacctggatactccattgtaccttcagtcatagcataattaaaagcattttttttctccttaaataatagacttccaccttcaaatcctcttttctgttagtgttgtttttctctaagacaccagtcttgaattttagaatttcttttcttttggctccccatacccaatctgcatgattcattccctttgctattaagaatctctattcaaatgttactttataagagatacgttccctgattgtaaaatatatgacattaaccctttttctgccctagcgctgcctttcctcctttaccttatcctcacctgatatattatgtatttgtttattgtgcatcttctcaactagaatttaggagaatttgttgattttgttcattggggaatctactgagtagagcaatgccaggcatataataagtactcagtaaatattttgtcgactgaactgaattattctgtcactatgctttatcagtttttcttctgtaatgtttcttttatcctttttct

SEQ ID NO: 32613 - DNA, 1955 bp, Bovine  19866880832077
  misc_feature (1)..(1): n is a, c, g, or t
ncgtcttttctttcttgctgttggaaaaccgttttgttgttatttatttccttacctgtgactcagaggaggtaacagttatgtgctggaactgtaactgagcaagtgggtttgctgcccactgtgcaatggaaagaccaaggcaatggtctttgcagagagaaaatgttttattgaagggtggaaaacaaggagacaagaggcactgctttagattcatctccttgattggcttttgaatgggaaataaggaaaaagagggggaggctgcttagaaacaaatgatggaaagtaagtgtaagtttcaatgtaagtttcaggagtgaaggctggacagtccttcatgcctctcatgggttacatgtgcagttttagaggtgaaagggcccagtccgtaatatgtaatgagttttaagcctgtgatatccagagtgcacaatcagtcattcgagtccctcagggcatctgtgtgatgctcatgctcagttggagggactttctgcaagttgtttccacatctgtgatttccctggtactctgtgaaagaggtttggtgttccttgatgtttctaccttatcaaccttgatcctttaaggtacaggatgtggtttcagagccagctctatgtaacaagctcaggagagatgattgctaaggttttaggaagtctgaatcagataaacaattcattattaaaaataaaattatataaacttaaatttaataaattatattaaaaaggtaatactcaaaacttattgctttctaattattttaccacattttactattatctttgctcttaagattgtgcacatctattgaatatctatgtggtgagaataatttctaatcaattgctactatgtctctcttccaaattctgtgtccagtaatgtcatattagtgcttaaaatatgttgtggtggtgcatttacaccacagaaattggcacgtgctatataaatcagtgtttgattctttcccttaatgagatggttgttaacatttaccagcatagcatggggtaatcctatctaggggaaacatctaattgatcttagataaagaaggtagctctgtttcctttctcctaggtatgtgatctgattctggccaaagagacatgaaagttactcatttggggaatttcttagaaagcttttttgcttctaaaaatgagatataaggtagatatggattgtttctggccatgtgatgcctaaatgtgacatatctgggcttttgaagttatcttataacaatgtcaaggcaagattaacttgcattttgttctttaatttttttatttcttagacctcatcttcagagaaaaaattagtatgtgttgtttatattttctcttctagaggggatcctaatagatgtgacatctggggaaatactcctttacattatgcagcctccaatggtcatgcccactgcgtctcattcctgatcaactttggtgccaacatctttgctctggacaatgacttacagtctccactggatgctgctgccagcagagagcagaatgaatgtgtcgctcttctggataaggctgccactgcccagaacatcatgaaccccaagaaagtcaccaggcagaaggagcaggctcagaagaatgtcaagaagcagatcaaagagtgtgagaggctccaggagaagcaccaaaataagatggcccgcacatacagcaaggaggaatctgggactctttcttcttccaagggaactttctctaggtcagtcctttcaaatgcttctgcttctaacacatttgggtcactgtctaagggtattaatgataccctcaagcttaagttcaagaagaacaaagatacagcagagcagttagggaatgagagcagaagtggacagaagaatgtgatggaagtgttcagagaggatgacggaagatgaactctcaggggacttcatagagaag

SEQ ID NO: 32614 - DNA, 1308 bp, Bovine  19866880865417
  misc_feature (1)..(1): n is a, c, g, or t
nctcggagatctgaaattcttggaaagtctcaagacatatgacaaagacaacattcccccagtcatcatgaagcggatccgggaaaggtttatcgatcacccagatttccagcctgctgtaattaaaaatgtatcatctgcatgtgagggtctgtgcaagtgggtgagggccatggaggtgtatgatcgtgtggccaaagtggtggctcccaaacgggagcggctgaaggaggctgaggggaagctggacacacagatgcagaaactgaaccagaagcgagcagagctgaagctagtggaagaccgcctccaggccctgaacgatgactttgaagagatgaataccaagaaaaagacactggagggaaacattgaaatctgttcccaaaagctgatcagagcagaaaaactgattagtggtcttggaggagagaaagacagatggacagaagccgctcggcagctgggtatccgttatactaatctgacgggggatgtgtttggttgtcctctgggactgtggcttacctgggggcctttactgtggattatcgggctgagtgccagaagcagtggttggcgcaatgtaaggacaaggtcatccctggctccagtgacttcagtcttagcaacacattaggagatcctgtaaaaattcgtgcctggcagattgctgggcttcccattgactccttctccattgacaatggcatcattgtatccaattccagacgctgggccttaatgattgaccctcaggggcaggccaataagtggatcaagaatatggagaaagcaaataagctgtcagtcatcaagttctcggataccaactatgtgaggacgctagaacacgccctgcagtttggtaccccagtcttactagaaaatgttggggaagagttggatgcctttattgaacccatcttgctcaagtccacattcaaacagcaaggggttgagtacatgaggcttggtgaaaacatcatcgaatactccagagattttaagttatatatcacaacccgtttgaggaacccacattacctccctgaggtggccgtgaaagtctgtctcctcaactttatgatcactcccttgggcctccaagatcaactccttggcattgtggctgccaaggagaagccagaacttgaagagaaaaagaacaagttgattgtggaaagtgccaagaacaagaaacaactaaaggaaattgaagataagatattggaggtcctttccctttctgagggcaacatacttgaggatgagactgccatcaaaattttgtcttcttccaaagtg

SEQ ID NO: 32615 - DNA, 1193 bp, Bovine  19866880888257
  misc_feature (1)..(1): n is a, c, g, or t
nctctgtattatgtatatgtagcactgtttcctaggtcagagtgtctgtattttgtatttttatctttgatttctagtatagaaataggtttccctagcatttcctggcaggttctgtcctgtaatttttcttcctaatgagagaaattaaatcaatcattttttgatatgccaaagtatcagtctgtcaaaattaaccatttacactattttgagtagtgtaagtccatccttaagccattttattttatatgtccaacatcacacacagatgcatggactattgtgatttctgtttgatttcttgtattttgtggtttccctaagtccctagcctcatacatttcctttatattatagcatatgaattgttttccaactgaagaaaatagtattccttagctattttcatgattttgccgtgcctaatatgtctaaaatttatataactacctattataatcagaacattaacaaaaacgtccttgaattgtttttactaattacttcatacaacagccaaaaaaaaaatctctcagaatttcttgtggtttgatttatgccttgcttgttaccgcttgttagttctgtcttgctccagtcatcctttttgacccaatggcaattaaaatctattctctgctttttctgctggttttacattttaaagcagggtcagaaacctttttttataaagggtcatataataaatatttcagactttgtggacaatgtgatctctgtcacagttactcagctctgcttctgtagcatgcatgctgctatagacatgatgaaataaatgagtgtggctatgattcaagcaaacaaaacaacacaaaagacagagaatctcaaaagatcttgataggctaaagtaaaaggacaaatgacaggaagtggaatgagtaggcacaagggtaaacagatcttttgagattttgattctatcatccagtatggttgccatctcttgtaagctttcaagattttcatatgtgtattgagaaggctatttctttaagacaaaaataaaacaataccaaaaaaaaaaaaaaaaaagacagagagcctgattttggagtacggtctatagtatactgttttaaagtgttgaaatggaaagcaacaaaattctgtaaagcaattatccttcaattaaaaaataaataaatttttaaaaaaagatctta

SEQ ID NO: 32616 - DNA, 1266 bp, Bovine  19866880899335
  misc_feature (1)..(1): n is a, c, g, or t
ntggggtaggtactatatattcatttatctctatttaaaatgggagaactaagtcttggagaagctaagtaacttgccctgaagttgtctacagtagtaagttctttaatcattaaagttcttacctctgaggcagttcagcacaagaaggtaacattgtgttaacagttaaagtacatataaaaattcgtgaaaatgggaatatgtatgtgttacggtggaagcaaagatgatggagcaagtggccaattattataaagtttcactcactgatctcaagtgccatgactctcagaggtaacagagagaccttcttgcttaagttcataccttattttccggtcttactctccagacaaacatgcatcttcctcaacttggttttcaaagcactgaggaatttgccatggtggcttctagggttcagaagaaccgcccacccaataaacagcatccccttttgccctgcagttgatcaataaggaagaggagctgttggaaaaggagaagagtaccttccctcttctgcaaattgtgatgaccaacaaagtgccttatgagcagctgtgggtgacagcctacgaatttagcaccaagtcagaggaatggatgaatggtatgccacggtttcactctactcggacaggatgggaatagggtagcagaatcaacccagccagttctgaaataagactgggacttcagattctggctggactctttatcatattctcacactctggattaaggctatgctatgctatgctatgctaagtcgcttcagtagtgtccgactctgtgcaaccccatagatggcagcccaccaggctctgccatccctgggattctccaggcaagaatactggagtgggttgcctttctggattaaggcaaccatagttaaatttttctgatgtgataacgatggaaggtagggatcaaaaagccagacctgtagctaggataaaatagaatgggcaaccactcaaagccatggattgggtagtaactgggaggataagatcacagttcccctattatgctaatgctttatgccagtacttcaatataataaacacaactatgaagaacaactttgttgccaattttctggatacagtaatgataattttcttaggataaattactggaagtgaaatggctagatcaaagaaagggttgtaataaaaatataaggattttagaatttacttttattattggtattgctttccagaaaagttatgttttaatttaatattcttc

SEQ ID NO: 32617 - DNA, 1440 bp, Bovine  19866880912370
  misc_feature (1)..(1): n is a, c, g, or t
ncccccatgaagatgatctgccttgggatgaggatgaagtggaatgggaggaagatgtggttgatgctactcccttggaagtgttcttgcagtcccactacttggaagaattccttcctattttcatgagagagcagattgatctggaagctctgctgctttgctctgatgaggaccttcagagcatacaaatgcagctgggtcccaggaagaaagttcttaatgccataaatagaaggaagcaggtgctacaacagcctgggcagttggttgacactaacctctgatggagtgttgggtcaatggggtgagtctatagaggtgggggtgatgctgtagcttactggagatattccaggcaatacctactctgtacccaataccagactactggatttctagggttttggaggtgtccacctaagagagaagcccaaaatctactttgagaaatgctctgtacctaaattcacataaaccactcaaggaggtaagaaatgggaataaggaaatgacatttctcttcaattatctttttgatatttttgaatatagaaaggattaaatggatgacagagaatagaaaagactttatttcctaactttgaacttaaaactatagtctcctatcacactagcctaatttctgatccttagctccatgactttacctgttgatggaaactaagattcctccattggcctgtggcttgagcccaacttgaatgtgtctaaccctaatcagtagatgtttacatgtttacaagtaatagaaatgggtctgtaacattcctacttgggaacacagagaatgtcaggtagagagagagatgaaatagaatgtacggtacctgtatggactaaattttgtccttccaaaatttctatgcttaatttctgatcttgagtctagggattctaacgccagtcatgctgtgaagaggtagacacactggtgatgtgcttgcatcgccatgtgaagatagagcaagaagacagctatctgaaagccacaaaaggaagcctcgggagaaaccaaactttttattgcttttatcttggacttccagcctccagagctataagaaaataaagttctgttgtttaagccaccagtctgtggtattttgttacagcagtcctagcagaataagattgtccttaagacaagagagacagggaggagaaaataaaaatacagaaaagaagattagatgatttttagatggttagatgatttttttcctaagtgtaagtgcctcctgaaacctaaaaaaggaaaaagaaatctaggttttttgttgagaaaattcaattgtaaaagttgaatttttgtatggttattatatacatatcttatttactgttgtctatcaccatttctgcacatctgaatacatgcaggttctacaatataaactgtcaacactaacactgctg

SEQ ID NO: 32618 - DNA, 1528 bp, Bovine  19866880928125
  misc_feature (1)..(1): n is a, c, g, or t
nttcagtttcctcaagtaaaatgagcataatcaagggaattcccctggtggttcagtggttaggactctgtgcttccactgccaagggcacaggttcaattcccactccagggaaataagatccctcatgctgcacagtgtgggcctcctcccctaaaattaaaaaaaaaaaaaaaaatagaatgggcatagtcacagctgccttctagcattgagaagtggattgtataagacactgcacagagcgctgtcacataatacatattccataaaaggtgaattttattattgttgttgttatgtttttttgtggtgtgtgcttcatcagaggagcacacagaataagctccctcagcaaagagggaccaaagtaaagttttccttcccagtccctttaaattgcatgatgacttaccatggttcagaactaggctgagagtccaccaccagtgcacgaaggatctgggcaagctagatcccacgaggcatatgagagtgataccttctggctcagggtcagctacacctacccggatgcattgatgacatcgtcactcctcccaaggaaccagaagtagccctcttcgtcaatagttgctctgtccccagtgttataaaagtccccacattccacttcagctgttttctctgggttattctgcaaagagaacagcactcctttgttgaaagcaatgagtttagagatgatgagcctcaacacagggttcagatactggcttcaaatcctgctctacctgacttgggcagtttttatatctctctattttcattgcatgcaagcactcaatgcatgctactggtaaaatagtgaacaatactaagcaaattttaagagcattaaaaaaaataacaactcagttttgtgtggtactccagtagaataaaatttctaccagagtataattccatttattttattcactcttataagctcagcattcacacagtgcctggacagatgggagatgtcaataaatgtttgctgaatgaattttcttctcaaaagattacctatttgagcctcacacaaagactgtgaaaatggtgttttaattaaacttttaagataattgtatatttgcatgcagttatgagaaataattggacttctccggtggtccagatggtaaagaatccacctgtgaagtgagaaaggtgggttcgatccctgggttgggaatatcccctggaggaggaaatggcaaccaactccagtattcttgcctggagaatccccacgggcagaggagcctggcagcctacagtccatgaggtcacaaagagtgggacacaactaaatgactaagcacagaataagaaataatatgggcttccctagtggctcatatggtaaagaatctgcctgcaatgtaggagacccaggttcaatccctgggttgggaagattctctggagaaggaaatggcaaccagctccagtattcctgcctgaagaattccatggacagaggagcctggcgggctacagtccatggggtcccaaagag

SEQ ID NO: 32619 - DNA, 989 bp, Bovine  19866880951857
  misc_feature (1)..(1): n is a, c, g, or t
nggtgaataatcctatttcacaaatcccaggatggtaacatcttcccttaacaaatggggagatccataaagtaattgactttagaatggatttttttttcagcagaatgtctcccacgctgacagtaaataccaaagctaatagttggcaaggtgcttaatattcatgggactgaaaagaggctcttgatccatgatgatgtttaacttcaccagcccaatctctgagtgggaattaagaactctcatcctgaagcatctaattcatctttgcctcatgcaggttggaatattccttatgaattcaatgaatctgacctgaggattagtatgcgacagatccagatgtttctgaatgattacaaggaggtgccatttgatgctctgacctacctgacaggtatttatgggaggaggttttgaggtgccatttgatgctctgacctacctgacaggtatttatgggaggaggttttgacaaccacaaacctccacaattatgctccaccttcctgctcctctgctcccagctccattcgtttactcacttatgccttcaacaaacattgagctcttactgatgctggtcaccatgctggatattataaaacaaaaaaacaacataccaaaaaatcaagattaattcctcctcttaagtggtgcacagtccacaaagggagagaaatataacaaaataaatgacaatacagtggtaagttcaataagaggaacatttataatgtagaaaggcagcacaatgattaaatttcagatatggggtgggatgattagggataacttccttaaggcattaaagatggttttgagggataagtaggagttttactactggaagaagaaagtgggagtgggtggtgaaaaaagaaggcgagtgctcccagcagagataccctgaggtgaaaatgacccttgctggtttgtattaaagcaattcatcagctgtatcatcaatatataccagtacataa

SEQ ID NO: 32620 - DNA, 3380 bp, Bovine  19866881047788
  misc_feature (1)..(1): n is a, c, g, or t
nctgggctgtcttgcagcagcagccacataagccctgggctctcccaacacagctgcttgtaaacattgctcatcaacagcagtgaaggggaacttgagtggtgtgtactttatctgtctccaagccccacacttatccttccaaattacaggatcttctctttcatttccttcctagggatattgattgtaggagagctgcccacgcttcttccctctctgcacatccagttttcctgttagtctgactcggctgggttaaaagcctcaatttagagttctctggtgaaaccaactggaacatgcagcttcacatgctttcctaaaaactccaactctaatcatgagatcttagaaccctctaagtacagggctgcaaagagaagcgtgcttaagggtacctgagcatcatacatggggagggagggggagtgggaggcggaggtgaggtgggtagaaacatctcacaagccccttccctacgtggggctggacactggcctctcgctacatcaaccacctagaaggagacataagatggaatgcaaaagagtcacactcatgtgggtgatcctgcccagttctaaaagtctgataataactgagatctgattaataaagtcaccctggaaaggaaacttggaaaaaggtttccttttctaagttccctaggccaggaagggaaggtttaatctctcccctagaagttaaacaaactaataaacaaataaacatatggagctttaagaactaaatgagatacatagtcttatgaaaattcttggcaaagtgcagagcaactgatccatcatgaattattaatccaagatggatatggcttgggacacatctgctcttttgaggttggcatcatgcacgtaactctgcttgctcacaaagtagatctcagtgtatttgttaatgggatgcatggaaatttttttaaggccccaattctctttcagggattcaagagggtgtactcaggctatatctcccatagtaaagccctactttgcacaagcagccatttaaacataacttttattcaatatgtgaatacaaataaaaacaaataattcagtactataccttggggatccctttagagttcttaataatttccaagaaagagttacgtattaattcccagcagtcatcaaaagatggattaaagacaataattggctcattgacttcaagcttaatcataatcagctgaggtataaagaactccatttcttggtagggctcctcaaaatcatttccatccttcaggatacataagatatggtgattattacaaaatggaaccttttagaatcaaaggagtgacttgtacctgttcatagtgctacatggggtaccagaaaaggaaatgtaaggtaccatgcactgtttctatttaaaataagggttaagtctggcttagcccacctgagttcaccctctcccccttcttcaaagtatgtttacattgcttggaaattattttatcaatatttccaaatcctccccatctgttaaaattctgaccaaaatctcctcctttgggaagcctccctgttccccatgaagaaataatcttctacctctgaacttccttatttccacttgcgtgtggtattttatctttctctcatgagatttacatgcacaggatctgtgtctgaaccatctatgtcctccaaaatatacaaggtagcatttagtacatcataaaagcaggcggcacaaggggtaaagaacccgcctatcaatgcaggagacataacagacacaggtttgacccctgggtcgggaagatcccctggaggaggaaatggcaacccattccagtattcttgcctggagaatcccatggacaggggagcctggcaggctacagtccacagggtcacaaagagttgaacacaactgaagtgacttagcacacatgtacaagggctcaataaaaatttgttgaccgaatccaaaagtgtaagagtttatctgtacatcccacatggagttgctaattagcatataatatattttagacattcaaaatgtcaacctttttgcagtagaaatactgatatggaactttagtgaagtgaaagtcactcagtagtgtccaactctttgtgattccatggacgatacagttcatggaattctccaggtcagaatactggagtgggtagtctatcctttcttcaggggatcttcctgacctaggaatcgaaccggggtctcctgcattgtaggcagattctttaccagctgagctaccagggaagctgtagcttagttggtaaagaactgatgtggagacatttctaattcctaacactggctagtaacacaagatatctttcataaaaggcatgaaagtgaaagtgaagttgctgtcgtgtccgactctttgtgactccataatttgtagcccaccaggctcctccatccatgggattttccaggcaagagtactggagtgggttgccatttccgtctccaggggatcttcccaacccagggatcaaacctgggtctcctgcattgcaggcagatgctttactgtctgagctaccagggaagcaagtgcctaataaaattggcatgaggcatttgtaaagtatttgctcaaataattgattctaaagattcaatttagaatctagaaattctagatttgtctaaggattattgataagcattaggtgaatgtctactatgtatcaaatacccacacatttttttctttaagatatattcaatttttaattttccctttgtttgaaattttagaatgaaacttggttgagtttgagtctcttctgcttagccaaatagatgatcacaatgatatgtatagattagtccactgtagaatgctaatggtgcagtctaaatttgacagcactggttctgtattttttgaataacaggtcaactgttcatttttactttatttggcaaaatccttagaacttaaccttttctaaccagacaatttaaaattttatcactctttttaaattaaaatggcacacagtataaaatacaaaaaaaatcttccttgatttcccacgttatctaaatttaagggagtctatgatgctttgaaaaccatcacagtgttttagtttttatcttagtgctttagtttttatctagacttcacttaagtagtgtcatgaaagtagttattaattaggtcaatgaagtctcttgtttttagaggcacccattccaaaaccaaagaataaaagcccatatctgcaatgaacatgcacaacacttcctaaatagcaagccaaaagactgataacaaaccctttttaatccccttttttttttaaacagagaggatgaaaaagtgaccactcctctacagt

SEQ ID NO: 32621 - DNA, 1304 bp, Bovine  19866881073352
  misc_feature (1)..(1): n is a, c, g, or t
ntaaaaggtaaacctacatgtatcagtacacatgggtgattaaaaaaaaaaaaacataaaaaaatgcaagatagtaattactttaaaatcaggatagtggtaagctttggagggagacagggagagggctgtgattgggatgggatatatggaggggcttctatgaagggctggcaaagttgtatttcttgacatggatggtagatgtatagatgttaactttataatgattcactttataattttggtgattttctgtatctgtgctttactttatacagtaaaatattttttaaaaatacatgcaggcaaattatagaaacagaaaatcgattattagttgccaagggctgcaaggaaatagaaagtggtaaatgtaaaggatttctttttggagtgattattctgctattgattgtgataatgattgcacaactaaaatacgaaatatttatttaactgtttactttaaatggatgaattttagagatataaatatatggatatctaatattagatacatagatacagttgtagagctgtaagaacaccaaactaacagtgattaatttgggaggggagacagaatggatttagtgtgtaggaggcaagggttactttctgtaaaagtatttctgaattatttgattattttataaaaataacatattgccattatctagtaacagtcttgagcactgggctagtactattaccagaacttctgcagtcatggagatgttctgtatctatactgtgcagtacaacatccactagtcacacgtttatccttgagaagttgatatgtggttgatgagactgaggaaatacatttaatattacttaattttaatccatataaatttaaatagccacatatggctagaggctgccatgttgaatagcacagctctagaacttaaaggcggagaaaaaaccgttctatatctaagggttgctacgcccaggaggtaagtgtgagtgtgtgtgcatgttttccaggacggttcactcgccatctgaatatcatttccatcaatgccttcgaggatgacatattaaccaagattttcagttcaatcgctgactggcacttcgggaaagggtttgatgtggtgtttttaaggtaaggaggttcctctattattggcctggggtcctcatttctggcccttccttaactggtctgtcttctccttcctcccaaggtatggaaagatgatggtacaagcaacgatgacaatttacaaagctgcagtggagaatttcctgccaactccctccaagtcacactatgtctttaa

SEQ ID NO: 32622 - DNA, 1233 bp, Bovine  19866881085616
  misc_feature (1)..(1): n is a, c, g, or t
nctggaaggagatgatcgacctaaagagtaacattcattacacttggcaagaagtgtttcttaaatcctggaattattttcttttggagtttaatattttaaatcaccacataaagcctctggtgctagagatatagtgaagtgtgctatttaaagaccacaaggcagaataaaggaacacaagcagaacccaagtcacttcacttcacttactctagcttaagagaggatttccttttaacttccaaaattaaagtgtttgaaaatacttccacagagtgttttctttccaaagtacattttccagccacaaaacagatgtaaacaacctcaatcaataaatcaataaaacagaatcaaataacctcaacagatcaaatatatatatgatggcattagaaatcaatggaaataatggattaagaattagaaaagaactttttagaaagttaaaaaaataaatttctaattagaaaagaattaagatagattcctattaataccctgtatcaaaataagatagcagaaatataaaaactaaaatcataaaataaaaagaaaaaagaaaatggggcttccctggtggctcagtggtgaagaatccacctgccaatgtaagagacatgattcaatccctggttcgggaagatcccatgtgtcccggagaaactaagcctgtgtgccacaactattgagcctgtactctggagcccaggagccccaactcctgagcccacatgctacaactactgaagcccacgtatcctagaatctgcattcaacaagaagaaaagccacagcaatgagaaggaaccacaacgaaccatagtccttgctcatcacaactagagaaatgcccacgcagcagcaaagacccagcacaaccaaaaataaacaaataaatacaattattttttaaaaaaggaaaatattcaagttgactgtgtggtcttaggaatggggaagacccttcaactatatatgcaaagtcagattctataaagaaaaagatcatgattgtaatttaaaagtaaataataaccacgtgcaatacatatgaaggggtaatattctttatatatagcgagtcctttcaaatcaatgtgaaattgaacatcaaaattgaaaaatggacaaaggatatgaataacgcaattcatataagatggcatacaggatatctaaagtacatatactttaaagttcatgctttccagtaatcaaagaaatgca

SEQ ID NO: 32623 - DNA, 1061 bp, Bovine  19866881094013
  misc_feature (1)..(1): n is a, c, g, or t
nattctaatatttatcttatgcctcccatatggaactgaacaatgggttctgaactcaagagttcataatctagtgggagaaatatatttatttttcatcattccattagcattggtgatctttggaatgcagagggtttttcactttcatttgattcatttagtatcagttcagttcagtcactcagtcatgtccaactctctgcgaccccatggactgcagcactccaggcttccctgtccatcaccaactcctggagcttactcaaactcgtgtccatcgagttggtgatgccatccaaccatgtcatcctttgtcgttcccttctccttctgccttccatctttcccagcatcagggtcttttctagtgagtcagttcttcgcatcaggtggccaaaatattgtagtttcagcttcagcatcagtccttccaatgaatattcagaactgatttcctttaggatggtgtggttggatctccttgctgttcaagggactctcaagagtcttctccagaaccacagttcaaaatgatcaattcttctgcgctcagctttctttatagtccaactcttatatccatacatgactactggaaaaaccatagctttgactagatggacctttgttgacaaagtaatgtctctactttttaatatgctgtctaggttgtcatttaatatgtatatattcatttatccattcaatcattcattcaaacaaatgcttttaggtgccacccatacatactcagttgtaacactgagtaaaatagaattttttgtgatgatgatgatgtattgcccatataatcagggaaaatcatgtttaattatttgagtcaaaacaaaataaaccaaaagccagtttgtttcttgtgtcttaggacatggcattgagttcttattttcttccccttaggacactgatgggggctttgaagctgaaccttggaggagccccagagggtccagctgggacaggcaagacagaaaccaccaaagatctggccaaagctttggccaagcaggtagggaaacgctgtccatcctcacact

SEQ ID NO: 32624 - DNA, 2034 bp, Bovine  19866881097952
  misc_feature (1)..(1): n is a, c, g, or t
ncttcctggcaaatagatggggaaacagtggaaacagtgagagactttatattttggggctccaaaatcactgcagatggtgattgcagccatgaaattaaactacgcttactccttggaaggaaagttatgaccaacctacacagcatattaaaaagcggagacattagtttgccaacaaagttctgtctagtcaaagctatggtttttccagtagtcatgtatggatgtgagagttggactataaagaaagctgagtaccgaaaaatttatacatttgaactgtggttgttgaagaaggctcttgagagtcccttggacttcaaggagatccaaccagtccatcctagaggaaatcagtcctgaatattcattggaaggactgatactgaagctgaaactctaatactttggccacctgctgcgaagaactgactcattagaaaagaccctgatgctgggaaagattgaaggcaggaggaaaaggggacagcaaggatgagatggttgtatggcatcactgactcaatggacatgaatttgagtaaactctgggagttggtgatggacagggaggcttcgcatgctatagtccatggggtcgcaaagagttggacacgactgagcgactgaactgaactgaactaaactgagtcaccatataccctctgagccaccagggaagtctcatattttatatatactattgtatttttatatatactattggatttcattgtaatggattaggtcaagcaagtgaggtgagcgcagggtcagacgctgtctttatttttgtgctctcttgacttctgcatctgagcaagtgcttcaccgcatccagttagctctggacctctttgtcccagtactatttggtctgtgcttacctgtgaagctgcaaattcaagtttttgcaggcctgtcagatatcggttcctcatcatatcaacctcttgcctcttcttattcaggagtgtcttgaatgttaggatcaattcgaggtaggaggtgggggtaacatagttgtgccttcgaagggtgttgtaataatcaagtgacagctttttcacactctcctggaaatatttgcacatggagatgaccctgttgaggacacaaaggtggtcagacaggcccaacttgctccagagagatctagcacagctttggttcacagaagtaaggatgtgagaaagccactcacactggccagctagaacccccagttctttgaagcatgtccacagagcctcaagaaggattggggaggtatatagtcttactagaatgaactttgatcaggcaatttccagctttaatcacttttgtgaatcaccagggcttaagcaggaatttttaatctttggcagtctgatgaagcctctggacttttcagaataatattttaatgcataaaataatatattatagaattacaaaagaaaccaattatgttaaagatttttctaaatattttaaacaccaaatttatgatatagtaatgtgtatgtgtgtgtgcatgtgtttggctgcgccttgtggcatgtaggattttagtttcctgacctggatcgaacccacacagcctgcagtggttaagaatccactggaagcatggattcttaactactgcaggtaagcctcaatatgtgtgatttcatttacatgttaaatcaggggtcaacagactttttctggttaggatcagatagtaactattttaggctttgtgagccacatggtctcaagtagcaactattcaactctgcctctgtagtgtgcatggctgttttccaataaagcatatttgcaaaaataaggctgtgaactggattcagccgtggatcatagtttgccaactacagcattaaatagtaagactggacaacaggtctgaaaactaccatcattttgaaggggatgataaattggtgcatctgtaatgactgaacgagttatgaaaataattgcagtgcctactggtaacaaagtcacaggtcctacacaatcctatggggtttattgcctatg

SEQ ID NO: 32625 - DNA, 1024 bp, Bovine  19866881125308
  misc_feature (1)..(1): n is a, c, g, or t
nttttcatgagagccacatatttgggctcagtaggaagagatgtttccagagcaaggatagcatgacatacaggactttgaaaatactgtttctaccaaaaaaaccgtggccacatggctggcttccatccctggagtttaaaaaagaaggagaagaccctcaggaatatgtgcctacctcatctagtagctatagcccctcctcataatttttgccttgtgattcttcatttggaaagagaaattcccagctaagtcagtttagctatgccttcaaatttcagtgagctattagttgtgccctccaaattccagtgaactgaaacaaagctattactctagtaattagccagcaatgtgcctttatttagtggaatgaatttctgctccaatgaccaacatattagccatctattctcaagacaggtagtgacctgagaattctgtgtctgtttcctgaggactgctccactatgcaaaggctgatgaagtttcgggtcctctggggcatccacatgtcctgccctggcttccaccatgcccctcagcacctgcgctgccgatctttatcaggagctggaaccctaagatggaatgactatgacagacctgaggaatttaactttgcaagtgatgtactggaccactggactcaaatggagaaggtaaggaggcctctgtgttgtgtgtgagaacaggattcacctccttctcctaataggaagaggggcacagaactaaaagggcttctgactaagtctacaattttcatgggaaaagcttatgtttgggggttcagttctcagcctggacacttcctctattctctaagccccagtggctttatctgtgaaagggggataatctcacttaagaaacaagatagcaggtgaaagtatctggtactcagtcaggtaatcatgaccaagtgtcaagttctaatcacaggtcagcaagttgatgttggtctgaattctcatcttcaactaatgagactgtgagtctaactagaattcatctcata

SEQ ID NO: 32626 - DNA, 2430 bp, Bovine  19866881128778
  misc_feature (1)..(1): n is a, c, g, or t
naatataagcacatagtaaaaataattcaaataatataaaagggatataatataaaccaaaattttcttcttcttcctgtctctcaattccccttctcagagacaattatcagaagtttgtttgtttttccagggatagtctatgcatatataagtatacttctataagacctagtagtttttcttacaaaaatgaaacctctaaaccctgctttttcacaaacaacttgaagttccttctatatttacacgtaacctgctccagtgttcttgcctggagaataccagggatggtggagcctgatgggctgccgtgtatggggttgcacagagttggacacgactgacgcgacttagcagcagcagcagcagagctgcttcattctttttaacagctgcacaaaataccaacatatgactgcattataatttaaccaatcttccaccagtggacatttaggttatttccaatcttttgccattttaaacaatggatctcgtatttttaactcttacatatagtccctgcagattcaaattaccctctaagaggttgtaccaatttatattcctatgaacaatccataaattatattcctaccaacaaagaatgagagtgcttcttcataccctccccacgtagatgaagtgtttcagcaattgctgtctagaaaccccctgagtaagatattggagaatgatccacctattttgaactgtaaactgtttgcttattactgaggagaagaaatgatgttagaaatttccaaacagttaaactgtggtagtccaatttcaagtaaaggaataaaaagttcattctgaaaacagaaagccaggaagtagatgaggagacaatgtttcgaggatggaaaatgagtcaacatatgactctactaagagtctgaaagtgggcttcaaagaagagctgggttgcatcagccccagatgacacccacagtgaagcccaggctaccatggcttgcaaattccaagggtgttcctgtcctgtggtcctcttggagcacagaaaagttctaggacctgcaatgaataaaaagaaccacagctgagtccctttggacagaggcttagctttctgacctctgtatttctcagaagctattctgattgtctaccttgggggtagatttccatgttctcatttgcctatttggagtcagagcaattaatgaaatatattttggggttattattaagctcttatagcaagtgaggttacaggagactacttaggtctacatgagggattagggagaaagaagcccctaataaagatatggggactgagggcttctagggctccagctgtccatctaaacaagctgggttagagttctccaaattcagtcattcagaggctgcctgcgtgattttgtcatctccacaactacctatactaatattaaactttctctttaaatggactctgttaagtacagtacttacaaaattatctgatattatgtttcctttctaaaacatggtaaaacagtacatattttaaaataaaaaacccatgtacctcccccaacacaacaacattatctcattcatggactggcacatacacctctctggctcgtaccacactgggccaattcaagcagaggcaaatgaaggattattattgccttaactgtaagctcaaagggtattgagtagtccttaggtgattgaacctgcaaagctttactggtcatgtactactatgatatccccatccccaggttagacaccgtgaggccatggtacctgcctttaactatcaaggatgttacctgtgcagaacaaatccgacaaatgaagctacagacaaggcacaactgtacataatcaacagggcaatgactgcagactgctatataggaattcagagtagatggtcatcatggggttggttgagggcaaaggacttgaggaagacttcctggagaagatcaattgaatcaaagtatttgtaagtgctcattaatttagtgacaaccacagacagggccatgagatatactataaaggtataggaaactgtttatgtgctcaaggaactgacaatctggttaaggagaccataccaacataaatgaaacaaataaggaaaaaaaattatgactgtctaactagggaaaggtatataggtcagtggtctacaaagttttgatcatctacttctttcaataaaaaaacttctgagccctgagaattccacggggggttcagtggttaggactttgactgccgtgtcccagggaacctaaggtcctacaagccacacagtgtggcaaaaaaaaaattctgagcccatagcttccatggtggtgtatttataaatttattaaattaataatcaataatatatatatatatatatataatagacatttttaaagggagcattaaaaataaata

SEQ ID NO: 32627 - DNA, 1099 bp, Bovine  19866881134133
  misc_feature (1)..(1): n is a, c, g, or t
ncttgtgtcttgtggatgtcttatgacatttaaaagtggtttctactctttaggtggaatctatcctgttcccagagttgaaaggatataatctgatacttggaactgttaatgctgatgaaaaactggtttctgactttgtggatcaaactttcgaggtatttcagaaaaatcaagttggtccctgcaagtaagttggtttagttgtaacttagccattttggcattggtttagagttcctacctatcatcaaataaataatccctattcccacagacctgaaacaatacataataagtagccaatacttacttacatagggattactatttatccccatttgcagatgaagaaaccataactttcccaatgttatacagcaaatagataggagagccagaattcaaattagaggtttacccctattatctgaaagccttggcaccagatagattctggaatttagaaattcctgaattttaaccagtggtcaggcaccagtcctaccaggaagccttgaaaaacccctggaccaacctcattcaccaggtgacagacaccagaagcaagaagaactatagtcctgcagcctccagaacagagaccacaaacacagaaagtctgacaaaatgagatggcatatgttctatatggcgtatgttctagataaagaaagaaggtaaaccccagaagaacaactcagtgaagtagagataggcaatcttccagaaaaagaattcagaataatgatagtgaagatgattcaggatctcaggaaaagaatgaaggcaaagactgagaagatttaagaaatgtttaccaaggacctagaaaaagaacaaagaacaaacaaacagagatgagcaatacactagaaggaatcaatagcaggataactaaggcagaagaatggataagtgacctgggagaatagtggaaatcaatgctgcaaagcagaatacagaaaaaataatgaaaagaaatgaagactgcctaacagacctttaacatcaccttaacatcacttaggagttggtgaggacagagaagcctggcatgctgtagtccatggggtcacaaagaatagacccaactagc

SEQ ID NO: 32628 - DNA, 1172 bp, Bovine  19866881152413
  misc_feature (1)..(1): n is a, c, g, or t
ncagtcactttgcactttgggtttttttcatctatgagagcagcatgctaaggtcatttagtgcctgtccccttgaagatggcctggctggcattctctcgcccctacttcagaggcactttccttttcccgtggcagcaggaccaatgcttattgccatggttgtagctcgggccagttgaacagtaggtctcgaggatatattagctctcttgttatctgtctagctagttagaacattctgctttggtgtggacaccacttgggcctaactagcttagctccgtgtgctccagtcttggtttaccagcgttctctgtgttgaactttgatgctctcttatatgccaatctgttttatttggtctacaatgattttattttgcctacaatgattttagtttttgcattaagccaggacctaaaaataagattttatgtaacaatcaaaatcgctggtttttcctaaaaaatgagaaggtcccacaattcctgcttggccagagtaggctggggataagtaggggctgctgcatctaggtgggatatctgtcagagtccctatcaggcctatgtggcttttttcatttatatgaactgtccgacccttgtagacatcagaaatagtgacacttattccagtgttcattgtttcctctttgccattggttattatggtatatatttcctcccacctcatgaaggctagagttggggagatgattgagttctgaagccaaataacatcttcactcatagttgaaaaatgtcacatggtctattatttggcttctctgtgagatgcctggatacttccaaaggtttctataccataaagtacacccagtatttcccactctgatgtttaccttgagattatctggcagctcagccctgccagcatacccagggttcatggtgatgaagactgcacaggttgggtttagagagagctcggtgccttcaaagatgaatgtctttagcttccggataatggcttgttgaatgctgagaatctgttgagctaccacagacagtacttctacctggagtgagaatggctggttgatttgagctcctgcttctgacagccacccaccccactctgccatagtatccttcacctagcgaagaaagaaccccatcacctgagaataagaccttcacattcaa

SEQ ID NO: 32629 - DNA, 2143 bp, Bovine  19866881188319
  misc_feature (1)..(1): n is a, c, g, or t
ntattgagtattttctatgtgctactttcagggctaagcacacataatctcattaatattcccaacaattttggaggtagcaaccactaaaactcccactttacagataaggaaactgaagctcagagtgccactaataaatgtcaaacatgggataagtaactagatctgccacattccaaggcctctgtttctaaacacatcattaaactgagtatacacacacacacacacacccacacccacccacacgcacgcacacacatttacactccagctacctggccctggtagagcgagggtccatgagacctgagcttgctttcatttctcagaaattatattctggttcccaagtccacaaagtctgatccataggtctagggaaaggtttggaatgtgtgttttcttcaaagttacatcttgatgtaattctgatacaatgattgatttagtgcttcacactttaggaaacccagagccagggttgtgttaagagacttctttgctaaataaaatatttctcagttgggtcaaacttttgagcttgaaatgactttcttttgggagtttgttgatgttgaaaggttaatcttcttacctctataatgaccttagggtcaaactgaggcagatgatgagcaaagactgtagaccccgctgtccatggttcaagcagggaccccaaggcagccagaatccagcctgtgtctgacaggcaccagaagacatcagacatcttcagctgcaacaatttcctgctgtctccaaaatacagttggcctcagatactattgtgactactatcctccccttctttacaccctcattcctcagggttttgctactcagtgtttatcattagtccagatatcagctgtctccaaaaagccttctcctcccctggtttggttaaaaagttagaaaatatatataacattgtttggtttgaatattattagttggaagaagggaagaagagggagaagagtttggtttaacattgactaaatagttatcccagcttcagctctgtgtttgttccctgatagggaagtggcttagtgtggcttagtttcagatattattttccctaagagctcatgattgggcttcatgcccagtttgtccacagttgaggagggagaggatctgccacttaaggtcacactgctggagcattttatctttcccaccaaaccctggagccactgacagggacacagaggcttgtcatttgtgtggttttcagaatgccttctgtttccactcactcctttacatctcctctgaaggtgcttaggtaggacccaaaggttcctcttttgatattcagaggtgtctgtcagcaaacactcatacctagcctatactcacaccttcaggggtgtgaaccaaagacagcaaaaagaataaacaggacggggtcaattccacctagagttcctttcccagcacatacagatgcacactccaccccgtatctgtggcccagcttctaagttggtgccctctttcctaccatgctgggaaataggatcgtaaagcgaatccgtggctgtgctttgccatcttggggaagcccgtggtcccactggtgaagaagatggccattgggtccagggtctttgacttaatacagatgtgatctggggaggctgatctgcaaaggaattcagtacaaaggacagaagtcatgtttcttactatttcattctctggggaagcaaaagaaacaatatgaggctttgagttagaaaaatggggtttgtaactcccagtattaggcatcaaagaaagtttatgggaggctcagataggtgacctgacatttctgcattttaaaaaatggggaaaatatgatggattatttcttaatttaacaaacaccgaaatagtatttcctatgattctggacaaggctctatatgatttacaagtaagaattcattcactattcagagcaaccctaagaggtaagtaatgcttttatgcaccttttgcagatgaggaaatggaggctcagaatgattaggtaacttacctaaagacgtatagccagcaagttgcagagccagggttcaaactcagtctgatgcatacactgtgcttttagtcacattgctaacctgtttttacacag

SEQ ID NO: 32630 - DNA, 1106 bp, Bovine  19866881370558
  misc_feature (1)..(1): n is a, c, g, or t
ntttattcattgggagccttttcacttctaaaataaagccttttaggatgctgaaacttgaactttaatggtaagttaaagtgaaaaaaaaaaaaggtgtactcagagactttctaactcttgactttaaaccttccttttagagaaccagacttgcttaatttattagagcatttgcttttctaagtttccagctcacaaccattccgtggcccagcagaaagagataataaaaagttaagtaacaggtaaaaatcttttacagttgccttttccccagttggaagcagaatttttctttccctctgggcagtttggcctctaagctcctcctttttctgatttgaaactctactatttgcgtacagtgtttaaattgattcactcacaaccaagttctgaatgtctccagcattagtacctttgactcaggaagcttaagcaaaagattataatagtggtttaacaggacaaaacctttaaaaacatacttgaaggttgtttttactcaagatttccaaacagatacaaactgttttcaaagaaaagccagtctatgtggttttcaacttagacatacatgagcagggaagcagctttcccagatggaatgtgggtctttcatagagaacttgtgaagctgaaaactagtcttgttaagtcttggcctccagacttgattctttcactgttatatttaaagtgaagtatgtgtagtctgaatttttcttaaggatcaactctagaatggggtgcatagtgcttcagggaaaataaatgtgtttatatgctaccagattttcatctagtaaatttgagtgtcttttgtggaccttgtttttaaaagctttatggtaagaaaacggatataaaaacaagtgaaggtgtgaagagacagagaggctctaggtcaccttgaaggagtcaggagaggattcctataagaagtaaaatctgagctgggattgaaataccaagactagagaaggaggaggcgttccaaacacaagtaacagtatgtgtaaaactacagtgagttaagaggccatggcatcttgggaagcggcagacgtttcagtatgcccgagggatgtggagtgaacagg

SEQ ID NO: 32631 - DNA, 848 bp, Bovine  19866881408543
  misc_feature (1)..(1): n is a, c, g, or t
ncatgcgtgctgtcaagtctgtgctcactgctgctggcaaccctgaaactcaaggatccagaggagaatgagagtgtcctgctgctccgggccttgcttgatgtcaacctggccaagttcttggctcaagatgtccctctgtttcaggtaggcaatggtttgggaccttggccaaacactgagattctacttcccaagatgaaaaaaaattttggcacctcttccactccttacaccctttccattctctagccagcatccctattgccagataccctccccccaaatattaagtaataatgataatagcaatatccctaattcttgatgtttaataaaaatagtttcactaataggataatatttgctgttgagtgtgagtagttagtttttcatatcaaatataattagttttgtaactattttaacatctatcttccttactaagctgtaagctcttagagacagaaagcatggccattttgttcattcctagtgtaatgactgaaatagcacagacattagctatttgctgactttttaaattattgggaagaaacatcatgtttaacaaatattgtaggaatttgtatttgtggataaggtacatgattttggtataggaaaacaggtttggaattttccaaggattcctgctatttgtagattccattaaaaaaaaatgttgaggttatatatctgataatttatcctttttacatcttgaatttttgttaacagggaattatatcagatttgtttcctggagttattcttccacagccagactatgtagtttttatggaagtactaaatgcgaacatcaaaaagagaaacttcagccagta

SEQ ID NO: 32632 - DNA, 2456 bp, Bovine  19866881624027
  misc_feature (1)..(1): n is a, c, g, or t
ncctcttttttttttttttttttggcctttccctagtggtatgagaagcccagaatgacagttcagcttccagttcaggggaaccattattgcgccttctagggcaaactttcctccttgagtactaaaaatcttgaaactagcagagctcatagttgcaagaatagaaatagaacttttgcaagtagctctttaggtttaatagaggtctgtggtataatccctcagagcgtagttttgctcttaactcctcagccaagtatatacaccaataacgtgtttgaaccttaaattcctcttaatataaattaatggttacacattcaggaatctgtttcttgggtttaagcattctcatgtccatttggctaggattccataaatctttggacatgacaagctgtctctggtagcagattcattggcactctcaggtccccctggacttggtgagtccccacaatagaggccagagacaaaggcagatgatcttagaatattttaggctgccccttcagctaccttttctcaggtaggcatgaacctcatagtctataaaaagaattttgtttttaaaacaaagaagccttaaaactgcattaccctttgcccagaagttctacttttactaagaatatcattataagtctctgcaaagtttgctatagatggatgtccctgctgctgctaagttgcttcagtcgtgtccaactctgtgcgaccccatagatggaagcccaccaggctcccccgtccctgggattctccaggcaagaacattggagtgggttgccatttccttcttcaatgcatgaaagtgaaaagtgaaagtgaagtcgctcagttgtgtccaactctttgcgacccccatggactgcagcctaccaggctcctccatccatgggagtttccaggcaagagtactggagtaggtggccattgccttctagtaatgttatttacagtaacaacaatctagaaataatatgcttcagcaagaggaataattagataaaatggaacaccttgcagtcattagaaagtatgattttaggtaggcctctattgaataggaaagatgttccctttatgctaagagagaaaaacagattacatatatatatatataatcccattaaaaataatttgtgtttacatataggaaaatctagaaagacatacatcagagttatctttaggtggtaaggtaatggggtgatttaattttttctcatctttacaattctgctctcatgaatgtatattatatgactttttaaaggaaggaaaagtaaaaggagacttggagtcagtgcacttggggtagaaatgaggtcaatggagaggcaggctgagtcttctcctttgttcttgcagattgacagaagtggttcacagaagcctcatctatcttggccgagcaattaaagggcaggttctgatgtcctcagagctggaggatgtcttcagtagcatgcttgtgggtaaagtgccagccatgtggatggcaaagtcctacccatcactgaagcccctgggaggctatgtggctgacctgctagcccgcctggccttcttccaggtacctcggagtcagggtaactgggcacctgggattctcattcaggtggagaggacattctgaaatgacaagttaaagctggaaggggatagggtagccacagagcatcctggattgagcacctactggaaacccttactagggttgaggacaggagggagattttcaaagtccttgaaaagtttatagcctataaaggcaggaataggaatgagaataaatgccacaaaccagtgtgtcatgggctacatacagctcatgggctactagatagatttcatttggctatctggtaatttaaaaatctgagggcttccttggtggctcagtggtaaagaatctgcctgtcaatgaaggagacagtggatcgatccctgatccaggaagatcccacatgcagttggagcaactaaacccattcaccacaactgctgagcctgggctctagagcctgggagccacaactgttgaccccatgtgccacaactactgaagcccaagcaccctagagcctgtgctcctcaactagagagtagcacctgcttgctgcaactagaggaaagtttgtgcagcaatgaaaataaatacaatttttaaaatattaaaaaaattaaactttgagctagcatataaggattattacatataaaaatacagatgtttttcttgcaaaaaaaggaagacctgaatcaatggacctgcatacctgcatggcaactactgctggaattgagtagctgttgcttagacaagacatatattctctactgctatagtccctcccactctctgctgcatccctgacaccagcttgcaccagtgctttttacttcaaattgggaaaatataagataaaggaaaatataagataaga

SEQ ID NO: 32633 - DNA, 951 bp, Bovine  19866881624589
  misc_feature (1)..(1): n is a, c, g, or t
nctttccttttgtccaaaggaaagtgtaccttgtctcctgaagtctatccctctgctatgctgtctaccactctgctttgtatcatcaggatccttactcaaacaggaattccttctcagactttcctggtagcccagtggttaagaatcctcctgccaatgcaagggacatgggtttgatccctggttggggaagattccacatgcctgtgtgccacaactactaaagcccgcgagcctagagcccattttctgcaacaagagaagccctcactccccacaactagaaagaagcccccactccccacaactagagaaagcctgtgtgtagcaacgaagacctagtgcagcaaaaaataaataagaattccttctctttgaagcattatcaacccctccctttctactgactccttactaccatcaagataagctcaactcttctctagctaaaactgacccaccccagaccccacattcttttctatttaacttacctccctctccctttcactggccaaaattccatctccactgctatcttacttcacctattagtcatttctcaacccactatgaatgaggctcttactctgccacttcactaaaatgtttcaccaaggctattaaaaatctctttaaaactaatttaactttactttgctaacactgctgaccatttctttcttcttgagggctctttctccccaagatcgagatcttcttccacaagatcaaattttcttttggttttcctcttaagtctagcacatggacacatgaaactacacaggtgataaaactgcagaacttattaatacataaacagaagtgactacaagtaaaagtaaggaaatatagataagatctgtggaatacatcaatgtcaatcatctagttgtgatatgatgccacagttttgcaaaaatgtaggtacagaataggaataga

SEQ ID NO: 32634 - DNA, 1956 bp, Bovine  19866880052499
  misc_feature (1)..(1): n is a, c, g, or t
nacatttttatctctcttaagacagcaggaggaaacaaactagtgatattttttccttctctatacaaatttgaaaggaggtttctcttaaaatactgtgttgccataatgacacctggtttcacctgaagtgaactattctcaaaccttgagttaaccaatgcatttttcttatggaaatgtttgtcttaagctatgttaatgtgctatgcatttaccccagactctgtcttcaagtcggttctgcctaatggctcagaacctacttgacaaaacagtatgttatactcagatattgttcccctaatctatgtaaacgaaactacttgtatggtaatctgcccttctacaagatttaagtcaatcgttttatggcccgggatgaatcatctggtgccaagattatcccaaaatgcatcttatggatgaggggcctggtgccattctaagtttaaagacattcctttctttcactaacagactgctagtgactatataacatccagctgaagactagcagggggggtactttttctgcccccttctgatgcctatgtcagaagctttctctatctcctttatactttaataaaactttactacgcaaagctctgagcaatcaagcctcatctctggccctggattgaattcttctcctccggaggccaagaatctcggcatcttttgtgattcagcaacagcctttcaggagctgcaactacctgaaaaatttaggctccattcagaaggtactcaaatttcaaaaggtacttaaattttaaaaagtaactgatatactgtgctcaccaaataaaatacatttgaggaccacattgggcctggccccttcaggtttacataatgtatgcatttagagatagcaacagtcacctaaaggtagctggttttggagaaaaatattgttctcaataaatattcttcccacttctctccttccctttctttcaccttctcttccttaccatttttccttaagacctaaaggtgaattagcacagtatatgtgttcaattcttgactattcagcaacctaataatatgggcagtgactgtaaatgaaaacacctctaggctttctagtcagagaaacaggaagcttcaattaaagaacatacatcagttatggaaatgggaagggtaggggcttgcaagacagaaaagaggtaatgccactcctaacttctggtaccgactttcaaggatgcagagagggctaatttccagaggaaggatcatcttaaaagtatgaataaggctaatgaggctataaagtttttatacaatgactggacctgtccactctgtatccatggtctcttcctgggaagttaagattgttctttggcagttctctgattctctgatgtcctaactggtctgtgatagggtttggattgagtcaatcaatttgttagcatctgctatttatatttctctgcaatctatgtccatgccatgttgcttcaggccgtgatttacaatcataagctgtggtttatacttatcaacttcagttatgagaaaaattgggcaggcgggatgtaattacattgtcatgatcaaccaaaacacaaacacggaggctcacagcagtgacacagaagtcaggcatacatcagatctctactgctccaccagcaccgaggctgtgctgtgttttcagctgctttctttaggttcctaccaaactggaatagcattttgtgatagagatgtcagcattttcgatagtactttgtgatttttttttcaagacaatgatgggctttgtaggagtttgccatcatttggataaatttatagtgaggtttttaagccaagaattaacagggaaaacctaccaaaaactaaattgttagttcaaagcacagacttcaatcctttaatcacagctaaacttttacttctggggcaccaaagctgtcctcacagcag

SEQ ID NO: 32635 - DNA, 1128 bp, Bovine  19866880116070
  misc_feature (1)..(1): n is a, c, g, or t
ntcatgtacggatgtgagagttggactgtgaagaaggctgagcactgaagaattgatgcttttgaactgtggtgttggagaagactcttgagagtcccttggactgcaaggagatccaactagtccattctgaaggagatcagccctgggatttctttggaaggaatgatgctaaagctgaaactccagtactttggccacctcatgtgaagagttgactcattggaaaagactctgatcctgggagggattgggagcaggaggagaaggggatgacagaggatgagatggctggatggcatcactgactcgatggacgtgagtctgagtgaactccaggagttggtgatggacagggagccctggcatgctgcaactcatggggtcgcaaagagttggacacgactgagtgactgatctgatctgatctgatctgaggatgccgaaggccacttcgtggaatgcctcttgactagaaggagagtcagtgagcacactttggctagcccaatctacagaggaaaagactgtagtgtgagagtatgatcatcatcatgcaagaagaataaagacatttccttgttgctgctgcttctgttgttcatttattttaacccttggaatggaggaagcaaaaaaaaaaagtaggattacagagtagacagatgtttcatctgaaaagctcaaagggaaaaggcaaaagacagtaagtaaaggaatactttaaaagagtcctaaagattaatcagctctgtaataagggtgaccaaaatttgattggaattagagacaggaaattaaaacatttaggaaatgctaatctttaaaagtatactgtaaaaatggttggatttttaaaagtcaaaaaagccacaaaaattaagcactaatttctaaggataccaggataccagtaagttttacactagtctttagtgttccgattttcttcatttggtcatgttttcctgatacatttctattcaaccaaagttgcaaagcagtctgtaatttcaaaatttctagttgtttctgtttgcattcctttcatattaaagtcctcactaggtccaggaggcaaataacatttttttgtgtaaaactcagtattacacataatagggataa

SEQ ID NO: 32636 - DNA, 831 bp, Bovine  19866880355877
  misc_feature (1)..(1): n is a, c, g, or t
ncaatggcaacccactccagtactcttgcctgggaaatcccatggacggaggagcctagtaggctacagtccatggggttgctaggagtcggacacgactgagtgacttcactttcacttttcactttgatgcactggagaagaaaatggcaacccactccagtgttgttgcctggagaatcccagggacaggagcctggtgggctgttgtctatggggtcgcacatagtccgacacggctgacatgacttagcagcatattaaaataaaatttagatgtctgaaatatccaaataagggacaagtcctatttggccaactgtgtactgtgtgatagatgctttcttaactgctgcttgtgttccagtagaaacatccttcctagtagttataaaacctttagctctttcttgtctccactctgtgctcagggacatgctttattacagagtcattagcagtgtcgttttgacaggttttgaagttccttacctaacatgattttttactgcttaaatattttgacatttaaacctctcataagtcctaagcatctggtatgggctccatcactgactatattggcattttcctgctgttataggtgtatcaagcacacttttctggaaattttaaacttacaagcccaaattatccaaatatcaagcatacccaacactggtagatcaataacctcattttgttcttctgaagactgatagcagaccaaaggacatatggctttaatataagaaaatacatatactgactgtgttactgattctagaacatgaagaaaggcagattgtacaagccactgatagtcaatga

SEQ ID NO: 32637 - DNA, 1206 bp, Bovine  19866880482146
  misc_feature (1)..(1): n is a, c, g, or t
nggaagtacagcagtgggttcacgttcatggaattcctttctatcatgaagcacgtggcttgactgatgtaatagctatttgtaaacttgtgctaaaggggtggcaacaccttgagagactagtgagatgtctccttggatgtggtatatgctctaaagccacgtccaaccatactgttctcctgttactaagattcctgggtccatgaatgaaatggtagaaatggaagagattccgttcactattacccttattactctactagtaaaacatttctttgttccccagcatctcatcttgactctaggctcttctgggcacacagaaatgattccatccacctggtagctgagactgatgcctggactctttgctttccttatgcctctgactcagcagggaaagatgaggattatgctattggctagcgtgtttgatcctgactgttaagaagaactagaccactaccatacagtgttataacaccagatgcaaaagtcaactgccttgtagagactccttaaccagcttaagctttcatatttgtaaggtcaaatcttaaaactatatatctgtttatccatctacctctattatagttttctgatagtctgctttttttttttttaattgggtctttaatacaaagtgtccatgtaaatgactacaaagaagttaaagtgttactttctaataagaatcaaatccttaagccactcaagaagatgagaagtgcttttagaaaaggactttttgactaattatcactaaggttggaaaagatgttttccctgtaggagctagtatgtgtttttcaatgaaacagtgtacatttacccaaacagtcctgctactttactaaatagcatgtagcttgagtgggtctaattagttcagtagcaccaagtcttagaaaaataatttctgtgtctcagacaaatgtctgtgataagacctctagaacaatctgctttatattgaggattgcttgggtgaggtaaactatggaaggaaccagaaaagatgatcattcaatagaagggaaaaacacaaaattgaaatttttggagaatgtctctctctgatcaaatgtttggtagtatcctttggccttggagaagtagtttaagagactgttttcccaggaactgtttaagacgaaatttttagatcctgtacgcagtaataaggatggacctactttg

SEQ ID NO: 32638 - DNA, 614 bp, Bovine  19866880496539
  misc_feature (1)..(1): n is a, c, g, or t
natacaggatgcttggggctggtgcactgggatgacccagagggatggtacagggagggaggtgggagggggttcaggatggggaacacatctacacccgtggaggatgcatgctgatgtatggcaaaaccaatacaatattgtaaagtaattagcctctaaaaaaataataaataaaatttaaaaagaaaaaaaataaataaaatttgtgaatcatgaagttgtacaccagttgatttgttgtatcacaaataactatacctcaaaagaataaaaatttaaaaataaagaaattccattagcattctcttgcattacacccacatcacagcaggagttgcacctgctcctgctccactgtttccctcttgcaaagaattctacttcctctccagtcatccaggagcagctcaggagtctctcttctctatccttacccttactgaaattaaagtagaccttaacaaaaaacaaaaacctaagcctaggtgttttcagagaggattacacaactaagaatcattaaagcaaaacattactttatgaaatactatgtgaacatattaatttaccaataaatggcattttagaattagaagggattttagatttag

SEQ ID NO: 32639 - DNA, 1381 bp, Bovine  19866880501433
  misc_feature (1)..(1): n is a, c, g, or t
ngtgactgcagcctgaaattaaaagatgcttgctccttggaagaaaagttatgaccagcctagacagcatattaaaaagcagagacattactttgccaacaaaggtccgtctagtcaaggttatggtttttccagtagtcatgcatggatgtaagagttgcactatgaagaaagctgagcgctgaagaattgatgcttttgaactgtggtgttggagaagactcttgagagtcccttggactgcaaggagatccaaccagtccaacctaagggaaatcggtcctgggtgttcattggaaggactgatgttgaagctaaaactccaatactttggccacctgatgcaaagagctgactcatttgaacagaccccgaagctgggaaagattgaaggcaggaggagacagggatgacagaagatgagatggttgggtggcatcaccaactcaatggacatgagtttgaataaactctggcagttggtgatggacagggagagcctgacatgctgcagtccatggggtctcaaagagtcagatgtgactgagcgactgaactgaaatgagctgatggctctcagcaattgaggaaacccccacagagtttccattaataaagccaccttgaaaaaaaaattcaacatttcttctcaacagagctttatgtattaattttaggagctagactgtcattttttttctttaacgcagaaagaaactgaataccctcaacaaagaggtgcttttttaacctttgaaggattttcttccctgcttcataaaaattttatcataattttatgcccccattctttatggcttgttacttggtccattactcttatacttaacttgataaggtcctggttcctatgatattagtttttaggttttggtttctcacaggagctgctttgaagtgcctggtaacattggcagccttagacagagctggtggcttttcaacttattctccctctgctcactgttctgctgcttctgttacttcatacttgaatgggtgtaattctcaacctcacccttctctacttttaaaagagatcaaaccttgggctcttgtgagtggctaattggtccatggatgggattgggcagttcattctggaagtaatcacttctctccttgagtgtgtcaggacatgtcttcttcgggaggttcatgggatttcagaggggcgcccacatgaatgggaacgcggcatctctcacagttcctgtgcacacagataatgcctgtgctcttttcacatgcacacacacattctttttcttattgtggtccctgcagctctagagtcatggtctttatcaaaaggtggcctctcctaagaggatacatgccaggcatgaccctcaactgt

SEQ ID NO: 32640 - DNA, 1257 bp, Bovine  19866880507005
  misc_feature (1)..(1): n is a, c, g, or t
ntcttcttcttttcaaaagaaaatgaaattcaataaatgagagcattcagatgaaaaacttaataaccatacttaaaaaataaaaaacaatacaaagcattgctacttaactgcagtggaaatgcttaaaataaagatttatggtatgaatccatgttaagtggacaatagagtgccattctgattcagagtatattttttaaatccttaaggatttcttgaattataaagagaatatatgtataagcagctcattttcctttgagatttgtaccattataaggagagaatatgtctaataatttctccaattaaattatgaacttcattagtgtgcagaaaaacaaccctgtttaggagcttgtctctttatcctaactcctcagtgctagagatttttttaaactagtggattgttaaagggaagatgtctcctttataagaaaccaaaggatatttttcttccctcacttaattgagcatttttataggaagttatgttctggctacatctatatggccaatcagtgggaaataggcatacacttagcttttctgtctagcttcagaaccatgttttttattctaattcagtggttgtgatctttggaaggtcttcttgatttttttgtccctaggatcaaaggtatttcataacacattaggagttctcggccattggttgatatttagtgtaagagattttgtggatctgtgtgaccaatgattcagtagaaacgttctttccattcattctccaaatataagaacaaaagtgttaaggtcctggtttttatcatagtaatttgactgtgtggatagatatactgattttgtagccatataagtataaactccaattcattaagccacttttagaataaaaaatgttagcataatcagaattaactgtgctgtatataaattcatgattgctatttctgcctattttataggtaagaaaactagaaaactgtatctaaacaagatcaacaattagtggcaaagggatttttttgcttttttatttaaaaatttgtatacaattttaaagattactttccatttatacttattaaaaagtattggtatattcctcatgttatataatgcattcttgacactatcttatacccaatagtttgtattacccactccccaacccgtatgttgcccccaccccactggtaaccactagtttgttctctatatctgtgagtctgcttttttgttttattcatttgtttgttgtaattt

SEQ ID NO: 32641 - DNA, 755 bp, Bovine  19866880518419
  misc_feature (1)..(1): n is a, c, g, or t
ngggattatgccaccagcgtcactgtccctgatgaaaaaaggctgccagaaatgtaggctgagagcaggaaagcaaggatgtttccacttgatggctcccaggttccagtctgtacattcactgcctcaccattgcaggggcgaaagattggccaaggggcagtattacccttgctcttctgaaaacacagcttatgcactctgattggcgcaggagaatgtgcattgaatgcaagtatataaggtcacctttgagaaaacaggcactgcctgtccacactgaccttgcaagtacacagcagttgaattaaaatattcaatagctgcgtgtttgaccccatgctgtctcaagattcatgccctcagaggacagacacagatactgtctttgaaagagtacaacatctacttccttttcacttcaagtaccttgaactggataggtagtgattaattcattcttctggcagatatagaaataagcacctcactcttccactctgagcttctagcattaagggaaactgggaaggtattgaacattaacaaagtatactaaggttttatgttttttaaagcaccatcacataattcatcttgaggctcccaacaactgtgaggtcgatgagtaggccaagtgttattatccttgccttagaagtgcggaaagagaggcacaaagaggttaaatgatttccccaagttcacacagcccattaaccacagagaccagacttgaatcacaagttcttcac

SEQ ID NO: 32642 - DNA, 1522 bp, Bovine  19866880539638
  misc_feature (1)..(1): n is a, c, g, or t
ngaagtgagtagctggggggactgagtagggggtggcgacagaacatgaatggagacaaaagggttgctccagcaaaggtcatatttatccaattttttctgatttattatttcttcctgtataaagttttaaattttcatgtgatcatagttattgatattttatttatggtttttttttgttgcttttatgcttagaaaattcttccattctgaattttgttaaatatttacttcatcttattgtttaatttatgtaacattatttaacttatatttatttaagtaatgaaaattctgtgtggagtttcaagacatacatcaaaatatttttaaggatttacagtacaatattttacaaaacttaaatttaccttttttatatgttgtcaaacaaccatattgcattgtttactttttatacatatattttgctcagatcctgttatattgtacaaagtttgtcatagtatatactatatatatgtaataagggaataatattttgaagatatataggtatttactattgagataatttaggcttttttgttggattacagactaggattgcctctcctaaactttctttagaggtagaaggaaaaaatatttcatggctattgagttcagagtctctcccaccttccattgatctcttttctccttgtaaatatatcctccttaatattgcagtttttctcatcttaatttacacagtggcttctggggctaagcctaataaacctattattttaaaagatctttagttttaataatttatcatcaaagtaagaaaaattaacttctgcttaatttgaaaaatgtcatagatatatcctcatttccaaagcaatgtagaaattctttgttttagagaatttaggaagttttatatgttgccatgaaaaattaggtgtttaataaatagcctgtcttggggggcccaattgtaagcaagtagaataatgacttcaatttcctacctggcatgttgcttctaatgatctgttcaggaaacatgcctgtggatgtccagataccagaagttttgctcgtaacttcttaatagttcaaatggcccataggaatcatttgatgcctttattcaggcagaactttacttcttgggactaagaattcttccttcacttgatttagagcacatagtaaggattaaatagatgaataatgaaagtattcatgtgtttccccaattcacctactttcgtattgctaatattataactgttaatttccagaagaagaagctcaccatttaaaaactatattgccatgctttagggatctcatattttgaagttttgaatctcccatttaaattcaaacagtattcaagaacagaatctggccaatggttttgaaaaaacaaaatggcaataccttcttggaatctcagactgttcaaagattttttttttcctagcaaaacaggaagaaattggaaaaaagcatatggactcaggttgaacatatgatgtattttcaacttgaatccgca

SEQ ID NO: 32643 - DNA, 851 bp, Bovine  19866880579229
  misc_feature (1)..(1): n is a, c, g, or t
nttccagaagttgggccttagcacatttacaaattaactgtattatgtggcaaatgcttgatttcttcctttcttaaaaatgctatttcaagttcccagaccttcattctatctgatcttttagggaatcaaacatatatcccccttaattctaatatacagaaatttatatacaactttgagaaatcagagatccttttctgttatccaagaaggtgacgagtacacttctttttgtatcagctttcatttaaattaatcccaacctcaaagcaagactcaaaattcaaaagctagaagaaacctcagaatgtaatatacttaaataagaatcgcttgtggaggtgctgattcagaaacctgctttttagccagcccccaaagccatggatgtccataaaccccaatctgagaatttaaattcatctaactcaacttccttattttacaattaggtagttaaggcctagagaagtgagatcacttatgcaaaatcacctagcaggaaagtgtcttaatgaggtctcagctggctcttagtcagtacactatcactagattttcttaaaaaaaaaaaaaaaaaaaaattatctgaaggattcaaacatataatgattttaaactaaatctgtatttaagtcagtctcagatttttctgttgctgaaagtctggggggttctgcttttcattgcttaaaagagctatgagcattcagctctccttgactatcaatcaattcttaatatgaggacaattgcaacatcttaacagtaatatatataccatgatatatgctaactgacagtctagctctctctttattgcaaactcagccttcaaacaagtgggg

SEQ ID NO: 32644 - DNA, 788 bp, Bovine  19866880623386
  misc_feature (1)..(1): n is a, c, g, or t
natttatgggtgattttattttctgcattgttaattttgaaaatgttaatctgaaattgctacagtatttcaattaatttggacgattaaaacttagcaccagaagaatcctttgcagaagataagacagataattagcgattctgaaacaaacaactgtggacactggcactgaaacatgctgggtggatgacacccagcagaattcactctgcttaacaggtttgaaatggaaagaatgatttctggcagtctaaatattaaacttgaatgcaattgattttttttaagacagccattttaaggagttaactgtttaacttgatgtgtgatttttgtaatagcatgcaattctgaaaaactgcattcacattattttggaatgttgtcttttgtataactgtagtagtgacaaatcatatttttcatgtcatgatatttcctactttttatattgatttgatgatttttaaatttaaaggtgaagtagcacatgcttgttttgttcgtttgatgacactgaaacttaggtaaatcagagttctaacccttatacactgttgttgggaatgtaaattgctgcaaccactatggggaacagtttggaggtgccctaaaaactaaaaatagaactaccataggatccagcagtcccaggccttagcatatatctggaaaacaaaagcactaatttgaaaaggtacatgcaccccaatgttcacagaagcactatttacaatagccagactatcgaatcaactcaagtgcttgtcaactgatgaatggaa

SEQ ID NO: 32645 - DNA, 826 bp, Bovine  19866880690787
  misc_feature (1)..(1): n is a, c, g, or t
nctttccctaacttcatagctgccactagactgtaagctctgcagaagcagctgcacggtccatctggctcacactgtgtgtccatcatctggaacagtgcctggttggatgatggatggatgtcactaagtggttttgtgataatgttgaaagccttactgcaaagtgatgactagtcagatctagaactcagggtttatgactcttaatcagcgttgttatcactaaaccatatccccagtcatggccagccataagtaagaacagatagaaaaaatgtacctagagttcccccgaaaggccattagacaccagtctatagagtttcttctacacaccaggagctaatctgtagattcagttttacatctcacatctcaaaacttagtaaaacagccaccaaggttgaataaatgggttattattacagcccttcatctccctgccgcaggctctcaaatgcctcaatcagagctgtgtgttgcaagcatgcctttgttattagcctgtttggtggaggttgttcactcttccacgtttctttgaaaaggacagaaacaatttggaatatctttccttcagcactcctaggcttgtttcaggtggtgaaggtagaggtcactttattaataaaaccatcaaggaaggctgtcatggtaacacattgccttgattccttgaagtgcaggagacaaagccagaaagagaaactttcaagtctataaatacaggcccagcattgctcaagcctagcagcttaccgacagggcgaacctaaatgtacatagctttgaacaagacccaaacagaaaaaagaaaacttcc

SEQ ID NO: 32646 - DNA, 989 bp, Bovine  19866880694259
  misc_feature (1)..(1): n is a, c, g, or t
ncacagtgggtctttatggtttaccaagttgggtccacgttcattataaagctctatgacaaccttgtgagtttggaaccctgaatgtgttggtacactgagactgtgtctccccctcagggactgaggcccaaaaaccactgacgaagacaagccaaaatccatgtgtactgagcaaggcgacaggtgagcaggaagatgtcaacttgaccagctctctgggcagcattctccaaattattagaagattgctttagggatgtggaatagacctagaaattatatatttgaatatgaaatggtgttaagctctgatagtttgacgcattcatctcgaaggtgggaatgtggctagtaggtcccctaacttcttatgttggattcatcaggcatctcgtcctaaacatttccaaacttggaaactctggagtttctctccctatgcccacaccaggtgatgtttataattataccccacggaagaggattttgatggcccctcatagccccattttgggaaccaatgagaggttattatggagatgagccagaagagatcaaagactgagccatcaaagactgaccttctatattagggataagcaagctatatttctgtaaaaagccagatggtaaatatcttatgtatggtgggccatatgatttctgccataactatccaactctgtaattgtaacacaaaaagtgctaatcacaatatgttaacaaatgttccaataaaactttattcaccaaaataagcaacaagctggatttggtccatgagccatacttgactgacccattgctcctaccccccaaacaaacagcctgccctagattatctctttgttcacaaaatctttctccaaaaatagttcaatagtattgattttttttctactactaaatcttaattatgttcaagtttatcctccctgagagcaatctgattggaatttgtgatctttctaaagctacatacaagt

SEQ ID NO: 32647 - DNA, 2287 bp, Bovine  19866880733736
  misc_feature (1)..(1): n is a, c, g, or t
nttcataggggtcagttcataatatgcccaggacactgctattctgtgcagtacactttaattgttattttttatgctttgtacccaagggaaaatttattaaagggcatgtttacaaagatgtgtaagaaataaaaacatttcagggctgacctttggctacataaagattgaatttgcataaaacttccaaccattttgtctagctaatacctgaaacttctaaaattggaacggactttagggaatgaaaaccttttctaaactttttttttttaatgatgaaactgaggtctgggacttccctgatggtccagtggttacgactccatgcttccaaagcaggggatgtgggttcagttcctggttggggaactaagatcctgcatgcctcgtggcatggccaaaaaagaaaagggaggaaaaaaagcaggtatagagaggattttctcttgtgagaaaactgaatctctattgtctgagaatttgtcagggtgtgttcataaagaagctacattcatggtgtggataatacaggtctgagcagatttgctctgaccaccttcttcttagccaggttcctgattctgggtatgataaagcttgggagaaaaatccttctgtatctaagaactctctgaccccctaaatcaagtgacactgccaagttacaatcaatttacaatgtccaggaaagaaatattaaaaaagaaggtgttggggcatctatcttgcttccatattaggtacctgatgttacccctgctttacaggaaacaggttcagagaagatgcctgcacccacactgtccgtattcagttcagttcagtcgctcagtcatgtctgcatgcgaccccatggaccgcagcacgccaggcctcctgtccatcaccaactcccggagtttactcaaactcatgtccattgagtccgtgatgccatccagccatctcatcctctgtcatactcttctcctcccgccttcaatctttcccagcatcagggtcttttcaaatgagtcagttattcgtatcaggtggccaaagtattggagtttcagcttcagcatcagtccttccaatgaatattcaggactaatttcctttaggatggactggttggatctccttgcaatccaagggactctcaagagtcttctccagcaccacagttcaaaagcatcaattcttcggcactcagctttctttctagtccaactctcacatccatacatgactagtggaaaaaccatagccttgactagatggacttgtgttggcagagtaatgtctatattagcttataaagaaggggccaccttcctgagggcttccaaatctcaactgagtgtatctgattgggagaatggccacaggagaaacctggcctcaaggagttttgagaatgcagtgagtattgaaaatccacctcccgaactgaaaaagcacaaaatagagatcaaggcaatccttggaggaggcactgtagggaatgcgttatacgaattggttttggcatcttttcctggccaataactggagaaggcgatggcaccccactccagtactattgcctggaaaatctcatggacggaggagcctgctaggctgcagtccatggggtttcgaagagtcggacacgactgagcgacttcactttcacttttcactttcatgcattggagaaggaaatggcaacccgctccagtgttcttgcctggagaatcccagggacgggggagactggtgggctgccatctatggggtcgcactgagtcggacacaactgaagtgacttagcagcagcagcagcatggccaataacaggggcatagccccatgggcttaaaccagccctggtttatttcttcagttgacagtttggtcatttctttaagtacagttgagccttgaaacacatggtttgaactacaagcccacttacatgtatatgtatattttttccccaaaaaatgcttccctggatttctctagtggtccaatggctaagaatatgccttccaatgcagagagtgcaggttcgatctttggctggagagctaagatcccacatgccgaggagcaaccaatcctgcgcattgcaactactgaacccatgcactctggagcctgtttgccacaactaagacctgacaaagacaaaaatttttaaatacatatacacatgggtaaattgggggggattttgtgacaatttgaaaaaacttgcagacaaacactgtggcctgaaaatattgagaaaattaagaaaaagttatgtatgtga

SEQ ID NO: 32648 - DNA, 757 bp, Bovine  19866880798029
  misc_feature (1)..(1): n is a, c, g, or t
natctattagaaattctggtctctaaattcaaccaatttcacccacaaaatgataaaataatagaatcctacagtaggcaaagaccttagagattttctggatcgagcagttaaatgttttggacaaggtaaattgtcgaacctttctgtttactttcttgatccgataatgcagtcaaaacaattgaactggttgcatgtatcattcctgaacttgaatatttggtttttcctaaattgaattatttgaccaaaacaagctctatccagactgaaaaaaaagagagaggtgagattctcgtttttcttgtcagctcatggttgtagcttccaaagggacactctgcggctcacacttaattaaagcccagtccctctgactccggcttgcccactaactcactctgtggcctctctctgtgatgtttctctacactagaagggctcggggggctgttaatgccaggaatcaatgatcaaaaattaattttgaagcctatgttaagagctcattaacgtgaacagtgcagcctgcctaaccgagaatctgagcggcacagccgaaatcttccaaaggatttgagaacaaaattttgcagatagaatgtatcttgagataatgatgcatgtcactaataacctagtgctaagttataagcctaaattggagactttgcagaggcatacacagcctctgtaattttccagtttgggtgtaataatatggaaatggcttttgatgctgggattggatcag

SEQ ID NO: 32649 - DNA, 3674 bp, Bovine  19866880803289
  misc_feature (1)..(1): n is a, c, g, or t
ncccattactaatttatttcttataattacatgaaaaggatgtcttctgaacactctaagcagattcttgattaaaaaaaaaaaaaaaacaaaaaacacttcagtattctaattaccctgggacagcaaggagatcaaaccagtcaatcctaaaggaaatcaatcctgagtattcactggaagaactaatgttgaagctgcaatactttggcctcctgatgcaaagagccaattcattggaaaagaccctgatgctgggaaagattgaggacaggagtaaaagggggtgacataggatgagatagttggatggcatcatcaactcaatggacataagtttcagcaaactccgggagatggtgaaggacagggaagcctgacatgctgcagtctgtggggtcacaaaaagtcggacacaactgaacaacaacagatctggaagggcagcaagggtaggtcccaaggacaatcagcggtgccttgaaaggcaactctatttgaagaagctatcatagatgcctcaagaaaaggaagactaacccacccagcattttccttgctagtgaaagcatcccttccacctctcagcactgctttatatcctttccttcctatcaaaagtcttttctgaaattttctgatggaacagttctcctcaggatgcatgggggttttatgatgtgtcaagttggttagctttaactatatttctcaagattctcttcctatacattctcaattacaacaggctcaagaaagacatttctgtgagatttggaggacagatgtaggtgagacaacagccatttcatagatcacaggaatcatcaatgtgctgatccaccatgggacatgaggaagcagcttgtgcctgaaagtgctctatcttgggacctttcttctgctcctctgactcctggagcaaggtgtatgtgtcaggcttcagagttaagtgtttgggtttctgcaggacaccctcactacaaatcagaggcaacaagaaccagtcatgaaacttctcatgaattctgctcatgtttataggttccagtttgttcttcctcatgttatattcatttttctgtcctgattctacctggcctgtggacttaaggttcttccaccaaatgtgaagaataagcttcccagagattgtttaactagctccagctcccacaattgcatgagatcaattccctgtaacaaattctctacctatctatgtctctctgtctattctgtctattgcctatttttatttcctagtgattctgtttctttgataatatccttactgatacataatttgacactggaactgggagggttccatagaaaccaaatcttaaagatgagttccttatgttggttctggaattttctggattttatggaattggtcctctgatatgattaaatttaaagacattaatgatcctgtagcccgtgataaagtgggccctggtgatctatggcatgcataggcatgtaggcaacacagtgactcaatttataatgtctgtatgtctgagtccccttgctgtccaactgaaactatcacaacatttttaatcaattggctatactgcaatacaaaattaaaagtttaattaacatttcataatgtttaaatatttgtaatcaagtgtatttagaagggaagggtctttgtgaactagtattttcagccttaaaatattacaataaaaataccgagtataatggggttgggtaattgcttgtaacggtgctggggaacttgaaacaagaagatgatacactcgcagtgctttaaattgtcatctcagccctcagaaaggacgtgaaagcttgtatgactactgtgaggagaaccctcacttcctataaaggtgggatcgggatatctgaaaaccatacccaaagtctaatcctgtaggtggttgaactgtaatacaaactgaattcccaaccatgaagagtctcttttctaaagttatgacattgactgagaaggaatgagatcctgaaaattaaaatgggacatatgggcagactctgatgacccagtctcctaaaatcttttgagatttctttgccagtggaagcagcctttccacccctcagcactgttatagatccttaactgggatataagtgactaagaggatataataataaacagcaaatatccttaatagagaaactattcagcataagaagctctgtagaaatttatctaccttattctacaatattggcttctgatttcctttattgatatcttaccaaaaatgatgctatttgtttatttcccatggattctgataaagatttcttttttttccccatggaaagtaggtgtagatggcctatatgattccaatggttaaaaatttagagtctgacttccccctctttcacttctttgagatattcctacataactttttcttcatttgcaaaagcaataataggcttatctatatatcatagaatttctgagtttattaaacatataatggttataaaatgttatgtcaatccttaaaggttgaatcaatcattaagtataactaaataataactgaaaagtaaattaataataattatagccagattattatgttcctatagaattatttatggttttcatttccatggtagattataaaattgaaatatttttatgctactaatatctttactaatagtattagatcaaaaatttttgtttgcagagattaatttgctaagtcatctgcatttttggtagagaaaataaccatggtactgtctcagttatgaactttctacttagaaactgccagtttcatgtcccattttctttcccctcactcacatgaacttttgttccctccaactctaactaaaatactaactagcatttattgaataatgcttatatggcaaacacatggcttattgatttaatcctccaaaatttgaaagtgaggagttttaatatgtacctattgttttagtatgactattttcaaacaccatatccatcttgttgaagaaaagaacagaaaaatagagaggctgttaactgtagtaaaatcaggaaaaacatagggagtcaggaaagcacatagtaagaacttctagccatcctcaatgaatcagaaaaggtttccagaggaagtgagatgtgaagaatgttttaaaattgggaaaaggcaaattgggagataagagaacattccatagtgggactagtttatacagagcctgacagtgaaaaacaaaagtttgcagaagctacaaataattaagtggtccaggatatagaccatgaagatataagtggcaatatgtgacaatggaaaggtaagcagagttcttctaaagggcagaagaaaactttgatgagtatattctctcctgaaaacaaggaggagccaccaaaatctactctacacaagtcctaagttattttaggaaaattactctggatgcctttataggatgaaatggaaggaaagactagtttcatacggaccagttcagagatgaaaggtgttgtgacctcaactaaagcattgtacaatgaccttaaaaagaagggactggctcaaaggacattgaactggcagattttccaagtcttttctttttttcccaagtcttagtacactgattagatgagaagaagagataaaattcaaggt

SEQ ID NO: 32650 - DNA, 915 bp, Bovine  19866880825966
  misc_feature (1)..(1): n is a, c, g, or t
natggctggatggcatcactgactcgatggacgtgagtctgagtgaactcccgggagttggtgatggacagggaggcctggagtgctgcgattcatggggtcgcaaagagtcggacacgactgagcgactgaacagaacggaactgaactgaatcctacattgtcaccaaatatgtagcaaacataatgcctcatgcatcatgtttctcccctatcttctccctggctccagggtttgaaagaaaggaggaggagggcctcatggctaaccagccgggtccagaggaaagcgcacccggatcttcttaccttcattagcacagcccctccccaggcacagactggagtggtgcggagggtgacgctatgcccggatctctccccaaattgaattgagggagataagaaatagtgctgtctttatcctgtgcttctatgtgtaacttctaaggaaattaacgtatgagtttgtgagaaaagcccttaatctacatatggcatttcctgtcttcggatgttaacactcagtcactcaggtggtgtgatcatttggtaggtcccaagagactatgctttctgagttactttgtgccagaataaccctattgatgctaaataaggacaaagtgaaacagggaatgctgctttgcgtttgtaaaacttctttcaacccaggctttccaagcgtggtacaaacattaagagaaattattatccccactctacatagagaaacgtttgatttctttagtaatagcctctttagcagtttccagatgtaattacattggttagaaatgccaacttgtgcaacgaaattgtcagcacattacatgaaacaaataaaggaaaacaatactccctagaacatatcaagtacaaaaggagtttcctgcacatcctactcccactcta

SEQ ID NO: 32651 - DNA, 932 bp, Bovine  19866880866283
  misc_feature (1)..(1): n is a, c, g, or t
ntgttataggctgctaattggcataccagatttctttctaacactgtgctttggtgacttgatgcgtgtatgtttctagtaaatcctaagaattataaattaacagattttattttgttttctgtattctcaaactgatcttataaataaattgggcagaatgattggtcaaatctactgccccccaatctcacttcaaaaattggttgtaaaaaaaaaaaaaaaaatggttgtatcttcaaccaatctagtgaatatattttgttaattagctgtcaccagtgtattggcataggtgtatattttgtcttcggaattaattcctataatgttattggggcatgccctctggtaattattgatttctactgattaaaaacacatttatattcataagttatccattgcccacaggtacaataatgaagcaaagcacatcaagattttaacaagagatggcttttttcacattgcggaaaatagaaagtttaaaagtttaatggtaagcattgattagttcttttcaatctgtggtccttagttttctcttattggaaaggtcagtttagttctatagtttcttggaaattttgcttgctgacacatttaaagagaataatatcttttttgcagcagaatcctgaaaattttaagaattctagttcagttttatattactctaaacatatttttcattgtaaactaagtttgcaagtttaagataatatttcagggtccacactatatgattcttagaaccatagacacattcaggttcatttcatgcaaaatacaatatactgtcaaatggaaaacctttttgtattttctagtctaagtgacttgtgctacagttcttcttcattaccttcgacaattaaacattaacaagatcacacttttaccatacgacaggatttcatagcaatttt

SEQ ID NO: 32652 - DNA, 594 bp, Bovine  19866880913370
  misc_feature (1)..(1): n is a, c, g, or t
nactcttcttgttgcgcccaacacacacacacacccatccacccactcacccccagtaggtgaagggcaccttaggacagcttgttctttcccgcctcacagaaagcccttaagaaatcctcataccatcttaggacacagggctctggcattcaactaaagatctaaaccatgtcaagccaaggtacaagaagccgaggcggaccacaaagcagaaggcagggcaaacagagcgtacctagatgtttgcatttacacaaagacattagccggctgattaatgggagatgccggctggaggcggaggcgaccgcgccggcctcgttacctgggacatctgcggcctcaggttgatctccttcaggttgatggagtgcgcccggaggttgttgagcagctggcagagcaggactccatcgcggagggtctgggccaggtcaaacacctgcgccgagtcccaggtcacccggtggttggcgggcagcaccttgcagtggatgagccactgggcgcattgcttccacggctccatgcccgacggcgcctggacgctgcccggccggggcaggcagcggagatgcagccgccgccgtt

SEQ ID NO: 32653 - DNA, 1028 bp, Bovine  19866880915025
  misc_feature (1)..(1): n is a, c, g, or t
nacacacacacacacacacacacactcaacaacacagagatacacaaagtgatataacgagaaattcatttaatgaggaaaattaggaaaaactaacttaaaattgaatcttctatgagggcaggtaaggtgtatttttttttaaaagaaggaggaaatgagcatttccggtgagaagaatagagtgtgtgaagacatgacatgggggaataggcgagaacagggctggaaaagttccataacatggttcctttctgggtaagatctgcccagcagccaacactacatgctgggcttcacctgacaaagctttatccacaaaaaaaaacacgtctgtagacattcaagttcaataaagacccaatccatgttagaaactcactgttacctactattctttgaatgcaataaacaatatacatttatatgacattaactatttgtttctgggtctcatttgaaaaccgatttatcaattttgacaggagatttaaacaatataaattatagaaataatttatatacaaaactgcacacagctaaacactcaatattataagcctgtttcagaagatatgtggatattttaaatatctttagaatctaagaaacaagctaatagtaactttattcctttaaaacttctaaggttcttctgagactttgattaatctgtcttctctggccatggtatatttgagaatgcaaaatgagaaaaagatatttgaaaggggttttaaaaacaccagagcactgtataaattcaagacatttcaaatgtaattattaaacttctatattacttttcagttttctgttaatttcccattctttaggaactagtcttttcacacaggcacagaatccatgaatgatcattaatgatacagttagagctgcacaatcttattaagatccagaagggatgatattaatagtccataattcattggtcctctaattcacttacccaccatttcatcctttccctttttttttttttacaaagtatagagtacatggcccat

SEQ ID NO: 32654 - DNA, 2241 bp, Bovine  19866880933883
  misc_feature (1)..(1): n is a, c, g, or t
ntggttctcccccgccaccccatacacaagcctggtagacagggatctctttatatgtacatttaatacatgagtttacactaacaatgtaaagatggtttttcctaaaaaaagatttcaacttctagggtccctacagggcaataggaaatcatcagttgattcctgacttattatgttttattatacttaacaactcagatacttcacagcactgcaaattttgctggtatctaaaatatatttcctgtaaaatacacctacagaaaatacatcttccataaactaactaaatgtgcatacattagattatatatgaatataaataactgaatgttacattttgacatgtcctataataaagaaacacgcacaaaacaccttttaagctgttctacaaagtgtagatcaatttaaaaaccgtccttagtaatgggaagattcttcatcctaacagaaaattagtatatcaacatttcaatccaagaaaggatacactcaggccatgtgtcaaatgccctctgaggactgaggatacagagatgaatgggctgcaaggcctaccctcaagaagcttattatccatcagggaaacaaatacaccaacaaatacaagttcactaagacagttcaagtaatatgatgaagatgatggaaggagttacatggttctctaagggcacagggaatacaacggttattccatctagacggtggggttgggaaagtttcctagggaacttttttcaatccaattattatttctaacaaatgaattacaaagacatctatttctttcactatggactcagaaagacagagtgtcgagagcacagttacagagataaattaagacaaagaacctagaggtgagctgacagaggtaagcagccatcaaacactgcatatcacttcctagcacttaagttttgcgaaagtcctgagcaaggcatagttccctcctcgagaactgcacagcccactggaagagagacacagggacaaatcattacaacacaatttgctgatggctataagagcggtgtgtctcagccatgggaacagttaacagttgatgacacaactacacggtgagggttcagggaaggctgaagaaacaaggagccatgtgtgggcttggaggacagtagagttcactagatgaactttctgcagcagtagaatgtacctgggctcaacaagatcctttgtgctgttacttcatcatccttgctgctgctaacactttagttgtgtccgactctgtgcgaccccagagatagcagcccaccaggctcccccgtccctgggattctccaggcaagaacactggagtgggttgccatttccttctccaattcatcatccttagctcattctataaaacccgtattgttcccattttttagttaaggtacatgtggttaaacaggtgaaataacttgtccaaagtcaaactaataataacaggtgaggttgggttataaaagcagaccaaaagtctcacttggctcctttggtttttcccagacagctaagcacaaaacataaggcttactttgatcggtatcctggctggtttcaacctaatttcttcaggagtctcctttaggtctttcaacagttcagtctccataaaatttctatttcttctacagattcatacattttcagcatgcttattatgtatcagcaggcatttgtagctcactaaaattatccctacttcctccacttttcaagaaacttcaacctgctctggacacaccacaaagtaaaactcaactcttgatatttccagtaattgaaacaaacatttatctatggatagacatccatttgttacatagtatgtaatctgaggtacttaggcaacccactaaaaatgaacagggtatatgaagtgaaaatatgatacagtgtagtcacaaagtagcactagctacaatgtatggaagagataaaagttacccaaactggcccaccgttgcatgcaaatttaatatcttccctacatccttctggaaaaaatgtctttgctcatggctgaaagtcatcagtacagtatctaacagttggttttaggtcatcaccattaatagagagaggtggagaagttttcttttccacacaaacagtgaaatgtcacaccttataaagccctcacattgaagtagccacactgtatcagacccacatccaatctgttgtcaagacaagtctctaaactgtgagagcata

SEQ ID NO: 32655 - DNA, 1873 bp, Bovine  19866880936127
  misc_feature (1)..(1): n is a, c, g, or t
nttgctctgctaacaacacttcttagtcacaatcagtgtgtgcaggctaatacccatctcagagttgcagatgactattcctggttctcatcacaacagtcgcatcatgcctagtgccacacgactcagctgtgccctcagacaggggcatgccgatggttcaaagggagcgcactctccggccattattggcctttttcatgatgacatcattcctctgccctttcactcagaggtgagctgataatattttatcaggcaggatagatttttaggatttggaataactctggcaattaaatctcacaaaggaatccagtagtttctgtttaggatatgaaattatttcttctgtggtccatggtttaacattggcttcttatgaatatttatattgctagcatcttagctgcactgccaggggaaaaggcagttctgttgaaataatagctgtaattatttgataggttcccttttttttgacagcagtacatccttcagctttcactgttataccaaactagatattaggaggtagcctagctgtggaaaccaatactggaaactgtccatccatcatgaggaatgatcctttctctgaggggaattttctgctggattgccaagtgcataatattcccctggagcaaggctgaatgaaacaatgctgctgtgacacgtcctgtgacatttaactctggagggtctggaagccagcgcactgggggtgctaattgtattctttagttatcatcatgacttaaagcccagaaggtcgaaagagtttatctaatcccggggtagaaaagcaattaaaatccatcccagccaagatagctttcacaaaatccgctatcccttccctgtttttaggcccataaaggaaagatgctgggtaaaacaagccatagaagcctgcagtttatttaataaagtgtactgagcatgaattctgtgccaggtactgttctaggtactgagaatatggtgataagaagacaaacatagatcctgctctcaagagctcatgagctggaaggaggcagacgggaaacaagtcaagaaataaacaccaggtaggcagacaccacttgaaactggtagtcagccaatgcttttctgagaaggtaacactttgaatgaaacctgagtatcaaggaagagcccaccatggaaagttctggaggaagagtattctggacagaagaaatacttcctgagaaagccagaaggcataaaggagctggggcaattgagaaaatggaaagaagcaagtgtgaccggaatacagtgagtgagagggaggtggcctgagacgaggaggaagaagaagatagacaggcactagattacaggtccctgatggccagaacaagaagtgtgggtttattctaaatgcagtggacattaagcaggagagtggaatgatatggctgtttaaactttaaaataataattctggtactgtgtagacaatagattgtagaaggggtcagggaggaagggctagaaggtgactaacaagactccagcagtccacatgagaggtgttagtggcttggagtaggttgggaacaaagcctgtaatgaaaatgttggattaagagcctgttttagtctgtgtctgcctttgctgcaaaacttaacattaaatctaaattttgaggcgtctgcaacagagatgtgttctttctgctttctcttgctctcaccacatggataccttataattgattagtacttgattctattcggtagagaaggaaacagaacgacaaaaagcagtagcagtcacagcattccagcatatgggcatagcaatcagaccgaatgacaaagggactaaggcctcaggactgggtgggagcccagg

SEQ ID NO: 32656 - DNA, 656 bp, Bovine  19866880967218
  misc_feature (1)..(1): n is a, c, g, or t
ngcttcactttcacttttcactttcatacattggagaagggagtggcaacccactccagtgttcttgcctggagaatcccagggacgggggagcctggcgggctgccgtctatggggtcgcacagagtcagacacgactgaagtgacttagcagcagcagcaacagcagccacttgatatcaattactcagttattaaatatttactgaggccttctggaaggctttgcccttcctcaaagagattcaaattaattacaaagacaagaaataaacataaaatttaaagtagcaatattaaaacttacgcctatccacatatccatgaaaaataaggaacacaggaggtcacatgctataggagtttagaggcaagaactctccttgtggacttggatggcctcaaaggaccacactagaaatgtagttttgaactgatctcagtgaatggcagatgtgagtcatgaaatggctgctgtaatagttgtgctctaggtaccttagcaaaaatagttttaaagcactcaatcctaaatctggctattttcctgttttccagagtcatttttttttaaacatgggtgaatctaaggaaaaaaaaagacattaattcttaaattaacaatgtttatcattatttctggatggaaccaaaaa

SEQ ID NO: 32657 - DNA, 2161 bp, Bovine  19866880973029
  misc_feature (1)..(1): n is a, c, g, or t
ngggggcatgcttctacttctgaccagctgctctctgtgagtctggcactatttcacctggggagtgaaagtgaaagtgaatgttgttcagtcgtgtccaactctttgtgaccccatggactatacagtccatggaattctccaggccagaatgctggagtgggtagcctttcccttctccaggggatcttcccaacccagggatggaaactcaggtctccagcattgcagggggattctttaccagctgagccacaagggaagcccaagaagaatggagtgggtagcctatcccttctccagtggatcttcccatcccaggaatgaaaccagggtctcctgcattgcaagtggattctttaccaactgagctatgagagatgcccctaaaaactaccacttattggccaccacttaagaagtctgtgtgacctagggatgttttttaacttctctgagcttcagttttcacagaagcattcagaataattccactttttcatttattttttaaagaagcctttatattaaatataaatattatgtattcagtagagaatgcattttaatctttactgaagttgcaaaactgtcacttgggggctctgccagaaacatctgcaatggattatatctggcaaaatcttccttgtggaagctttcaagagtggaagcactcttggatgagcttttcattcatacaatagaatgcaaatacccacccactcttctttacaaagtctttatcctgtgaaataactcagatgcagatgcttcagcttgagataataagctttctggtttgtgaagtaaatgcgtgtcatttgcagatccaagtctctgaggagactctccactaattcacaattgatgctatccgaaaaattcacttgtcccttgggagatgcatcttattgcccaagaatctgctcataggctattagggggagtttacgaaacaaggaggaatgtggtattccgatgtcttattctccttttggagaaaacactatgaagagggaccagactgacgatgatactcacaacattgactggatattgatgcctcaaagatgatgttgtggaggaacagacagacttgaagaaatgcattattaacagcacagttgttttcacgtgggtctcctttcacttttcaatacttctcttgacaggggtgggaatttctcttgaaggtacagaatattctcaatcttcctgtgcaaaaaattacatggtctttgaaaggaaaaaggaggtctttcttccctctctggagccagaaagtggggaacttggactatgaggcatggaggtggctggagattccagctagagatcatgaagatgttcctccttggcccagctatcacatcaccactgtatgacaccttctgggagttgggagccattcaaatctgaacgtggtgagaatttcactcttgacatggtacttcagtgctcctcaaaccttccataaagtgttgttaaatttaacaatcttgttttaaggaagtaggtgtctaggattggagaaaacaggtatgtggcaaggaatctgattagcccctttaagcagcaagtgaggccggaggagtcctagagccatgtaattacggctcagggcactttggtcttctcctagcaaagcagcatctccttgatcctcctgactcactgttatttctaaatggggctctgctgtggaaccagtgactatgtgggcaaaggctgtgataatttaagaagaggtattactcagatagttctgagtgaactgtgaatatgaagagcaggcaaagaatacaaagggtaggcacttaggtgtacactggtgcctgggaaacagcaagactagaggtttatccagtaaagttcactctaggtaatacgttaacagctagaaatctccatatcatacaaattgagagtcggagcaaagtatgtcagaaactcaggaaaaaagaaaacagaatatagggcagatgtaaattccaaaattaagggaatctgggcagaaggtaggcaacactgcacagtgggtaggattttgggctcttgggcagggtttcctggttggaatctgctctttcctctttcaactagctatgagaccttggacaactttcttttcttctcagtggctcagctttctggctta

SEQ ID NO: 32658 - DNA, 864 bp, Bovine  19866880979780
  misc_feature (1)..(1): n is a, c, g, or t
nttctttcttctcttttcacttcttgagaattttactgtaattagttcctaaaccttaagcatctcatgtactgaccaccccatctccaaaaccacaaatgtgtttctcacctctgaagttccttctatggcccatgccccacgtattctgcccttcagttcagttcagttcagtcgctcagtcatgtctgactcttttcaaccccatgaattacagcacgccaggcctccctgtccatcaccaaaccccagagttcactcaaactcatgtccatcgagttggggatgccatccagccatttcatcctctgtcgtccccttttcctcctgcccccaatccctcccagcatcagtgtcttttccaatgagtcaactctgtgcatgaagtggccaaagtattggagtttcagcttcagcatcagtccttccaatgaacacccaggagtgatctcctttaggatggactggttggatctccttgcagtccaaggtactctcaagagtctaccattttaaatagaagtacaagcttacctgaaacagtcccaggatagcaaagaaaaggaggaaaaactaaaatgttaacttctcatcttaaaagagattaagtattcttgttctcttacaatgtctatgtagggaaataaaatgatttattaaatggtgttttctctggaataatcataaacaaatgcttctcctaaaatgatttcttagaattctccttgcagtgctcagctatgatcagcttccttggtgccctcttgaatagaacaggttatcttttcttcctcatcttttacctggtcaggcaatgagattcttgcagagttgcttgttctgagctcggaagagacagtttct

SEQ ID NO: 32659 - DNA, 1079 bp, Bovine  19866881014946
  misc_feature (1)..(1): n is a, c, g, or t
nttatcttctcctttcctactacatttatttgcactttgtcatcaaaactgatcagacttaaaagtgcactgcctgatccttttcccctaaactgttacaccattttccttgctttcattttagacctctccaacatgtgttttgagcccctgcttcctcccctcccctaatttttagaaatcattccatcattctctagtatgatagtttctgcctcaactctctattataacaagtattttcaaggtcattgacaaccactttcaagacaaatcagacgatttttcttattccttatattctctcaaatatgtggcactattaatcatatactctttttttttaacctctggccttttaaaataaattttttatcaaggataggaattgcattttcttggaggtcatattaaatttgtatgtctctcctgaacatatatcatatattcagatatccagagtgccctaattttatatatatatatatatatataaactcaaatgtgggttgtaagctgccaataaaatcagttgtaagtaaatgatgtgttcacatttatgaccaatacatgaggtcatcctttttttaggggagttgattaattcctacatgattggtccagaagaagttcctgcacaaagagtaactcatcccctaaccctaaattctggaatgacattaatactggggttgaggaatttctatttacctttctgaaggaacttaagtgcatccttgttgcagtttgatttttgaccgtcccgttcatattcttttcatgtaatttttaaggaaccttttggtccttgtggctgctctttgtttgactttcctagccatgaaaaacacaaatctcagacaattcttcaaagattccctattattctatttctcatcttagtctttgctttcaccagcaggtcagactgtttttcatgccatctgtactcatgttgcccaaagcaaacacgtccaggatatcaagtgcctatttccattgatggcaaagatcatttcaatctaaattacaagaagtagaaggaccattatgaatattcacctgtcagagagttgtta

SEQ ID NO: 32660 - DNA, 952 bp, Bovine  19866881038119
  misc_feature (1)..(1): n is a, c, g, or t
nttggtaggcaggttatttaccactagcgccacctgtgcaaaatagtctagcaaaaattataaaaatttaaaaaatgaaaacaaaaaagatcaaatggggttactagtaatagaagaggacatagatgaattgttgaagttgggtgatgggtacagagtgggtcactgtactattctgctctagtgtgtatttgaaaatcttgtatcaaacatgtaacaagtggtggatcctggcaccctatcttggttgtgctgaaccaagattactgggggtggattcctcgaatctgcattcttagaaagttccccaggtgattcctaggtgcctaaaatttgagaaccactggttgatatttaagatggcaggatcatttctctaatatctgtccctccccaagacaataattgctgctgcttaagatgtccaagcaaacctttaacttcaaggatgaaaatatcaacacatcaatcttaaaggtgaatagcaatagcagcgagtctaccacacagagccaaattataagggctcagaaataaacttgatctatttcatgaaatagaggacatggttttagaaattacccactttttatgcctaatgaaataaaagaggacattgtctctattgagaaaaagcaggcctgggtaagaagagcatgctacgtaatgaaaatgacaataactgaaataaaaatcttatttgaaagtagtaaaaagcagacttgacattgcaaataatcaaatcagccatatccagaatactgagaaaatgaaatcatgagtttaaaaaatgagaccaagtataatgggcatagaggtcagtcatgaagataaaacctatagactaacaaatggatcaaaattaatcattaaagatgtaataacatatatcttagaattctgggagaaaaagaccccaaaataccagtgaaagaatttatcatgtcccaag

SEQ ID NO: 32661 - DNA, 1263 bp, Bovine  19866881046377
  misc_feature (1)..(1): n is a, c, g, or t
nctgcaagtgaagaccaccaaactgtttccaggaaactttttatgtctcttttttcttggcaacaggtgggtgtacttttcctttccattactaaggcattccctgaccaaatagctgtattaccatcaagtggtataatcatcttctaccattgtttgatgcccacggaaatgctttctgctgttgactcactgcaaattaactcgatagtgctgaaattaatcacccagattctttatctctatttagaaaaacagggagtccttggctttttgtcagtggtaccatcaggaacccaacttttacatcatttatagttctttgtaattgccttaaaaagtctaattagtatactggattttgttttccaagagtttgcttatttttaatgggtttactctcttgttaaatggtctaaatgactttccaagaagaccagctctcaacagaggcagactgcttatcaaaaaaacgactactaatccaaaatgttttttccccatgacttttaagtttaaatatttagtgttgggttttcaccaattataagcaattaagctacattagtagtgaaatttcaaatctcttaacacattttgcatgattttaagattaaatatttagaaatggactttgggcaatctaagtaaatgtgttctgttgaaaattaaaatgtcactgtttattcaagagatattttccaaatacagtcaaaatattaaatagtaattatatcttatacctaaaaagtacttcaaagtatttttataggcattattcatattaatcaatcttaaatatgtcaataaatagtggaatacacatctttgaagatccttatgtaaagataaatattctcttcatgtttctttttaatgaatatttttacagttctttacaaactggataaaatgtgttgggaattctaatgacttgcttaaatgaaatcatttgattccatacattttctacagaaaaataagaaaaagatcatggaagatactctatgggatagtactcacaccatctaacaagatacaatatatggtgactctgttttaaagaaagaaaaaaagaaaggtgctctcttagatcaaaaaagtcaacacactcaacagatgccttttggagtattcattgggtgtctcactatttagatcctggggatacattagtgaacaaacaagtaatctctgagagactagtaatttagtattctagtgtagagacagcaagtaaacaaagtagtatacatataaaat

SEQ ID NO: 32662 - DNA, 1574 bp, Bovine  19866881062981
  misc_feature (1)..(1): n is a, c, g, or t
ngataagaaatggcggttgtgaacacttggtcactggcttcatgcctcacaatggaagcacggagctgagggcagagagtgctgactaggggtggtgtggcagaagggtgcacaggggagaagcttgttgaactgagcctgtaaaggatccttcttggccctgagaagccagaaaggaggcaggaattccaagcacccttaccctagaccctctaacacctgagaggccatcctgagaggtgaatcctctctcagctgactccctccagttcaggaatctgtgacttccttgcttccctccttcccacttcccactttcaagcactgaagaaaggagttactgcaggggtgaactcctcaaaggcattcttagacagtgaccctttgccagctctctacccaagcttctccagaatctaaatatactgattatagggagatgccactcaccacctaaccctccctcttgggctaccagagcctcgacccttctgagaagccagtacaccctgagaaatagcacccacaggagctctctcaagtctcagtggccttctggcctgagcactgagatacgcacagctctcatccttacattttcctcctgcccttttctctcaagccaaaaaaaaaacttcttctgagtttccattctcagttttgtttgatcattttaggtgtttctccagtaaaaataaagaaaagaaatctgtccggagattaggagattctcttctaggatataccaagatctttgtgatattggctcccaacctggagaaagctcctttttcagctgtcaaagactcagaactaacctccttccccctcttcctatactgtatctttccacatttccagggtctctttgacttggaggaagacatcagtcccaaataagtccaatatgggaacgggggaccctctccaggtaagtatagcttctcccaccccaagagtaatagtcttccagaggtgaatttttctctcaaacatctgctctgatcttctcagattcagtaaattaccaactaaacaagtcaaataaactctgagcaggaaatttgaatcctcaaggagactttcaatattaaaaccctttctcctccagatcgtgatccctcctctagtagggattggggggaaggacattttctccaaaaaaaaaaaagttttgggtggatttgaaataccttcttaaaatgggatactgtgaatttatattttaaaccagctttcctgaacatacctatgcatatttatttacataattaaataaagagcaatcagaaatttacctagctattttcttggcatcttttctccagcatcctctgcttcttccacttgtacgtgtgtatgcatgcatatatatacacatgtatgtctatatacattaaatatatatgtatttaactttctttgaaagaatgattttttatttttttacttaaactttcaactcttctttcactccctttagaggagaattatttgatctttcaattctctgacttcagatctctggctggtttccatgcattcctcattcttcttcaacttagattttcatc

SEQ ID NO: 32663 - DNA, 1560 bp, Bovine  19866881076234
  misc_feature (1)..(1): n is a, c, g, or t
naagttggtctttagggtctgttctctagtgcaggtgtaaggcacagtttctactgagtgtaacatatggaacaatcctgctcctgattgggctgacgataaacttgttgcagtatgtgataataaaggcttaataactgagcacatccttcaggctgaaagagatttttcatattgggacctttattttcccagaaaagatacaaattaaagagtgagaaataggcaagtaaaagtcctgccatgccatctatggtatccattacaatacagtgctttttatgtgttttcttcttaggattctcattgtcttaagctttattctgtgtcctatatcatggggttttatttgcttcattgtcatttatgaatacccaagtgttccacagggagaattttgtaagctaattggaaccaaaaggcaattataagcagtagaactgtaatcagtgtgccaaaaatatatatttttatccacaatgaaagttaaataacctagaaaatagttgtgatacttcacacttacaaatcttgcatctacatgatctttattctaaggagtgaaaatgtttttacactcattctgattaattcacagaaatctgcataaagaaggtaagttttaagtgtggtttttaaagggccaaactcattatccatttacaggatggcatttgcagaattaaaattagactctcttccagacttctggtctgctacttcagttctatatgttagaccatcctttgttttaggagagtcccttgtaatttttaacacctttaaggaaaacacattttttaaaggcagtttagttctgttttggtagaacaagcaggaaacaaaacattgctctatgtagtttttgctttttaagttgttttagctctttgcctcaaaggaaagaagaaaaagtcagaaaataagttgagcttcgggaaattctcaagagaagggaagcatttctactcagactgaaactggaggcaaggagcctggagtgggattggctatgggcaacaggtgttaaatgccccttacccctctctgagccctgaagacagggtggcagtgactgcagcaccttgacccttgtcttagtttacctggtcaagaaattttgcttcccacatggctgctatatttagtgttcaaacatacaacagtccaggcaatattttttcacaagttcatttttctcttgttctaacctgaaaaaaaaaaatggagggttcaattgaagggatctttttcatagaagacatcctttctcaaaccttcggtcatattttaccttctgcctgaaatttcctttttacccccattcacttagataatatttcattaccatcagtactcaatttggtgggtcaccttctctgaaccaaaacggcttcttctatcttgtaactcatcatactgtatcctgctgctgctgctaagtcgcttcagtcgtgtcctactctgtgcgaccccagagacggcagcccaccaggctcccccgtccctgggattctccaggcaagaacactggagcgggttgccatttccttctccaat

SEQ ID NO: 32664 - DNA, 1593 bp, Bovine  19866881083668
  misc_feature (1)..(1): n is a, c, g, or t
nattcagtccttgggtgggaaagattccctggaggagggcacgacaacccccctcccagtattctgcctggagaatcctatggacagaggagcttggcaggctacagtccatggggttgcaaagagccaaacacaactgaaacgacttcggatgcacgcacgcaagcctctatttccctgtttgtaaactagtgaattgattagtgccacacagttaggattggtgtgaaggttaagtgaggtgtaatgagcacattgtgttttatcacagtatcggcacagagtaaatgcacagtgaatgtcattttgcagtacgcttagtattttttttttgcatatgtgtataatatacagagaatataaatgataaagtaattttgtttaccttttatttagattgccagaactctgggttgtttttaaggaagacatttttaatgatcagactgatgctttgtttgaactcttttgggaaatttgtattcacttttatagatcattacataatccacatacctatttcgacaggaactctgtggaaatgcagcaccccttcccctccctcctgccccctgcagctagtttctattttggtgatgtggctagagaaaaaagaaatcatcacacagcgtgaatatccctcaggctttgtgtttttcctggcaggttgacctacgtggccagtctgtaaagttccctgggaacatgcaattctgagccggattcggttgcttcagtctatatgttgctggttctcacacagtcagattttggtacctattttaatgcaaagcatttggcttaaaaacattgtgtatttaatagcctgtttgtctgaatcacctctctacccagtgtaaaattgatgaacttagactgatgctgtgttgtgaagctttcttgaggatgttacctctttccttttgtctagatccaacataagaccagactatgcagactccaacttccacgagttcaagatgcacaccttcacccgggttacatcctgcagagtctgccagatgctcctgaggtcagttggcgtggtcttggttttcagtttaaaggaactggtgtaactgccaaatgtttcggcttccctagggtcccagtcagaatgttttctaatgggtatatgccttaccagtttggatccatcagatctttccttggccttgtgcctggaccgttccttcagaacccaggaaggttctctccattggcttgaaggggaccctgcatagtgctgtgttctcttgttctgcttcctggcgctaatggttttctagaggcagaattttgcaccttttaacctatcactctctgattttcccttgcaggggaacattttttcaaggttatttgtgtgttaagtgtggtgccagagcacacaaagaatgtttgggaagagtagacaattgcagcagagttaattccgctggtaagtcatgtttattgctgtgattgggcttttaatgagaacataaaacttgctcaacataattaaggcctaatttactctaaatatgtgtttattataacatatcggcttttgacactattgtttatgagcacaattagaaaaatggtttg

SEQ ID NO: 32665 - DNA, 1827 bp, Bovine  19866881101539
  misc_feature (1)..(1): n is a, c, g, or t
ngtctatgagttaaaaaatgcattttagctctgcctcctagcatacattaacacttttctccatagaagtagattgtaaatatcacttctaagcatttctaagtagttttaattcattatgattcactgtagtttccttttgaagtaaaatgaaaaaacagttataagcgaaagtcagaaataaatgtctgaatatgcatttatacttgtgatcaggcatatcagagagagtcatcaattttagttttgatccatttttatacaggaagcaatttgtttttcaggaaaaggcatattttatgaatcataatttaatattgttttgtgtctgcaccaatttatttaatgaaagttataaaggtgcctcttttcttaccatatacagcccatagcctattttcttaggtactttccaaagagaatattttcactagaatggcccaatgtgtactgttagatttacaaaagtcccatcacataatgcagagaatgccctgtaaaatgaatgcatataaagacagcactgtttgatacatcagatgacatataactgtaaatgttttcaagttgaccttgaagatgttaaggaactcaccaccacaaataccagacaggagattaactagaagacgactccctatctctggcatttgtaataggcataaaaggaatgacaagtcaattatctgacccagaataaaatgcccgcataggaaaagaaggaggaaattcagctacatgtctcttatcaaggttagtaaaaatttcataagtagatcatcatatgaagtgcacaaaatcaatggctttgaaaatggttgatttcatagctataatcctcagttccagccatgcataggggattggcagctgctccacccattaatattaatgaattatcaatgtacagcccacgcacaaccaccagggaaccaaaaataccccacctacacactactttatttttcaatcttccaaatgttttaggatggctactcccttaataagtagagaatcgttaagtacagtacatattatttcatgtagctaaaactgacatctcgtagaagttagtgaggaaatgtaactttattcatctgttaaggtgtgttaaattatctcacttctttttgattgaagagatgcctgtgaccattaaggaaatgtagcctgtactgctagcatatttcattaagagaaaaattcagaatgaccctagtagtctgcttagtgaaaaattccttctccaagaagatatctactagtgttaaatgcactgtcacagaacatcattgttttttctaaattctgaattcaatagagtaagctctgttctttttctgatctcctcccccgtgatggttccttcctgctttttagttagactgatttctgtaagctctgatttcttctctctacattttcttccacaacattcttgctcctatgattttaaatttccccgctgtatgattgccatctaactctgtgttatccagatggattacataatcacctccttgactttcccccgagtctttaactcccattgtctactcttcccctatctaatccacaggcaagtcctgaacactgcagttaaatgatatcgctagcacctgttacccttcctgcaggcctgtctcctttctatgacactatttttttaatgacattctcacctaccaagccatgcccatctacaagccagctgcatattgatgtcatattagttattctaaaatatataatccctttactgagaccctgtggccagtgataaatttcagatatcatagtcaagctgggtccttagctttctttcta

SEQ ID NO: 32666 - DNA, 682 bp, Bovine  19866881143028
  misc_feature (1)..(1): n is a, c, g, or t
nagtactggagtggggtgccattgccttctccgaagaatacctactggtattctccaaagataaagttttcatcagtttgttttataggcaagaggtatcccttgtgtagtatattcatgcactcgatgaaaaatatggtttagaactcaattactttgtactttctactgatgccattagataagaattggcagaatcaaataaaaaacaacattgaatattattagcagttagtaaggatgatttgggcttcaaagaatttccttagaatataataaattgttttgatttgcaggttaattaatagcaagatttttggtcaccgtattataggattgagcctagtaaatttagacagagtctttattctatttgatggtgtttaaaaataatgtaaataatgtgattgtagtctcaaagtttaaatcccctttttagaggtaaaggaattgggaaggagaaggctcatggtctgagcctaaattctggccagttatcagggtggattgagttctaaatcaatgtgtgtgtgtgtgtttgtctggtacttaggtaacactggctgtgaattacataagtcactggaggtatgaacgcagtgtgacaacactgtcatttttctccttcaggataaactttggactaacattgaatagcttcttcttcctggggagagccaga

SEQ ID NO: 32667 - DNA, 1588 bp, Bovine  19866881157234
  misc_feature (1)..(1): n is a, c, g, or t
nccttgaaacagggacttgcaccaagtttatgtacataagagaaagctaggtgggagcctttctttcaacataccccgttttaagaatctaaacacaacacattacaaacatattacaactgcctatattacaattactataacaattgcaaagttaacacatacaatttgcatatgaattttgcattaagtggctgtttcttttagttttatttggggggagggatacagatcgatttaaagatgaaaattaaaaatggacaagattcaatcccaatgctaattttctttacatcccagtttacctgtttagaaatagaaatgacaaactccattacatttcaattcctgaaaatgactaacagttaggaagggccctgagatatgcaagagagtaacttggcagagggcaaagggtatctctgagaggaaagacacactacacgtggaaaagctggtggggaatatttttgttgccttcccccatatccaggagtacttttgcatattataatttctccagactgtagaaaaacatctcatcattttgagcctatgctatatttttgccaaccaaaatgatcctctgaagaaggatctgagaagagaagacactgatgggaacatcaggagagaaagggtagttctaaaagagggctctgtagactgaatgaacctctaatagaggttccaagaagcctcagatccagagttcaaggggaaaagtaccagaacacctgagtagctgtcagattgctttacacaggaagactgcctggggcatggaacaggaggtttggggcccttctgttttttaaaggactatacctgattaatggaactgaagaggcatgagcaaaaagtcacctttctggagaaaagcaaagcctgcatttctttttcaatgtcaactctatcatcctaactttcctacataactgctatgaaggcatctttgccaggtctgaagctggcctttacaaaggacaaaaagctatttcccttctcctctctgctagaaataggcaaagtttcaaaagaaagattgcctaagagaagttgtgtagggagagggtctatgaaagtgccatttggctggatactgtgcccaaactgagaacccaggttaggtgaactcaggttcctaacagacaagttgtgatacctgttacactggtttaaccagaaagacctataagccagaaaagccctacactactttcttcttctactgtgagttagagaaagagcctgaactggaaatcgcagacaggaagaagcaccaaaaaggaggagagtttaaattttccatccaagcagctgaggaaagctttgctatttccagatgacctctcaatgggaaaatctcctgtctttcagggtcggtgtttaaaaatgagagtgcatcttaattttaattcagaaatatttttttctgacactgcacagaattgttgttatgtcctggtgaagttgatctgttacaatatgtttaaatatattttatttttagcataaaacctaggatagcccacatggcagtagttggcacatcacgttccagtagtgctctgggtttcctcaggaa

SEQ ID NO: 32668 - DNA, 682 bp, Bovine  19866881163244
  misc_feature (1)..(1): n is a, c, g, or t
nacagagagaaagcaagtttatagagataaaaatatgactgctttattcctattgataactttatcctctttactcaaagatattgtcttattcagttatgctttttaaaatgtgtgagattattaaatgcattaatgtctcttaattttttaaatcttcggataaagaagtgagaacgttaagggcaatgacagaactttaaagataatgaaacaaaatgtaatatttgcaacttagaaactaatgtgtctaaatccttattagttcagttcagttgctcagtcgtatccgactctttgcgacctcatggactacagcacgccaggcttccctgtccatcaccaactcccggagcttactcaaacccatgtccatcatgttggtgatgccatccaaccatctcatcctctgccatccccttttcctcctgccttccatcttttccagcatcatggtcttttccaatgagacagttcttcacatcatgtgaccaaagtattggagtttcagcttcaacatcagtccttccaatgaatattcaggactgatttcctttaggatggactagtttgatctccttgcagtccaagggactctcaagagtcctctccaacaccacggttcaaaagtgtcagttcttcagtgctcagctttctttatagtccaactctcatgtccata

SEQ ID NO: 32669 - DNA, 1666 bp, Bovine  19866881280286
  misc_feature (1)..(1): n is a, c, g, or t
natgtaggtcatgtaccccttccattagcttttcccaggattcaccaaggaatatcagacactgtttcctttggggtttacctgcttgctgtgagttttaatctcagctcccatggtagtattacactgtttgtttacaagtccgtcttctctaacagaatataaactataggaaagaactgccttattcatcttgttatttctaatgtcgttcctaatatagaggagttgttcaattcttgtttaagaataaggaaaaaggaagggggaggggaacaagaaataatttctatgatatcataagaatcttatgattgtgctattttctatgggatttcaaagtctggagaactgactattgagtttctttctggcttattgaagtaagaagagaattcacaatacctctgatttcattcttctctattacacattgaggcaggatttaagagaattagtcatctaccttacgggagacagtgttcttgccaaaggagatgtcagcctactgggacataaaggccgcctggcacaaacccatcttcctcactggaaactaacccagcttatctccattgcctctgttcagcatagatgctaacctatgaaagccattgagccaatacaaacagcagtcaaggccatcatttcagaacagtaaacctcaaactaaactcaaaagcagaagttaagaaaagcagggagaaacatatgggtagaatacaactcaaactaatggtgccctgtaatcttagacttctcttctgtgtctgctatttttctgttcttggacaatgttttatcatggatattctcattgcagtggttaattcaccagattttagctcagcccctattgcaacatacctcacatttacagtataagaacctcttacagagactcttaaacaagagcctgggctctattgtagtattgaccaatggcctgacagagatcttggaaaccctgtaccatcatcttaaatgtatgcatctttgccccatcctggatataaaacaaatgcccagacttgaccattattactatatttctcttaagcaacctctagtgcaatattcagtcagtcagttcaatcgctcagttgagtccgactctttgcgaccccatgaatcgcagcactccaggaccccctgtccatcaccaactcctggagttcactcagactcatgtgcattgagtcgatgatgccatccagccatctcatcctctgtcgtcccctcctcttcctgcctccaatccctcccagcatcagggtcttttcaaatgagtcaagtgatggcataagatggccaaagtattggagtttcagccttagcatcagtccttccaatgaacacccaggactgatcccctttaggatggactggttggatctccttgcagtccaagggactctcaagagtcttttccaacaccacaattcaaaagcatcaattcttcggccctcagctttcttcacagtccaattctcatatccatacatgaccactggaaaaagtgtaatattaaagatgcacattacagctagtctaactctcttatcccacataatagtaaagcatgagagacagtatgagagttttacacttcctctaccacctaacaggttgtgtggcttccattaacatttattaaatttaaaga

SEQ ID NO: 32670 - DNA, 2434 bp, Bovine  19866881337915
  misc_feature (1)..(1): n is a, c, g, or t
ntcttcgttttctgaatgttgagcttaagccactttttactctccccttcactttcatcaagaggctttttagttcctcttcactttctgccataagggtggtatcatctgcatatctgaggttattgatatttctcccggcaatcttgattccagcttgtgcttcttccagcccagcatttctcatgatgttctctgcatagaagttaaataagcagggtgacaatagacagccttgacatactccttttcccatttggaaccagtctgttgttccatgtccagttctaactgttgcttcctgacctgcatacaggtttctcaaaatgcaggacaggtggtctggtattttcatctcttgaagaattttccacagtttattatgatccacacagtcaaaggctttggcatagtcaataaagcagaaatagatgtttttctggagctcttttttccatgatccagaggatgttggcaatttgatctctggttcctctgccttttctaaaaccagcttgaacatctggaagttcacggttcacatgaacttgctgaacattgctgaaaccgcgcctggagaaatttgagcattactttactcatgaatgaaatgagtgcaattgtgcagtagtttgagcattctttggcattgcctttctttggtattggaatgaaaactgaccttttccagttctgtggccactgctgagttttccaaatttgctggcatgctgagtgcagcactttcacagcatcatctttcagcatttgagttacctcaactggaattccatcacctccactagctttgtttgtagtgatgcttcctaaggccacttgacttcacattccagaatgtctggctctaggtgagtgattacaccttcgtgattatctgatgaatttaaatttagctttagatattataatgtttgacatatacaccaatgtcccttgctcaagtgtaattatctgaaattggattatttttaacttatttctttttttttcctttttaaaattttttattattattttttcctttcaatattggattggttttgccatacatcaacatgcatccgccttgggtgaacacgtgttccccatcctgaacccctctcccacctccctccccataccatccctctgggtcatcccagtgcaccagagcaccgagcctcataagtttaaaactgtaggacatcttgagtcaaattaaaatatgatggtcaagttaaaactttacaacttacacagtgattacctaatgaagctaccattaaggcagtatttttaaaataaagatacataattttcattcaagagaagagtcagcaagtggacaatcaaaccttcattatattctcaacattatttttgaatgttactctcccttcttttcagagtcactgtcaaaatcctgcccaataagcacaccttcaatctctagagttatagtttctatagtcattgtaaatcttagggaaagagagaccctcagactgagtttgaaggctgagtgtgaggtgatgcttggttgtcttttccccagctgaaatgcccctatttctaaccatgggcctgatttggaaatatttaatcaaatacttactataagccttcaaaacatagtctttgctaaaacagtcttctgcaagtcccagcatgggagcgggaaagctcctttataattggtttctttgtgcctccctcatgttttctgttttgtggttatttttattcttgatgatttctgccttttttcacccttattgtagaaccaaagtaacatgggggtgaagggtaatggagtcccattaccttgctctaaaaggtagctcgtccctattccaatttcttttctattaggattaagagttgaggccaagcacttgactggatgttgtggaagaatcatttctaccctttatttactttcaatactaataaacattttacctttatggggtctcagccccccaactgtagttaatgccagcagtgttagattctttacttcttgagcctataacttagaacttgaattaattttaccccaaaagttttaaactgatttccatacataaagtgaattttaaatgtatatcattttcattcttaacactgtgttaagatggcataacataacaagtgtaagatacaacctcagtttccaaggaacttaaaatgcagctggcaaaatgagacccattcattacaataatattagcagtttgacctcctatttgagacttatgatccagaacttgttacaagctatggaagcaagaaatcagtgaaatagttatccatccagtgaaccgcagcaatttacaagacataagctaacatgtcagggatgtgtccccagttcctgcctgagaactctagtcaaacacacaaactcaatatggtcattggagctactggt

SEQ ID NO: 32671 - DNA, 1453 bp, Bovine  19866881453878
  misc_feature (1)..(1): n is a, c, g, or t
natgcatccctaagcccactatattggctatagtatggtggtcagttgtcaggcaggcctcatgcttgagtagaataaacttttctactgtcttctaggactttattggtgccaggtcttactctaagttctgggattagcaaacattcttgcgggtggtttctagcttttatcacctaatgatccttttacaacttagagggggcataaagccatatttaccttcccagctccctgccctttgtaataatgagaagtgccataggacaggcacatgcatagtagtatgcagtgtgtttgaggaaagtgcatggtgaagtctaaagactggatttgagtactgatatgtaggaatgtgcctgatagaccaggagaagagagcaaagacatggaggaacaacgcaggcttcctgaagcccaactgtgggtttgtggcagtgataagagaggagatgggattataatagccatatgtggcatgcctataaactttatcctttgggaagtaagatgcctctgaaggattttaaggaagggaataatataattggagttttgttttagaataatcctttaaagaacagtgtgaaggtgaattgcagtggagatggaagccagcaataatggtttttgatggtatctatgaaataaaatatttattcaaagatataagcattttatatatttatatttatgtcaaatgcaatgtaaggtattgtgtggagaagaaaatgtagataaggctcttatctgttctcagctagtttaaaagctggaagtgaaataaggcacacatatgcacacacagacataatcctgaagggaacacatgataatcactctaagaagtacagagaacttgtgaggaaattcagtaaaagatggattccttctgactagcggagagggaaatgtttgcattttctttgcaatcatttaaaaatttttaaaaaataatttctttgaaaaatatatagttttacagtgaaatgtaaagaataggtggggagcttcttaaagagaaatagtttgtaaagttcaactaattgggcagaattttttctgttttaatcgtagattatccagagatatatcagtttttaaagatcaccatgtcatagctaccatttgtagcatttgcacaaaatactgtctctccttccaagtcaatagttggtggacatatttactacccttaaatggtagcaagggcattgttaatttatagctgactgttctcccaggtatggctttatcatttatcttttaatagctcttttttgctcattacctagtggggaagaattttatgtctgtttgtcttagagttttcacagtggagggccatgtttatacctatgtttttggtggtttagcagtgaactcctatgcattttatctagtgtctcatctgttaaatgggcatcagttgaataaattcctataatgctaa

SEQ ID NO: 32672 - DNA, 1822 bp, Bovine  19866881595349
  misc_feature (1)..(1): n is a, c, g, or t
ntactaccacagttgagtttttgacccaaactaaaataagaaaatagtaagttgaagcatatgcttgttaaccaactatggtttacatggagaggcagcagagggtagctggaagcaagacagacctgagttcgaatcccagctccttcactcgctccttgatagatttcagaaaaaattgtgtaatttaaatatctcagagtctcagtccccctcctctgtaaagtgaaacaaatgccctccatgttagtgagctgttttaaagattattaatgtctgtaaaatggaagtgcatgttaaataaatggtggttattatcatgggtccaggactggtagtggaaattgaatattatgacttcaaaagcagtgtttttttaaattatttttattagtcttactacaatatattgaacctatcaacattaaccatgaataattttctgtttttactaactctatcttcctatattgttggactgtattttccatattgctgagtttatactaatatataattcatattctgctgtacctttgttaatgcacttacctgtcttaattgtttcctttccctttaaagacttcagcaagttaaatttattgctgccatgtttcaagagttctctgttggtagaaatccccatgaaaattaagaccggggatagcaaaatgaacagagtaggttcaggttttctgaggttggcttcttgagccctgggtaaatgcagctatcttataccccatttcctctgggtcaccgatgggcatttgtcctgaccgatgatgaatggcctactttgacactttgcatggatgactgttgggaatgaagactgtagttataaaagattcattggttcatcctacactcctaacattgtcaccttgacacacggtgacagtattgcaatgtccattgaccttgttggtcagcagaaaggagaagaaaatgtctcaggatcatctaagacagaaaaaaagagttcaggacttcttttctgtaggatgcaatagctgatgcaactttagttttgtttttcctttggcttccgggaatctgctttggaaaggcagcaaaagccctgtgtgctggtgaggttcagggtcaccaacttaagaagcacatccagttcagagtcaaatccatgggtcatgagggaattggagcagagatttagcaggtaaagggaaaaattatgtcagctcagaagagtggacagttaagaagatattatataaaaagaattatatattatataaatgatattcaaacacaattaaaattagtcactctttgttaatcaccttttttgattagtaatatttcatctctataatatattgagtatgttctattagtggactttttgaaaataaatattttgctggatttgggagtagattaaaaacattctaacatttaaaagtaaaataaaactgacttatgagtacctcggggaactctgacatataaatgataacctaaatttttaaaaaaatgtataactgaagcattaatagaaccataaagtaccataccatataattgccataattgtaagacagatgtcaaagttcagacttaagtgctttatacaaatgaaacagtaaactataataatataaaacatagaggagggctctgaacatttagatatgcgtctttacactcaactaattagtcgctactgaatgtttttgctttgctcaatggcatgtggtacataaatcactgcaatatgttaaatgcaaatggttgttaatagaggaaccatctgctctgtgctgaagagtttgttaaaaagaatgtggtgaaccca

SEQ ID NO: 32673 - DNA, 1137 bp, Bovine  19866881708979
  misc_feature (1)..(1): n is a, c, g, or t
natgtcattttaaaaagatctactacctgtatgtgaatataattctgaatttgctgcgctttatacatcttgtatattaaatttcttgaactgtagctgcaaaattattagtcatttctatttttgttctactgagaaatcagaaaaattccaaccctgattattccttaaaaatgcattaaaacatttatgagacctaaactcaaagaaacttaatcaaattgcattttatgaaaaaataataaggaagacttaggcagtcagtttctgagatatcatgaaactaaaaacatatcacagaagaaaatgataatttattttgtaactttgggatagtcaaatattgattgaagaacttaaaaggtacagttttcaagaaatacctattttggtcacttaaaagattttagacataaaagtataaaatatgaccataccttttagaaaatcagcaaactttttttccccttaacttctcttgggttgtttgatattttaaatttcaaaagtatatttagttccatgatgtttttttttaagtagggaaagttttatctgggataccacacttagataaaaattctagaaatgtttttccatctcaaaataatatagagtagaattagtttgtctactgtttagaaatatgttgagtacatgtggtgtgaattgaacattttctacttactactgtgttttagtgggtaaataatttttgaaatgccttatgatctgcaatcacagatttataaaattaaaatattttattgtgggatttgaaactttgaaaactttacttttattatttaatagaggaaaagcaaaaatagaaatgaatgtaagtgtaacaagtttattatacttaacagattcgatgtttataggttctgtttactagaaacactaatggttttgaattcagcaaagacttctgaatggcttccatgttccacattatagtgtgagactctcaacaatataaaactgccctcctcacactgacaaatctcactgtttagatagggaaaatgaaaagtaatttgccaaatacaatacaatgtgataagtatgtacaaaggtggtacaaataaagacctagttaattatggcttgaatagaggcctctgtcgtaaaaag

SEQ ID NO: 32674 - DNA, 2764 bp, Bovine  19866881720998
  misc_feature (1)..(1): n is a, c, g, or t
ntagaatggtagagtctgtctacctctgctactgtgttgaggattcacttcctgggggaaccacatttgctctgttagggaatgggaagcagcttcccaagtggctcagcagtaaagaatccacctgccaatgcaggagacacaggtttgatctctggctggggaagatgccctagaggaggaaatagcaacccactccagtattcttgcttggaaaatctcatgggcagaggagcctggcaggctacagtccatgagattgcaaagtcagacaggacagagaacacatggacacacacagggaaatggcaacagggaatcctttgttgagtgtctaggatctgtcaagctgaagatcctatatagtgaaggtggctctttgaggcccatgagatagagctccagtgggacttccttaaacttgggattgtttgggggttaggaattgaaaaacttgtgttcaattgtcaagaattagctgtatagtcttacgctaaattcttcaaaatgtgttaactttttccctaatatgtaaggggcagatagttacctgcccaccctaacaactacaccatcctagtcttttgcccattattttttatttactggtttattctgtgaacatattatacctacttggagataggaactatgttttactggcttctatcctaagtgcttatcacaatgactaatatactgaatactcaataaatgtccactggtccagtgagttaatggaaatagctggagagtttcactgtgctaaataaatgcaagctatttgagggaagcaggtaaaacttaatcttgttttcctctccttagggttggtaggtccttcctgttgcccaaatgaccctaaggattcagtaccagttcatacagagtctggacagtgcctgaatgttggtgcatctcacaatctcatccttctcgaagtatcatcacttcccaggggtttgggcttcctttggatcatgtggtgtccagtgtcacactgcttatcatatacagccatgttcacactttcaaacacctgtaaaaaaatcaaaacgttgcctcatttattctgtggtacattttctgtgtgtctgagtgctccaggtttgcatgttaattttctataattacaacagcaaggatcttattatgtaccaggtactacgtgcttatgtgtattaactcactgtatcttcacatttctatgggacaaatgtgattgttgtcccatttgcatgacagcagtagaggaaaaaacagatactaagtattttgcccacagtcacacagttaagagtgatggagcctagattgtagcatgagatgtctggctctacaggccatgacttttcaccactacactgttgcctcttaactgctttagctgtatagctgtatttttatgataatccatcttacttgggggaaacagttacaaaaagaatttttaattctaattataaaatacttacctttacttctatagttaaccaaagttttaactagtgtccctttctgtgcttatactggtaatgagaactttataatacttgtataagacatatattaaaaaatggaatttggaagaatgctttcaagtactcatacaacaaagagattgtggtaggaagttaaaataaacactggaaatttactcaaaactgtacactaaaatgctaataaatgttcaacataaaatatagttgaccctaacacaaggaactcggagaaggcaatggcaccccactccaatactcttgcctggaaaatcccatggacagagaagcctggcaggctgtagtccatggggtccctaagagtccggcatgactgagtgacttcactttcaattttcactttcatgcactggagaaggaaacagcaatccactccagtattcttgcctggagaatcccagggacagaggaacctagtgggctgccgtctatggggtcgctgagtcagacacgattgaagcgacttagcagcagcagcagcaacacaaggaactaatctgtaactctagtttaaactagacctaagttgctatgactgtaccatttgcttaagctaactatcctaataccaacaatggtgacaactgtaaatgtattgcaagtcaaggatcttgtaaagctgatgactttgtacatgtatagttcccttactaagggcagatctcatgtgttgataccaaattttagcaaattagttatacttaagtattttaatacgtaatgaataaagaagaaaaaactgttacaataaacagaactatgctagagtgcttccgaagaccagattttcacacctgttttctattagcatacaaaagctactagtgtaaagaaaccatacattaagcataattgattatccttaagctatgctctgtaggggttatcacaccatttttaagaacaatattaaaaaggcaaaagttataactcaaacagtacacaagacttcttacttcatctataaaaatagagaatgccagtgctttatttgccagagataaggagggaaacatgggtaaaataaatttgataacataactcacattacaaatgattttcctaaattcacaactttcacatttagctgacctaaataaaaagaaaacaaaccaacaaaacactaacaaaaaaattttcacttgatataagtaggccaaatcacatccctctgaatgagggattttattctcaagcgggaaaatattttcattacttaaatattacccaaggtataaataagc

SEQ ID NO: 32675 - DNA, 737 bp, Bovine  19866881980903
  misc_feature (1)..(1): n is a, c, g, or t
naaaacttgatctttgaagaaataattattagagatgcaagttacatgacagggactgtgaatgaattttagtatctgaaattgcttgctttatttattcaaactgattttattaattgatggacatagtgaaattttgataatcagggtttcaccattgcatttattattatccctggaaatcaaggtaaccttggattctacttcctatatttacaaagcgataaatatcctaataggctattaggcacaaatgcagtgctcttcctcacactcctcccatgaaaagctttctctcctcggatctggctgccaccttgcctggagcatgctgcctgccccctgccccaccctccctcctcatgcttgccgctggctcccgacttcctgcatgcagcgctggaatcacccgcagagagaatggcccaccccttagaagttcttggtcattctatcagtactgctttgcattttaattccattcatctggctccaaagccctgcattcttgtatgaggcactatccttgaacagccctggaggtcacaacaggtcccagttccgtgaagagaagatactgccaaacccggagtatcacatttctttgtacttgatagtctgaaatggacaatgataatatccaagattgcagcaaaaaataaatctatatgaaaaggattaatatgatcaaaacaaaggcagcaaaactacatttgtttggaaatcgggagtcacat

SEQ ID NO: 32676 - DNA, 649 bp, Bovine  19866880434528
  misc_feature (1)..(1): n is a, c, g, or t
nggggagctggcatggaactacaattatccgtccctcctgcccctgccttccggcaggccttctcgaaactcaagtcagttttctgagcatcttggctttcttctcatctccttcagtcaacatcatcagcaatctttggccttgaagcggggcaggggaggggggaagccaaaagctgctctcttttttaaaaaaggaaagcctttgcatttggaggactttgtcttgccagggcaggttacactcccccctccatcaccccacccagccgcaataacacaatatacccttggctggatttatggcctccctcgctccccccttgccggggagagaaaaagggcacagccttgagaaaaacaagtatcaagggttgatgtgtgtgctgaactttaaaatgctaaatgacggtgaaaaatattttggaaaagaaacgatcttccaaattgtgctacatagtaaagttaatggagcccatatggcctctactaaaacttagaaaaacaaactaaaaacaatactttagcgcctgccaggctgaaatgtgatctgcttcttaatattcactcaacccagagtaaaatgctttaaaatggtaatgatcccaaagtgcaggctgaactcggtggataaacaacagacctcaaa

SEQ ID NO: 32677 - DNA, 626 bp, Bovine  19866880517715
  misc_feature (1)..(1): n is a, c, g, or t
ntaaagatgagtaataaaataatagatatcatcctgccatcatgaaacaaagtataccaaaaataaaataaaaagatcacatcaaaagcagtcattaattctttaagatgaagagaaggatacatttcagatagaagtaatggtaagtaataagcttttagaacatttgataatccaattaatgagaaatgaatcataagaatagaggaaatatgtaagtttcttgctgatttgacagaaaatactactatgaatgaagataacataaaattcataacatacgaggaaaatgaggacatcagtgtcattgattcaaagagcatttaagatagaaaatcagaataaaacctcaaatgtcctgaaatcttacagctcctctatgaaagaaacatggtagttggtttgcttaggtttgacaattctaaacattttcttggcaatactgctcatgaagctagaaaaactttcctaagctctccacaataaacataaatatttcatcaactatactaggtaaataactgaataatctgttttttctacagaaaatatcacaaaactactgtcagataaaaccacaatcaaaaagtatgttgataaaataacttttaaaacaatgttataaa

SEQ ID NO: 32678 - DNA, 1456 bp, Bovine  19866880557595
  misc_feature (1)..(1): n is a, c, g, or t
nagagcttcctttctacttattacctatttggtccagagttgctgggggaggtaatcagaccgtattgtcacatccctggaactccctggagaacttaagcaatagtaaagcatgtgggatccttatcaacactaactctctcgggtcctcctctcccatcttttgtacctgggcacagccactcaactcggttcagccattcattcactgctgctgctttttatttcaagtccattagaaagctgattctaggaagtacaaaataacataaaaacctgtgtcagcctcccaagtttcaaagcacgacctggggatggggggtgtttaacatgaacttgatctctttgcaaataccagatcaacagcagtacatatcgattctgcaaacttaaaaccattacaagaacccttggtcttcagtcaacattactgtccctatttttaactttccccagaagcaaaaacactaactttttttccctctagattctctacattcttttccttccttaacctcaagtcaggacttttattatttttcacatcaaaaaggtggctttacaaaatttctacagattttaaggatgttaacagaaaaagcaaacagaaatggaaacattacttttaaaaaaatgtattccttcccaggaagatctaaacagtgcaggtagtggaagaatatggagttatttcaaaatgtagcatattggatttaatcgttaattatgagcaccaatccagtgtgacaataaattaccagaacaatacaacaatagatcccagttaccagtaaataaaacaccttttacttcaacaggcttcattctgaaaacattctcctaaacctcttataaacctgataattacactactgtcgagatagaatttttttttttcctaacttttcccccataccacttggacttatctcacatctggtcaataaatctaaaattcagagacttaaatcttaattttctaaaataaagtttataaaaaggcatccatcaaaagttcttataatagactaagcaatcttgagaaagaagaatggaactggaggaatcaacctgcctgacttcaggctctactacaaagcaacagtcatgaagacagtatgttactagcacaaagacagaaacatacatcaatggaacaaaatagaaagcccagagagaaatccacgcacctatggacaccttatctttgacaaaggaagcaagaatatacaatggagaaaagacaatctctttaacaagtggtgctggggaaactggtcaaccacttgtaaaagaatgaaactagaacactttctaacaccatacacaaaaagaaactcaaaatggattaaagatctaaacgtaagaccagaaactataaaactcctagaggaaagcatagacaaaacactctgacataaatcacagcaggatcctctatgacccacctcccaga

SEQ ID NO: 32679 - DNA, 976 bp, Bovine  19866880662537
  misc_feature (1)..(1): n is a, c, g, or t
naaacctgtgtgctattttaatcagtttttccaattaatccaaccattaaccaatacctagtccagatcatgtcatgtaagaaggcttctctagaaattttagagtttaatgagatttgtgtatagtagctcttccccctgtgagatgcccttccatgaaactttaagtatactgtactatgtccgtctttgctaacaatattttaaaccttttcaaaaattttaaaatttgctaaacagtgttttcaacaacacagcaatcacttatcacacaagaaaagagtcatccttggggcttcccaggtggcccagcggttaagactctgtgcttccatttattgcaggaggcgtgggttcgatccctaattgaagaattaaggttccatttactatggcccagccaaaaaacgagaagtcatcctcaatagcagtcacatctataccaatttgaaatataaaaagtgttattttgagtctaagtttatgaaatattactttactatggattagaacaagacacacattctatctggcaacttcaaatcaatatttggcacctctgctgggaattctgtaaaaattgccctttatgttcaaactgacaaaaacagctggatattacaaactcagaactttcttaggaaagatgatttaatgtgtggttaattattcattaagggaggaaggaagaagactggaaaagaagttttgtttcattatttcccaactatttggaatcaaagaatcatgcaatttggaactaaagtgaaacttagaggtcagcaggttatgcttctgtctcgtggcagaaatttcttctttagatcaaatggtccccattctgttttattaccatcaaaaatgaggtgttccccatattggagagaaatatgcttcattcttgaacaactcaatttagaaaattctttcttgctatcaattttatgctgtcatattgtcacctctactcttagat

SEQ ID NO: 32680 - DNA, 3236 bp, Bovine  19866880710369
  misc_feature (1)..(1): n is a, c, g, or t
ntctatgaactccttcgcatattctgaagcagaggaaacctcggattcttttctcaccgttctttcaccccggaaactcgatacacacgcagcaggaagtcatccttcaccagaaccatgaagaaggtacccgggaggcgtctctctcgtccgagatgtagcccaaccccaaagcttccgctgtctctgtgttcttttcacgtgattcatttttcatttgaccaacatttattgagtactgactgtgtttgagaccctaggggaaatgcccaaggtgaataataagatctctctttggttctctgcaactcccagtctcgtggaggagatgagatagatacgcatgtcaataacaaagaatagctataacaggcaccataaagagacgatggaaggggagatgacagccagtgcaggcatcaggttcagcgtcacgaaggaggtgacctgcaggactccttgaaggtctgataagcaggaatgaagtgggggaacattccaggaggacccaaaatggagttagagagcaatctctaactggaattgagagcaatagaatagagagcaatcacgtacctttgatgaagaaagatttcaaacagaccccaaatagggagaataaactaacgagagccctgtgagccatccccctgtctcaacagtgatccacatttcgctgctgtagaaccagtccaaggaggtaagattagaagcaggatgtggaggactttgatttctgggctgtggagcaaagtaatggggagtcattgaagattttgagcagagggtcacatatgctgggggaagaaaagagacccaaaccctgtgaactcgatgggggtccggggggggtctcgtcctcgtgctcggaaggcggcgtcttgccgtgtgtttggtgggaggacttagttcagacgttcaggcaacgctctgctctgtccagttacatggttcttatcaaattactggtagaaaacagaacaaaagaccagaattgaattgtggccccagacagagttccacagcaggtgtttggggacaaaaatagggtgtaaaaaatcttcctctgctccctgttctgttaaactgcaatgtatcaggcctcctgggagcatttcctccacatctttctgcctgaattggaaaccaaagtaattcttttaaatgtatccttcagaccagattatgaggggcctaaaaccctgtgttttttgtttgtttttctagaggcatttccttaaactgatggagcatcccccagagcagcactatttttgtttcattgttggcaaattaaaaaatgagaagttatgtgttttcttaattaacacttcaccaaacagagcctggcttcaggcgacctgaccggcatctctttcgtgtgccaggcatttcacagtgggttccctcgcctccgtgatggagaataaacctgtgcttcttgcaggctccctgcctgtgcctctcagcctgtcttcccccagcgttacctttgctgaatttacctgctgcctctcaatcccagtttggtttctctgctcttttacccttcctgccctatacatttgcatagtagccaatagctactccagagaacaggaggtgagtttactgaagcttgatattagggcaagaagcagagtatgtaggctgcgtcttcaaatacaaaatgtgtatgatggcttgttgggggtggtgcatgcgtgctggtcacttcagttgtgaccctgcgaccccatggactatagcccaccaggctcctctgtccatggggattctccaggcaagaatactggagtgggttgccgttcccttctccaggggaccttcccaacccagggattgaaccctcgtctcttacgcctcctgcattgcaggcaggttctttaccattagtgccacctgggaaatccagctgggggcggggttgtcttttatttgttttctctttgtccttttgtcggttttctctctctttttctcattatttataaaaaggaaaattcctatttggaatttctcttcccctttttatcctcagctgtgattggtggccgatggcctcgcctcatgacaactccctcctcccctcggcctgacctgactcctgagcaggtgtgtttgttgttctcattggcaggagccactcggtagggaacgccagcccctctctgagcccgtctcccaccaagaaaatacaaatgcactaccaaacatgccctagtgagccatgccctcaagtgctgtgctgttggcagtagtgagctcagcaggtaaaaagatggagctaaggaggccaaggtcaagggctgatcaatcgccctgtggaccagatagctctgcttcagacctgcccttaaaagtagccccttctcagagatggttccttcaagctgttggccaggaatcatgatcgtgctacctgccctgctcctccacctgctctcacataagcaggtggacacacagaaaggagcctaggtctgtgtcagatgggatcacgtgagaagagctgtactagccacaaggtgatatgaggcgcctgccggcccccagaactccagatgtatgggtggatttggcgacagaaagggaccaactggagaggtgaatgatgtgtacaagatccctacctccaaccacctttcctttcttttccatcaaaaaaaatatatatccagcttaacatgagttggccctaggatcaatactgttatatcatgaatgaaaggaaaactgttagttgctcagtcatatctgactcattgccaccccatggactgtagcccccccgccccaggctcctctgtctaaagaattctccaggcaagaccactggagtgggttgccattcccttctccaggggatctttgcgacctaggcatcaaacctgggtctcgcatgttgcaggcagacactttaccgtctgagccaccagggaaaactggtaacacattaatatgggcatgtgttcacatacagaaagatctgatcttgcgggggagaaagtttgtgaagtgaaattataagcatccaatattacatccctaatgatttgtgttacataattggggttacagaacaatgtaaaagtgtgttgctgttgacttgacacagagctgagaatgaaaaaacaggacactccagagagaatcaactcagcccctcaacaggctggcaccgtgaggcatgcagagacatggaaacacaaagctttattcactcctccacccca

SEQ ID NO: 32681 - DNA, 3115 bp, Bovine  19866880877128
  misc_feature (1)..(1): n is a, c, g, or t
ngagcataaagaagagtcgaagaattcatgttttcgactgtggtactggagagaactcttgagagtcccttggactgcaagaagatcaaaccagtcgatactaaaggaaatcaaccctgaatattcattggaaggactattgctgaagctgaggctcctccaatacttcggccacctgaagtgaagagctgactcgttggaaaagaccctgatgctgggaaagatagatcaaaggcaaaatgagaaggggaagatgagatggttagatagcatcactgactccatggatgtgaatttaagcaaactccaggagatagtggaggacagagaagcccggtatgctacagtccacgggttcacaaaagagtccagcatgacttagcaactgaacaacaacaaaaccattcaataatgcaggcagacctcagagatgctgtgggttcggttccagatcactgcagtaaagtgactacagcaagaaagtgagtcacacaaatttttttgtttcccaaagcctacagagttacgtttacaccatactgagtagtaagtgcaatagtactgtctaaaaaaaaaaagtatacaccttacttaatattaaaatattgctagaaagaatgctaaccatcatctgagccttcagcaattcatagcagtaatatcaaagatcattaactacagatcctgagaactaatacaataattttgaaaaagcttgaaatgtcatgagaattaacaaaaatgtgacacagagacaggaactgaacgaatgctgttgaaaaacagtgccaacagacttgcttgaagcagggttgtcgtaaatcgtcaatttgtaaaaaaatgcagtgtacacactgcaaagtgtgataaagtgaagaacaataaaatggggtacgcctgtcattttaagtgttatctcttatttccattgttattccaaataaagccaaaattgactattggtcaagtttagataaggaattataaatcatactgttacattttaaacttacttaagtttagaaaatgcctgtgtattttatttctttgaaaaaaaatagctagaacagacccaaagtagatttggccatgtatcagaactcacttatcattgtctccatgcaggctaatattctgctagaattctccctaaggactcccttttgctcactgatgggaaaaggggggggggtgtcattttaacttagaacacatattttcatcatttaatcattttgctggtgggaataaatttaaagttatccaactggatgtgtcatttacaggaacattactgagtaccaaaagatttattcaaatatttaattggaaggaactacatctggaataagttttattggaattcttataaaaaggaaagtaaatccattagaattaatatcataaacagtcaactttatctggaaccagaaacattagtgaaatggagcctaggaatcctaacccttcttctctgtaaaaaagccagtcgctttccaatttatgtggcaattattctttattgctttaggtagagctttgttttcatctaatggtttagagacagatcactcaggccaccccatttgtttctttgccccctttctctttaaagaacaagcaaaaagaactcagtaagaggcatctgcctgtcttcaaaacacttgaaaaatcctgcgaagatcagaaagtcatcagaaactcgctgcagtgaggccagtagtaactacacgaattaagagatagctagtgttctccttagatgtcaacgtagatgccattgatcaaataatcaagcctcgagtaacgttttctgcggagggattctaggagcattctgcccaagagggccaggcctatggcaagaaagaggaccccaaagagcacagtcccaatcaggagccactgctcaacggcaaagccttgctggcttcctggagcattgctcagggaggggtcgcctggactggccttcccattctcctgggaagctgtcttatttgtggcaggagaatccacatttgacaaaggaaatgtaacagaggccccggcatcctccgcactccaagtcagattggcgatgtctcgaaagggcactgcggcgggtgggcgtcgcgagtccgtggatgccctagagagggaagtcgaagccgcagttgtggtcgtgctagtgatcgtggctagggttggggcggaggtggctctctgaggctgccaagtcagagatggcatcactgccatgttggtggcagggagggatgcggagagagacttcggagtggccaggacggtgtgcagagaagacaccgccatcgtagaggggaacgccgtcacattttcaggcagcagattagctattgctggtcctgaggaagactgtgacgtctgagagtggccttcttctttataatcagatgacggtgggctctccagatcaatcttgagtagtttctccaagtgatccgaggatccagacgtctgagaaaacgaatctctccataagaccgtgggctctgagtcatgggttggaggttggtgagtgggagtgatggcatgggaagatccgccagggaagatggagttttcctgagctacccctgggtttggcaaatcagttctggccaaagatgggaaacctgaaaatggaaagaaaataataggaagacttcggacattttcatatgaaaggaggacagaagagacaaatgttatcagcttattcaataagacctcagactgttgctacctgatatttcatggtatgtgcatgggagctaagtcacttcagtcgtacccgactctttttgaccctatggattgtagcccatcaggctcctctgtccacgggattctccaggcaagaatactggggtgagttgccatgccctcttccaggtgatctttcagatccagggatcaaacctgaggctcctgcattgcaggtggattctttaccaatgagctgtcagggaagcccaatatttcatggtgcaaggacctggcctctcctgcagaagctctggtttatttctagagtgatggcacacaggtttatttctaaagtgatggcaccttccttctagaggaaggaggaggtaggaggggccagcaaaga

SEQ ID NO: 32682 - DNA, 1209 bp, Bovine  19866880892549
  misc_feature (1)..(1): n is a, c, g, or t
ncaagcctccagaacttcatttgcaattcggctgctcctttggcaaaaggtcccctgtgcagctgttccacccagagagcctctgccaggtaaactgcacgatgcctccccaacgccagcctgatggctacagaatgtcgctcccgctcccagcattcctagctccgggcaggctctctggccagagttacagtgggcagcaggcgagggagggagcccaggctcaagcagggagcactggcctgctcttcctcgcctggttgaggcgagccccaaaacgctctctgatctgagccctctgccagttctggaaaggttgggcttgtcagaactccaaaaaagagcaggaggctacttagctatagatgaataataattgggcctttgtctaacagcgactgtgctgatgaataattaaaatttttattacaattgagaagcactctgcccacatggatggtcctgtgggctgtgccaggggaaacacaggtaatgaaagagtaccttccaggttctgcagtcacagtcatcattgtgtttaagatggttggggtcttcagaaaagttatgcgttaagcagacccaaacactctcttcctttacacttcttttcaggatctaataagataaatcagttcgagcagaacatgggcatgcaaatggctgaagtagctagaagtgaaaaccaggaggcaagagataaataggccattagccattagccagacaagtatccttgagtcatagccgatgataaggatggtgataatgataagagggcacagctggcgtataatgggaggcaaactgacctcaggagtcagaacacctaagttcaatagcttgcctacttctcacctgtggccttgggcaaacttaactctgcagacctccctttttgaacctataaaatggggaaaatactactcggtccttgtgataccctgagggcttaacaaagtagtgttaatgagagtatttggtgattctaaagacagcgaatgcaagtaattatagcttacaaatcagaattaaaggcaactgagtccaatcagcttgagttgtgataggctgagcgaatcaggattcagaaatagtggaaaagaaaatctgtagtatttggattagatatgaaattactgcaaaaattctatagggttcaacttaaatgcattaaaaaggtaaataaatccctctcgtgttaaacag

SEQ ID NO: 32683 - DNA, 1726 bp, Bovine  19866880903952
  misc_feature (1)..(1): n is a, c, g, or t
ngagagctgggcatgtccttttctgttgctttagggcctctgtttcccttctcccctttgctctggctgggcgccagctctcggttttctgagctgagcctgcagaagcatcaccaaggtcccctgccccataccaggactaccctggtggcagctggcatcaggctggaggcaaggcagaggcagtggggaggggcattctgctcacatctctttctcctcaggtgtcttttgtcattactaacccccttccaagatgctggtagaattctaatttcctaagctctccacattgttttttgcatttgtctttctatataaggtttccttcaggggaaaggatacaaaccggatctcacggtgaagcctgagagagaggtgcagagctcgagaagcagggtcatggatctgagctatcgtgatgtggatactaaactattgccagtcagtgaatgatggtgtcaaaccctggcatgactcagaacacctagcagagatgggctaagatctcagagaggaactgtgggcagtgtttacgatgccctgtccacacggtggtgagatatacctgctctgagaaagaaattttgtctcctggtcaggtttgagtgatcatctgtagtttgggtccaaaatactggaatctctctcttttttaaacaaggtttggtttacaaagccaggaaaggataaaatgtttaaaattggagtggaatctacagaaatgatatagatgatcttttttgcaaaacagaaatagagacacagacatagataacaaacatatggacaccaaggggcgtgggatgaactgggagatggggattaacatatataccctactgatactatgtataaagtaggtaactaatgagaacccactgtagagcacagggagctccactcagtgctctgcggtgagatctaaaagggaaggaaactcaaaaaagaggggatatacgtatatgtatagctgattgactttgttgtacagtagaaactaacaacactgtaaagcaactgtatttcattaaaaattattaaaaagaaataaagttggtactactctgggaagtcacagtagacctgaatttccttaaaaaagatttaaatataacaaaatagatacaacataacaaactctagtgaagataattttatttttctttgattcctgagtggataatgcaggatattacagaagtttgaggtcactattaaaaacatcagtcgtcactgtactggtgaaatatataacgtgccagttaataatagctttacaaagtcacagaagatcagataatagaggttttactgtaactgggttcataatagttgaaagaaatcaatgcttttttccaaaaaagactaaatcacttctaggaaataactcatgctctatgagaatagggcagggtttacaaggaagtgctcagtactccctggaagaaaggtattatataattgtaagttgttcatcctgtgcctgcggtcttatccaccatgcatccagcctctccttaaatggagtggaagatttctccagcctttcctacatccaaggaacaacatgcaacttggattcttaaaagaagaactcttttaaggtcatgttcagaaggacccttttgcttacaggaatttgggctggaattagagttcttagctctgacttgaagaaagagagggaggaggtgatgaaaggagggagggagaagagagagag

SEQ ID NO: 32684 - DNA, 962 bp, Bovine  19866880944554
  misc_feature (1)..(1): n is a, c, g, or t
nttccagagggcagtgttaccaaggaccattgagtgttgctgatttcacttgttagcatcagaggattctggtttggtaacctgaagcatccatgtgtgtttttttggggggggcaggggactgatttttctggtctcttctgaaggaagatagggtaggatttgagagatttaagcaatccctgtccctaaccacatgctgactgtaaattcccaagaataattagtcaccccaccccaatatttactgctcccagcttgggtagctggactgaaccccattcttctgaaattagtccttgtttcctctagatcatgaacagttgttgttcagtcactaagttgtgtctgactgtttgcgaccctatggactgcagcacatcagactttcctgtccttcactatatcctggcgtttgctcaaatccattgagttggtgatgccatccaaccatctcatcctctgccgccccttctccttttgccttcagtcttccatcagaatcttttccaatgagtcagctctttgcatcagctggccacagtattggagcctcagcttcagtcctttcaagatcatgcacagaaatagcctcaaatggggcactaagatttcaatcctagaaatgcagaccacatgtgtggatcctggatgaagagctctgggtatgtggtgggtacagataggatgcctgtgaggaaaatcctcacccatgcagggctgtgcagagaacatgttgtttgatcagtttctgctggggctggattctctgggctggagtaggagctttcactataatggttcacttcaaacaagaaggggaaggtttgcaaggggatagataacagtcactttttaaaacaaaagatatctaggtaagtgttggcgaacagcatgctcttaaaaaatattagagggctatcgggtaattatgtagctctacttggcactccactccagta

SEQ ID NO: 32685 - DNA, 1838 bp, Bovine  19866881037651
  misc_feature (1)..(1): n is a, c, g, or t
nattttatagcagttttatataacctcaggaggctttcaataatgtttctggacaagcctggtgggaagtatcagaaacttaatatggaagagccatccaaagataaggtcagacacagcacatctgaggactcagcctggaggggatgattagtgacttcagatgtcgagggagaagttttagctacaggataaaagcggaagataggctgtggatgctacagatcaccctgcttgaaaagatgagcaataatgggcagaaaagtagtcagaggtggaaggctcacaggcttccagtagtgatttcaataagacagaaggaaagaagagcactatttgtgacaagggattagtcatttttgaggaaatgaatgtcgaaaaccagactcaccccaaaacgaaggcttctcagtatggaaccgggtatgtaattgagttaagtgttcaattgtagggacgcttggagatttttggctctttgatggcgagactgagctcagagaatgagtcagtctcagacaggggaaggagtcaagagggttccaaacaaaggcaaagctaaaggtttggaggtcagcatgagctgtgacttgcatcagaaaaaaagactggccggactggaatagagttcacgctcgtaaacagtggaacacaggagtttcctgggttgagacgacagagaggcccaaggagcaggccaaagagtgaatccttgacaagtcatcataggcttttgaatgtggagtgaggacagaaaatgcctgttctaagacaggtcatatggtaccaggcagactataggggaagggaatggtgtgtaggctgtggaaagggccttcctaccgtaaggatggaacttttgcacccaggctcccttcctgaaccatggtcatggtcagaatgtgccactgatgttaattccatatgaacccagtgaccaagaagatgaggcttgctgcaggcacccagctgccaaggaagacagaataaagggagtgaatggctagcatttagggtgcatcagtgataacgccaagaaatgtctttctcttggcctttctaatttcgaaaagctccattgtctggccctgttacccattccatccagcatttaattgtatccttcaagttagattcaagttttgaataccatcacttgagcttatagtctgggatggagatgggtatatatctcccagggtcctctcagatggttgtgcaggaatgcactgcctgctccatcttcttcaccatcctcccagccttttttatagttattttgccagctttcaagcagtgagagcctggggtatctttttctaagaaaatgctaggttagcattaacgaccaggttcagtagccttccagctacgtaaaagtgacgggctcctctttttaaagagttcaaggtgaagacagctttagggaactgtaacctcttcatgccaccgtttcctcttccaaaggtttatgaagaccccagatgaaatcatgagtggccgaacagaccgtctggagcaccttgagtcccaggagctggatgaacaaatataccaagaagacgagtgttgaaggaagtggttcccagcttagtgggccagcagccaagggcaccccccctccccaggatggatggggcaagatgaagcagaaaaggagagacatggatgtggcagtaacactcctctcgcccagcgcgagggatcccgcggagcaccttagacaaaccactcagcaaagacggcgctggaattctggccgagggcaccagcctgggactcgcgttcacggttccttctcgatcggaatctcttgtctgtgattcctccccctcccc

SEQ ID NO: 32686 - DNA, 2135 bp, Bovine  19866881072570
  misc_feature (1)..(1): n is a, c, g, or t
ncatcagttctttggcgctcagtttttttcacagtccaactctcacatccatacatgaccactggaaaaaccatagccttgagtagacggacctttgttggcaaagtaatgtctctggttttgaatgtgctatctaggttggtcataactttccttccaaggagtaagcgtctttttatttcatggctgcaatcaccatctgcagtaatcaataaatgtggttttaatacttctgttttgaaataaccagaaagaaatgaaatcaggcctttgtccttattcttaacaaatctcagctggtactttgaaatgtaaacttgaaaatgtgataaaagatgaaacaagtagcgttttgttcattcttctcatgagaaaccatttttttgaagtaattttaacccgtattagaatttagtttagctggggagggaagaaagctcaaatggaaaacatttgtttctggttctaccgagcctgagagtctagggcagcatcgaaggtggcaggcaggtttgagaggggatggaggtttaatttaaatttaaaacaggaataaattaactttgttgtgggctgtatagtcaccaccattaaattctaatcctgcacagtccactgtgggagtcagtggccatgtatgtccacagagcacctacagtgtggttactctgaattgagatgcttaaagtgttaaatgcatactgagaagactgtaaatattagtattaaaatctcagcaaaagttctaaagattacattttgaagtaaaaatattttggatatacttgaataaattaatatatatttttttaaacttaaaaaaattctggctcctagaaaaatttaaattacacaggactcacatttgtgagttgtattatactttgttcggacagcactattctagactcaactcagttgtaaaaagctacagcagtcaagaatgggaagatagttaaggggagtagtcaaggggataggtgtgcttacaaagttatattgaaagtgtctttagcatatcttagttacactgttgaatttgaaatagagctgctacatctagctttaagttagtactgtatttactcccagtaccccccctcctcgcccccccgccaaaaaaaacccaaaacaaaagatttttagttttgcctttcaagtgagagaagaaggaatagctagctagaagggactaatgttctaatgtgctaaagctatatagaatccttagctgtggcttttagggaactgtatttgagtccttggactctgctattctaaagattatcatttgttgttttgccagatgttgctaaaagttaccttaccttttaacttttaagcgtgtcctttgcatgtttttttcttttttctgagacccttgcttgcacttagagcagcattaacactgatctaagcctcagttttgtcaggggatcagagtaaaggtcagcaaagcactcctaacctgcagtccttatgtacaattctgaaatctaaaaagctctcaaaactgaaaattgtttttgttaattaagttggtaaagaccctgacttgaagtagtgtaagaccaattgtagtctctgtttatgttcctttgtgggaatatgtgtatgtctttcagcaaaaatattattatgcttggcaatgaagtgttgccctggacccaggtagaggtgatatgctgtgtgcattgtgttaacttttctatatttcaagaaaaaattctgaattccaaaacagggctaattaaccccaagaaaagggattttttggacctctattattctgtggcttcctaggtggcgtggtggtaaataatctgcctgtcaatacaggagacttgggtttggatccctgggtggggaagatcccctggagaaagaaatgacaacccattccagttccgttgcctgggaaatcccatggacagaggagcctggtgggctacagtccatgggattgcaaacattcagacccgcacacacagacacattatcatcccatgaaaattgaaaatattttattaactataatacttaagttttgggggaaggggctgtgctgggtctttgttgctgtgcaagctttctctagttgtgatgggcgtggactactctccagttgcggtgtg

SEQ ID NO: 32687 - DNA, 837 bp, Bovine  19866881116907
  misc_feature (1)..(1): n is a, c, g, or t
ncagggaaaacctgtcgcgctgcagtccacagggtcaccaagaagtctaacaactttgcaactgaacaacatcacagcagcaaaagctctgagtcctaaccactggacctccagagaactcccctccccgttggtctatactcctgccttgcttcttgtactaagataaactttctccccagacacttggtgatgggttggaaacataaactcaaacagtgcatgtggcatgttttcctaatgaaccaaactgaaacaaagacttaggaagagtaagggggagttggattttagacttgaccattaatgtcttaatattttaaaaaattttctaatttaaaatgctttccaaacaaacaagcatattttcatggataactataaagttcagatcatttctttatcagagatgacacaaaattttgcttccaaaagctctgccccgggcccccaggagtatctgttcacttgcctttgacattgggaatttctagatggaaaagcctgaaacaggctgctctgctgtgcagcactacaaagaacaagtctaattcctctcccatgagaccactgggtgaaattttcataaaatcttacagctggaaggagactcagaagttgtctaaatgtatctttcttcagcagcaggcctgacagatggacacccagcctctcctggagcaggctcagagcagagaccacatggtaaacgctgccatcccatcgccggccagctcgaaatgttaggatgttcttttcttaagccgagcaacatgcccgaaggcctgggaacgaggcagacctgagctgggcttcaggatgagtcacttaacctca

SEQ ID NO: 32688 - DNA, 838 bp, Bovine  19866881170903
  misc_feature (1)..(1): n is a, c, g, or t
ntaaaaagtcgactgttttttatcagggaaatcgtgtggctgactgctaggcatgggaggaaggaagaggctgtcttttccatcatcagtcttcaccttcaagtcacctgttgagttctaagttcagccaagttgtagtggaaagcagttatgacccagcggacccagccatatcggggagggcttccagaatacgatagaaaacagtcagataacttccctggtcccctccctctcttccctctgtatgggctggctttcttagtggaatgaattctctttcttactctctaggagactcccctctggaccctgagctccttgggttgagtggtgattatctttttgtgtctggtgcccaccttggcatctggcttagatatatgtgtcagtcacattggctgacttgcagtgaggcatggaaggtggtcagggccccttcctctctgtcctgtgtgcgtggagtgacttaacgctgcatccacaagctggcatgaagtggttgtagagtcactctgctgactcagggaggcctggggcactccctagggcatcatcagtagaattttgaccttataatttttcttactttggtgatattttcaaaaactgctttagtgtctaaaaataagcaaaaacgtggagttgagtaaaagataaaggggcttgaggaatcactggagaaggtccagctgaggagacttctaaagttttcactgggttctttagcaattgaattaattagagactcggagttgggaggctataaagatcacctgggccagcgtcttttatggcaaagaggtccacatggctaaatggtttgcttcagctgata

SEQ ID NO: 32689 - DNA, 1291 bp, Bovine  19866881249013
  misc_feature (1)..(1): n is a, c, g, or t
ngtacaagcaaagttttataatgtgagctctgggtgtctggtgcttcactgatgcttgcatgcttagatatcttattctaaccagactcagctgtctaaagcctcagaaattaaaaatagcctcccagtgctagctgtggaatcaaaggagagatactcagcagagaggtcagcgttgctcatggcacctgactctcaaaactgtggatttcattgcacctatgtgtttaatctctcgagatcattttagccttatgcaaaactgttgcccctttgttggggctatgcagaataaaacagtcatctcggatttgtgggcatcagtttcattaggagtctggatgttggcaggagagagccattattttccttggtggttcccagagacaaatggtaccttgttatctccccatgcagatgtcagtggtattggctattgatgcatacatttatttgtcttctctctcccacttgggagtaaatacttcaaaggaaagaaccacactgtctatgctcattgtaactgcccacaaaacttaattaagcatcttacacatcttaacatgttttgcgaccattgaatggaccaaggcaatatttcactagtgttcatggcccccctctagaaaatagcataaatactatgttatttgcttacccttccattgtttgaggttctgtgttcatgagttgtctagagtaaatcagcatgcgcacatttgtgtgtgtgtcattggatgcagattgcattgatgctattttttttctttaatctcgatgactgcttccttcaaattgaacctcagagtgtaatatttgtaaaaacaaagcaagagcaattaaagcagaatatatttaaaagataaatttaaacatgaataaaactggaggggacgaccctgaaattgatgtccaagagctctgtctgtccgttggtggacagggtgcccccgggcatggcctaccttatgaaacttcttgcctgcaattccctgcccttggaaccggagccttgttagcagcagaacaccagctgttctggcccaggtagtgactcagggaggagggacactctccagggaaatcaggccaccacatgggaagtcttggtgccaaagtggaacatcttgagttacagttgggagccactgcaggttatacagagttgacttcctaaagacattcactgaggacagtgcctggcctatagtgagaacccaatgatcactggccaaggtgcaaagaggcccccgcccttatctgtggctcaaattcagaaagccgaggaaga

SEQ ID NO: 32690 - DNA, 1702 bp, Bovine  19866881259847
  misc_feature (1)..(1): n is a, c, g, or t
ntacttccttctccatgactggtatgttttgcttataaccaccctgtatgtacacagatggacttggctgctgtcctagtaaaaccatagtatccttagttaccaacttgcatattcatttacatggcaattcctgtaaacctgcctcttaagaaaaccagacaaaatgaagttaattatcgaaggaaatcaactgcaaaaatatccaagccttaattctaagtagagattacagaacatgtaatctctaaaacaatgtaaactctgatgggggtctgtagaagtggtgaagcaattgttcttacatggaaaaattactgggttctgtataaatgcaattgtactcgtaagcaagataatggaatatggcttcacatttactaaattgttgagccattattgggctaacatttagtttaaagagtattttttgctagttaaagggaagtaaaggtgaaactgagaagttcatgagcaataaaacttgatgtttaggagaatatgatttcttattcacagtgtataattttgcaagagtaaaaaatatgttcattctgccacaaaaattcaagattgcctaaattttttcagttagaccacacaaggagaactttcaaattcttacaaattctccttccccatgaatttttattgactgactaaatcgacaggaagttctccattttatccggttttaaaatacacatttttctctttttctatacatgaaatttatgcttccttatatattatttttcctttacaatttaaattccttggagaatgttttaagtataaaatctatttttataaacatgtattcattatctcatgaagcaagatgaactatgaaagcaaaggtccacatactctttttacaaagggccacagagtaaatattttagactggcaaatctcatacagtctttgttgtatatccgtttttgttagcttgtgggccatgattcatttgacctgtgggccttagtttgctaagctttgaaaagccttgatttcagggcttccctggtggctcaatggtaaagaatctgcctgccaatgcaggagacacgggtttaatccctgatccaggaagatcccacatgctgtggagcaattaagcctgtgtgccacaattattgagcttgtcctctagagcccaggaacctcaactattgagcccattcattccaactactgaagcccatgtgctgcaactgctgaagcccacatgccgaagagcctgtgctctgcaacaagagaagccacctgcaagaggcccatgcactacaatgaggagaaagcccatatagcaatgaaggcctagcacagccaaagataaagagattatttttaaaaagccttgatttcaaaattttacacgtgtataattataatagaagtacaatgcttctattgtatattatttgcacacattgtatattacttctattatatagaaagcagtgctataaaagagaagtacaaattgtgtccatatgcagaatttggtcctcttccagcgttcttcctagcaagggcatcattatccatataattatgaagtcagagacctcagaatcatccttaatatgaacctctcccttcccttgccccttgtatttaatctattggccaggttcggtccattttacctcctaaatatctctcatattgactcttctccgttgctgccatactc

SEQ ID NO: 32691 - DNA, 914 bp, Bovine  19866881287180
  misc_feature (1)..(1): n is a, c, g, or t
ncaggcagtggttttacccataatgagaaaaatcattcacataagctttttagactagaaatagatgaacacctatttctcatgtaaatttaactcagaaatcttctggtgagttggaagaaaagatgttaattcctataatcctaaaggttgattaaaatataagacacctctggcaacccagtgaagagacaagaatatctgcatcagatcaccatcaactcaaaaacccttataaaagtggttttaaagtgaaaaagcaagaaacaaacctcaattttgtctgttttggcatctccccagtatattttgccttcatcataatccaaggctaaaccatttggccaaccaagagaagtgttaaccaacactactcgatcagaaccatccaaagctgctcgctcaattttcgggatttctccccagtcagtccaatacatgtacctacagaagtatacagagtatgagctaaaaacggacaataaactgtaaatttcagatatcctgaaggtgagatccaacccttttgtacactggttaccagttaacatctacagaaggaaaaacaagatttaaaacatacaaagagtctgtttaagacatttataattgcagtgtataagcttgtaaaaaattttttcagatcaaacagtgttttctaggactgataatgaaaaatgccttccaataatgagattctatgtttaggtttttttgtgttccttaccaggaacaatcttctctctcttgctagcttattatctctgacaaaaaaaaaggttatcccagtagtaatattcagatggaaaaccaatttccccaaataactaactcttctcgtagcactgattcttgtggctccgaaagtttaaggggctcaaaggcattggcatgcacgaagtgtaataatctgt

SEQ ID NO: 32692 - DNA, 1090 bp, Bovine  19866881317742
  misc_feature (1)..(1): n is a, c, g, or t
ncaagacttttctcatccagaggcatataggccaacattgctccaatttgtgcaaatggtctgaacaaatgtggcactccatacacctgggacgtgggtgcattagagaggtctgcaaggatttcagagtactgaaaatctctcaaatttgtagagaggctgagtgcccagctttacagtgaagtattccttttcctttctactgctgttgctgctaagtcgcttcagtcgtgtccaactctgtgtgaccccatggattgcagcccattaaacagcaccctccttactatttgtgtttccttgagattcctataatttgcataatcttctagaatggaatccacattcttgttggcagaaagataaaagagctgttttttgccaggtaattaagtcccagtcatcaaaaacccatagttttagttcttcaggaacctttactttaacttcaactctgtttgtgaatgtttcctcattttcagcagtagtagctacttgggctcttttctcctgaggagactgaggtgtctcactggtaccttctctatctccaggtgttttgtgtttgttcttttttgttttcacttcaacatttttctgttgcagaccagaggtcttctttccaggggcagcccctcttggtcttccactctgcatactgctcctgattggctttttgaagttctcattgtttctgcagattggtgcccatgtatttgagtaccctcctttggaacccattcatcccaatttttattccaaccactgtaatgtatttcacttgtttatcctttatggccaccttcacacaatttggttcataaagaaaagccccctaccctccccccaaaaatagaataaaataaagaagaggcccatgaaagcacaacactctttcacactcctggaatttaggcctctgatcctgctttgtcaccatttataagtgatttgccaccactgcctcctccttctcccagccacccccaccagcatctgctactccataccacccaattccgcatgagacacaccttcagacaccaccagctctagatcctgggccggtttagctcaacatttttcaggg

SEQ ID NO: 32693 - DNA, 1097 bp, Bovine  19866881319744
  misc_feature (1)..(1): n is a, c, g, or t
nagagtttgtggggtcttagttccccaaccagaatggaacccagggctcctggtggtgggagcacagaatcctaagcgatggaccatcagggaagtccctccatttcattttcaaatgatggatctagctatgtttggattccagatatatttctataagtttctggtttaaaatgtttcatttttcacagcctcccaccaacaagtatgtacctactcctttggcattgccctcaagaccctgtttttgagcctcctttccaagacatctacccggcctctgtatacccaggtatcacttgtgaccttgtgatcttgcccccacccccaaggtcaacctaattttcttcacaacacaattttgcttctcaccattggccctgagcatctttgccatctggcctcattcctaaggttcttgctcagagaggtcaggtctgtagaatatctgcccttcgtcaacctgatacatctgtagtctccaaagcatctggcttcacaacattctagccagcactaaacttaagagtgggttctacttcaaaagttcatttgtaagggacttatttagaactcacgtttttctcttgaagtagtattcttcatggtggtgagttttgccagaccagtccaggagagcccatttaacttgtaggggtaagctgaagtaccagcactgtggaatccttaggagtggtaatggtggtgtagaataccatcacagtgtagaacagtgcttctatgggaaaatatgttcagaattccaacttggaatgctgactctcctgtacctgtagttagactgggaatgcctctcccctctatattgaaagaaaaggaaaaaaaaaaaaaaaaaaaacccaatacaatttattgagagattactatgtaccaggcagtgtaaactcattatgtgagttgtattgtttcatccccacagggaccctctgatggagcagtgtaggtactgctattattccctctttacagatgagaaaatggagaccagaaaagactaatcttagtgactttagacagagattctaaaaaaaaaacaaaaaaaaagagtactgggaatgccaggaaaggaacttcaa

SEQ ID NO: 32694 - DNA, 1870 bp, Bovine  19866881346681
  misc_feature (1)..(1): n is a, c, g, or t
ntgtgcttctaaccatgaagtataaatcagaaagtcctaccaccttcttcttcctagggtttgattcacatgctatagtggctcacagaactcaacaaagattttacgtactagatcactggtttagcataaaaggatgtaactcaggaaaagccagatggaagaggtgaagagggcaaggtctggggaaagggcaggagctccatgccccctcccagcacctccacatggtcaccatcccagaaccctctctgaacccagtcctcttggatttttatggaggcttccttaaataggcatgattgattaaatcattggccatggattactgattcaaccttcagcccctctataatgaataccctctataatcacaggactggttcccctggcagtcaacctgaatctttaagtgtctccaaaagccacctcattaacaacaaaagacatctgtaccacactcagtacttaggaaattccaagggttttaggaaccctgcgccagaaatagggaccaaatacttactgcttattataaattacaatatcacatctcctctcagctactgttttcctcttagtgctttgttgcctgctattatccccttcaatgtatttctctaggataccgcaacaggcactttctccttcttattgcatcccgtgggggaaacgggggtggggtggggtggacggaggtgggtgtgaccacaactgtggcgaaaaacacaaaattcacgttaaagcgagagttgcttacatagtaacagcggtttgtggggcccaatcccagagttgagacttctggaccgaactacatatgccactcttgctaacaaatgtttgcaaacaatgaactttgatgaccaaaaaaaaaaaaaaaaaaaaaagggtttagtctgaaaattctaaaaaaggcttagagctattctttttcaagtgaatttcatgttttcctttcataatcctttccttgatttatgggtgggtgtattgttgatgatcatcaggaaaggccactgcaggcttggaaagagaaaaacatatgctcctattattgggttgaccaaaaagtgcgtaagatgttacagaaaaactcaaacttttaaaaaagggaaaacaaattatttatttggctgtatcaggtccttgttgcgacatgtaggatctagttccctgaccaggggttgaacccaggccccttgcattgggaacatggagtcttaaccactggaccaccagggaagtcccttgaatgagttttttggctaatccagtacttcagaatgtgctaaggtacctctggttcaggaagttaactcctacttttgcaaaacttcttgggggcaagactaacggcgattggataccacctgccattcttctgttccaaaaagaaaataaaatctgtgagtccaatcaaacagccattaccctagtaagaaaaacacccctggccaggtgcatcgtggttccctggaaaggtggttagtttacatagatacatggaggtaaagcctccccctctttaaatatgtgttcctgcctggcagtgactaaaacccgaaatgggttatttggttagtctttacatatgattttattatgtgactactattttttctctctcatccacctttcaacaggttcagaaatgaaaaaaaaaacaactttcatttctgaggtttcacggcacagctgtcaccctaatagcttggggccccacctgctcatgactaatgagccctgcacacttagagatccttgccagagccaccgcttcctaagcggaagcctggccacggaagcctggcctcgcacgtgttcattgaaagcccctatgaatctaaatttttcttcactctaccaa

SEQ ID NO: 32695 - DNA, 2377 bp, Bovine  19866881364570
  misc_feature (1)..(1): n is a, c, g, or t
nctaaagctgggaaccatcactatttaagataactgttttcaggatataaaattcttttagagttagggagagtaatgttaacttaggactttccccctatgaatagaaaggactcatatggactccttgagttcaggaaagttgcatttaatatataataaaggtgtgaaagcaacagcaaaaatgattaggtgtaacaaagttgaacagggtgaggataggagttcctgagatgggagagataatcaagggtgtcattgtctccacatgatgctatcagacttttttggttctaggcccattttcatgagtctaccgagtgatggctcccatgatctgctctagtatttttttttttctcctgctgagaacatgactctgattcaagtaccattgttcaatgagaaataccctgatagtcttcacacattcagcgaatatttattgaggccttaatgtgttccaaactctgggtgaggtgtaggggatatgaaaatatataacatgacattcttgccctcaaagaactcacaggtattcataaaacatccctcacactccaactcactgttgttgactgacactgttttattagcaaagatcctgtcattagcttttagggaaagataggtagatatggaaggtcttattctggtgtccagcatagctgttctgtgtagctggttaggcaaagggtgaggatttttttactctatgtcaggagtgataggcagtcttcaccctaaaccagtacagcacaaggcctggtgcacagtgggttctcactacacattagtttgtgctgtgctgtgctaagtagctcatcatgtctgactctttgtgaccctgtgggctgtagcccaccaggctcctctgaccatggggattctccaggaaagaatactggagtgggctgccatgccctcctccaagggatcttcccaacccagggatcaaacccaggtctcctgcattgccggtggattcttaaccgttgcctgagccaccagagaagcccaagaatactggagtgggtagcctatcccttcttcaggggatcttccccacccaggaattgaactggggtcttctgcacagcaggcagattctttactagctgagctaccagggagtccccgcatattactttatttaatccttatctttattacttcaaattactagtaagtaactattctaaaaaagcacaagccacacatcacagtaatgtattttggaaagggccaatggaagaaacatttttttaagagtaaaacttaaagtaagcatagctggcgaatgagtccttggttaaaaacaacaacaacagaaccctaatcagagaatgattactgccttccttataaatctcagggtttgcttgtttttttaaactcatgatttttttaaaagtctctgaaagatagggatatattagttaagtcgagaatggcaccccactccagtattcttgcctgaagaattccatggacagaggagtctggcacgctatagtccatggggttgcagagtctgacacgactgaatgactatcacttaagaatgcaggtaggcatgtgtatacctgtggcggattcatgttgatgtatggcaaaaccaatacaatattgtaaagtaattaacctccaattaaaataaataaatttatattaaaaagaatgcaggtaggcagaagggtggatagagaatgaatccagtctggggctttattatcactactgctaaaactaattaaatctgtaattgacagaaaaattgtagtagtgatgggataagaagggaataggatcacttccaatgatgacctttctctagtttttttgtttttgttgttgtatagtcgctcagctgtgtccaaatcttttgcaaccccgtggactgtagcccaccaggctcctctgtttatgggatttttcaagcaagaatacatttccttctccaggggatcttcctgacccagggattgaacttgtgtctcctgcttggcaggcgtattctttaccactgagtttaggggaattttaaaattgtatatatgggaaaagaaacaattgattaattgattcattcaatctacagatacagccaagcatgtgccaggcacagtgataggtgctgggaacataaaaatgaactcagtgctcttccttttagggagcgacgggcctgatgtctaaatgaaatcccaccaggaaagtcacagagtggagtattttacgctgcagagtgtgccggggagctgtcggcctcgctttgcagccctctgtttactccagttatctggtgctgccacctgctggacatttgctttttcacagcgtttaaccctaggtatggacggagaaaccagaaatt

SEQ ID NO: 32696 - DNA, 969 bp, Bovine  19866881578773
  misc_feature (1)..(1): n is a, c, g, or t
nctctactttccaggtgatggctgactaatcaagatattgtgataatgaattgccaaactgcccggccctgcttcttctcctcaagcatagatttgattaggagcctggtgaaaccaattaaccaattaagtaataattccttaagactttatggactatcaaccacatgtgtggcttaccgtgccttgggaggctaagaaccaaagagggaaaagacacaactcccagtccagcaggagagagatgcgcggaggtgaatgattataatagccacttgctgtaaggcacatgtatatgtgtagacagactattgtggaaggtcaggaggaaatgattatttcagtttagggaatcggagcagacttcctgggaggctacagaggcctcgtgcatggaccacacagccagacaggtcacacatctagctacatgtgccctgcaaatgcctaaatgaactgtctaaacagttaaggggcttccaggtggctcaatgataaagaatcctcttgccaatgcaggagacttgggtttgatccctgggtccttgttgcttacttcccacgacttagcgacttaacaacaaccagcccatcttaagctgtgttctttattgccatgccctgctggctcctgactcagcactccctcccactcctgccgatgagttgatcttttaaaggaaggtcagacattgttctcctcatttctggacaaaggtttgttctctctgattatcataaattggggttttgtgagagctgattctctaacttggtcacagttaacccagcatgacctttggaggtactaaactctcttgagttccttaaaaaaaacctgaagtgtaagaggggaaaacaaactcaaatctgagaatttctctcaggtttccttattaggtttcttctaaaaattaaatagtcagcagttctttcttcacataaatgggagagccctgggaagaatgg

SEQ ID NO: 32697 - DNA, 737 bp, Bovine  19866881697926
  misc_feature (1)..(1): n is a, c, g, or t
ncctagaagtactgaaaatgagatgaaattaaattttctagaggaagagaaagagttctgaaaacaatttctctccatatttttcatggtcatgatacaaccttggcaaaatctgcagccaacacccaaagtcagcaagtatggacttaatttagaaagaaaacgtattaaaaacattcaggggaaaaaactagcaattcattaacttgaggttttattccaatcactgtattctaaaaatgcacagtcattaaagaactatttattgcaaagcaacatatacttcatgttgtttttgtcaatgttttgggtacctgcggaaatagaaacccctggcaaaattttctgtcagtagagcctcttacccaaccatgggatctagcacaatagcccggggttcctctaagtcctctgaaatcaagatcttcctcatggtcccgttgagccttgtcacttctatccgatcagtgccagtgtctgtccaataaagatttcgggcaacccaatcaacagcaataccatcaggatgggcaatttgggcagtgaccacaaactgactgccagatccatctatgaaggagcggcgtatggccctcacttcatcatcagtccagtagatatagccttccacgggatcataatctatggcaatggcatggcggatgtcttctaactgtagaacaatgtcagtgaaatctggtgtatccaaagaaatgcgtctcaagtctgtccttcgg

SEQ ID NO: 32698 - DNA, 903 bp, Bovine  19866881768672
  misc_feature (1)..(1): n is a, c, g, or t
nctgtagagagggcatgttggagaaatgttctgatttaggacatttcaaggtccttctggtttgggagaatgccagttctctttttcttcttaaagagaatgttgttcttcattcttaaccctatggaccaccatctggttctctagccacaagacctggtaagaaaattgtatgtagcagtggcttctttatctaactctgaaaagtagaagcctttatttaggagtcggttagagttccttgcctggagaatcccagggacatgggcttccatctatggggtcgcacagggtcggacacgactgaagcgacttagcagcagcagcagtagagtttctggcaaggggatcagggaatcagagagatgggattgagttggtatacagggtatttgtcatgacttggcattgataaattatcctcctggtcagaggtgaaactggctgattcttgtgacacgtttccatggcaaacaataatttggtttcaatttaaaacaaaaggtttatgtaatgttgcttttttgttaaaaaatgtagactttaaaatagtggatttattttagccatagtggtctgtttacagccttagagcagtgcaaatgtacctgtttaatgagcatcttaatttcagatatacatttggcatgtagtagcccttaagtttggagaaggcaatggcaccctactccagtactctttcctggaaaatcccatggacagaggagcctggtgggctgcaatccatggggtcgctaagagtcagacacgacttcactttgacttttcactttcatgcattggagaaggaaatggcaacccactccagtgttcttgcttggagaatcccagggatgggggagccctgggtgggcctgctgtctatggggtcgcacagagtcg

SEQ ID NO: 32699 - DNA, 696 bp, Bovine  19866881853223
  misc_feature (1)..(1): n is a, c, g, or t
naaaactacagcattttaaaaaattcaccaagttgtgagtgactcagcctgcaggccagacatgtcagaagccctagatcatggtgatggtgtctccgagtgagtctttcctctgctcagtgaccaatttcagctccaagaaagatggagctagccatgcattagtcacatatttcccacagaagcccggggggagcgacgcagctgctcgtctgagaaggagccccacggagcagccgggtgtggctgtcggagcccttgcaagtgtggcccatttgctgtcagctctaaactttgctttcctgctttttcaaaagccttcctttctcattagggtctggtggctttggaagacctgacccaaccctgactggctggtctcatcagaggctgtcgccgtagaatgatctttttttaaaaaatggcttttttaatgcagtccctggaaactttgcaagcaatgtatcgatttgcgatccttgagctgagttattgagctctggcaaagagaaataaataaatctttcccattctccacgcctgttgccaagtgctgcttccaggaagcgatgactgtcctttctggaaatgaaatgaagctcaaaacgatctaacctccttcccttcacttcacgcccccagctctcccctccgcttgcaagtcacggacaaaagcactttgcagccattcctcat

SEQ ID NO: 32700 - DNA, 4688 bp, Bovine  19866880107301
  misc_feature (1)..(1): n is a, c, g, or t
ntcttcgcatgaggtggccaagtactggactttcagctttagcatcattccttccaaagaaatcccagggctgatctccttcagaatggactggttggatctccttgcagtccaagggactctcaagagtcttctccaacaccacagttcaaaagcatccattcttcggtgctcagccttcttcacggtccaactctcacatgcatacatgaccacaggaaaaaccatagccttgactagacaaacctttgttggcaaagtaatgtctctgcttttgaatatgctatctaggttggtcataactttccttccaaggagtaagcgtcttttcatttcatggctgcagtcaccatctgcagtgattttggagcccaaaaaaataaagtccaacattgtttccactgtttccccatctattggccatgaagtgatgggaccagatgccatgatcttcgttttctgaatgttgcactttaagccaactttttcactctcctttttcactttcatcaagaggctctttagttcctcttcactttgtgccataagggtggtgtcatctgcatatctgaggttattgatatttctcccggcaatcttgattctagcttgtgtttcttccagcccagcatttctcatgatgtactctgcatagaagttaaataagcagggtgacaatatacagccttgacgtacataggattgatggtaatataggatttctgattgctagcgcttctgaacagttctgggattcatagtcttgcctatgccacgtggcctcttacttcctcacatttctataagtagaaaccttgagacaagaaggttgactgctaagactcctggtgccatatgtactgggtagtgtcacagcccttgcagctcctgttaagtattctttctttttaatatcagccaaactgacatgagagactattcttcaacatcaacttctcgtcaaagattgcaaaccatttggccttcgtgtatttcttcttttgtgaattattacaccttttatttgcttttgtattgaggtgctcgtcttccgcttactggtttgtgtaagttttgcatatatggatataaatattctgtttgcctatataagctgcaaatacttgtcccagtgtgactcttagttgagtttctgtggtttggccgcccaagattttgctttttatggagtcagatctatcactttgtataaatcttttcttgctgaggagattggccttccaggtcctactctgagcctgaagagatcgccttcccccttttgacccctttttacatttgaaatgtcagggtagggaagagaaagtgatacagctctctttaaagtgcaggaagacgagtggagtgacaaatgggaagaccttctccagtaggtttctgtctaatcagaaatgaaataagagctgttcagaaccacactcaaacccattttctgcttgactccctctgaccacagcccaggtgcctacatcaccacatcagagccatcggaactgattttctacaggaaagaccttttcccgtgagagcattagacatggtgtcttgtaaagattcccctcccctatcgccggtcatcatctgggctctagcagtgaatcaggagagacaatgattgaaacagcatatggcatcatcagatagtggtttttctgactctgacagttttaagagttgtcgctgacttttttctccagctgaggtttagtggctttccttccctcttcactgtggcattaaggatctgtttcagtcctcggtcagatatgcagagctcatacatatttaaatgtttcaaagtgttgtcctgattcctgtttcaacccatgcctccacctagctgacctcagcagtccaccctatcgatttgtgtatgaagagagactgtatggatttttttttatgttttcttttcagttattgcagtgctaaaataataagggcatgattaaattttctatgatgtctgtgaacaggcgataaagcactgaatgttgaacttaatatatgtaacaaaaagcaagggtgacgaggcaattcaaaaagagggcaggccagttcagagatgcaaactgaactcctgatagtaggatttgagatttggaatagaggacccaagttcatcggcttgcttccatcccttggttgttaattacagttttcaattaataattcagtgtcctgaactattttgataactcctcattaagagaatcaaagctgatcattaaaggatgggtcacagaccctatctacagagagcaaaggcccaggtgagcaatttgaaagctttaccattgaacaatatgaaagcaataccattgtgcattcctctcatgggaaccgacgatgaatatggatatagcgccaaagagaagaggaaaaaactcaagcacgagctcacagtgccctgctttgttcacagccccagatcaatagtacaaagactgcccaacgtgcttcagtaaccagtcatcaattatttaccgggctcttttgttcagagtttctgtttacaagattactttgttactagaaatggttgtttcctttcatgcggctgctggctgggggcttgagtcttttacaagatgagcctgaaagagtggtatttgtgtgtatgtcctacatcccccaactcagactgcagattcaaatcagcatcactgtgtagtacatctttccactggtgctcaggattcccccaggtaggtattacagactcaagactgacctctccatgtagaaaagcgtaagcattttcagtatctgccaaaggacagcgaaagtcagggggaagccatgcctcttgagtcatttgcagaatttgtccttgcccagctttctcaagagatttaactgactaaaaaaaccaggagaaaatacattaaggtctagttttattgttgttcagctgctaagtcctgtctgactctttgtgaccccatggactgcaacatgccaggcttccctgtccctcactatctcccagaatttgctcaaactcaagtccattgagtcagtgatgccacccaaccatctcatcctctgtcgtccccttctcctcctgctcaatcttccccagcatcagggtcttttccagtgagtcaactcttcacatcaggtggccaaagtattggagcttcagcttcagcatcagtccttccagtgagtattcagggttgatttcctttaggattggctgatttgatctccttgaaatccagtggactcttaagagtcttctccaacaccataatttaaaagcattgattctttggcactcagtcttccttatggtccaactctcacatctgtacatgactgctggaaaaaccatagttctgactacatgaaccttcatcagcaaagtgatgtctctgctttttaataccctgtctaggtttgtcaatgctttccttccaaggaccaatcctcttctaatttcatggctgcagtcactgtccactgtgattttagagcccaagaagagaaaagctgccactgtttccacttttcccccatctatttgccatgaagtgatgggaccagatgccatgatcttagtttttttttaatattgagtttaaaccagctttttcactctactctttcaccctcatcaagaggttctctagttcctcttcactttctgccattctagtggtatcatctgcatatctgaggttgttgacatttctcccagtaatcttgattccagcttgtcagtcatccaagctggcatttcacatgatgtactttgcatataagttaaataaacagggtgatgatatacagccttgtcatcgtactcttttcccaatttttaaccatccattgttctgtgtctggttctaactgttgcttcttgacctgcatacaggtttctgaagagagaggtaagatggcttgttatcctcatttgtttcagaattttccacagtttgttgtgatccatacagtcaaatggtttagcatagtcagtgaagcagaagtagatgggttgtttttttttttttttttggaattcccacgctatctctataagtgaacgactgttggaatctgacctctggttcctctgccttttctaaatccaggttgtacatctggaagttctcgattcaactactgttgaaacctagcttaaaggaattggggtataaccttactagcatgggaagttagcaaaattgtctgatagtttgaacattatttagcactgcccttcttcagaatttgggtgaagactgacgttttccagtcctgtggccactgctgagttttccaaattcactgacatactgagtgcagcacttgaacagcatcatcttttaggatttgaaatagctcagctggaattccaccacctgcattagttttatttggcgcaacacttcctaagatcctcttgacttcacactccagaatgtctggctctaggtgaatggccacaccgtcgtggttatcctggtcagtaagacttttttgtacagttctgtgtactcatgccagctcttcttaacctcttctgcctctgttaggtctttagtttttctgtcatttatcatccccatccttgcatgaaatgttcctttgatatctccagttttcttgaagagatctctagtctttcccattctattgctttcctgtattttttccca

SEQ ID NO: 32701 - DNA, 1503 bp, Bovine  19866880394894
  misc_feature (1)..(1): n is a, c, g, or t
ncaatctgtgcaaaacggaggcaagagttcatgaaaggcaagaaacattgacaacttctcaaagaagggtgttcttgtcttggcaatattacaaattattttatgaccctgggctagtcatttaactttcctgagctttgcatcctttctttgtaaaataggatagttgggtaccactcagtctaaaattcaacagcatccttgatgtgtgcatccttgggtggctatccagattggggtagggaactttggaagctgctactgttttggggaaaaataaacacagagaaagttctctgctaaatattacatgttgtctaatgcaaacttactattagaaaacatagcctctggatgtatttgccacattatttctttttaaatgatcttgtcaattgccttcctcattataaagccattttgtagaccctattaacagaaattgcaggctgtttatctctcttataaatttcatcatcaggatgggggactacatttatagccaatgacattttaagagctctttcttttagccacagaacagaccactcaaacaatgggatcttggataaactgtcctgaacatagtaatatcagttcaactaacagtttatgcttgatttttactatttcaggggtgatgtgggcaccagtatatttgtccctatatggacaccagaaataggtatcattaaagcaacttcttagccattaaatagctctggctttcagtttcttaatcttatggtcagggattcaaaatggacataaaggaaatctggtattgaatactctcaaaccgttccccatagtaactctgtgcatgcttctatccctgcctggaatttatttcccccagggttttgcttcgctggcgccttctcattactcaggtatcagtacaaaggttacattttcagagagtatttccctgtcctctctaggtaaagtagattctgcactttgcattagttgttcacctgtttattaactgtcttctcttactacaagggaaattccattagcataggacttattttgattgatttgttgctgtatcatcagcatctagaagagaactggcacatagcaggcattcattaagtacttcttccgtttttaaaatcatgcttttggtgtaaagtttaaaatctctttgtccaactccaggtcataaagatttgactccatgttttcttttaaatgttttatgcttttccacttaacacttagatctatggaacacattttcagttaataattgtataaagtataagttttgggtaagattctttttttttttaacatatgaatttctaattgttcccaagccacttcttgagaaagctagcatttctcagtacaatcatctaagtcctttgtaaaaactccgtgggtcatttttgaatatttctggactctccatttggtcttattgctctatgtatatatcgcttagtcaataccacattctcttgattactatgtgcatgcatgctaagt

SEQ ID NO: 32702 - DNA, 1319 bp, Bovine  19866880482500
  misc_feature (1)..(1): n is a, c, g, or t
nctcagcaagcagaaaaagcattatcagctacctcaatattaaagtgtccccaaatacttacagttcaaacaccgcagcccagtctggaaggaaaagcaaatgggtaagaccagctccatgcattccaataaatatgtctgtgttatgcgtgattctcagctgatctaaaaacccaagttccctgtgaacataatgaacaacaaaagaaaggggaggagagggaaagtactgagttgagtaagctcacgattcatggtaacaacatttatacaagtgtctttcccagttaaaagtacatttcttcatgatatttgccaatttcaagcctacttccataactaacagcttacttaataaataaacattttttctaagttaagcttgccttctttaaaacttgcatgttcttattttagaaggaaacttttatacctgtcttaaatggaagactaataacacatgacataaaactgtaaaaatgggtataatcaagctaaaaaacattattccaaggtaggtaggtaacactacaaggcaaagctctgatcccaaggctcactctttttttaaaaagtggaattagcaagcattacagtgatgttatgatatatttagcaaccaactgaaaactatttccttaagatcatacaagaacttttcaaaaataaaacaaattcttgcttgcatgatttgagttattcaattgacatctgtgcaccgctaaaattatctcagataccatgagggcattttcctgcctgtgcaacagatgaatccacaattttatgcgtgctggtctttgaattcaagacactgaaagatgtgcaaactttgaaacgaaagtaagaggcaaaaggtccacgaatcaaggtaaattgcaagtggttaaacaggagatgataagagtgaacattgacagtttaggaatcagtgaactaaaatggacgggagtgggagaatttaattcagatgactattatatctacgactgtgggcaagaatcccttagaagaaatggagaagccctcagagtcaacaaaagggtccgaaatgcagtacttgggtataatctcaaaaacgacaaagtgatctcagttcatttccaaggcaaaccattcagtatcatagtaatccaagtttatgccccaaccactaatgccgaagaagttgaaattgaatggttctatctagacctacaagaccttctagaactaacaccctaaacagatgtcctttttatcagaagggactggaatgcaaaagtaggaagtaaagagatacatggagtaacaaaatgaagcagggcaaaggctaacag

SEQ ID NO: 32703 - DNA, 1185 bp, Bovine  19866880558400
  misc_feature (1)..(1): n is a, c, g, or t
nggaagcccataacccatctactggtggaaaagtctcagaaattttataaaaaggaacgcctattgagtggttaccaggtgccaggaagtattcgatgctccatatccctataaaccattagatgctctgtatccttacaaatacccagctgcccaagctctcttgtccaaattaggtcttggaaactctcgcttctgcatgtggtcatcccacatgctctgcctcctcaaacaggcaagatgtagaaatcagaggcaagagggagtcttgattgccaggttcagattcctgtccgggagatataattacagggttctctagagcctatgataagctgatactaaatttgttcttggtagaccgtcttgggatgtgtgggggcagggcggaggagggggaagtgggggcttaggtgcaaggatccttttgtaatctctgatctcctcgtgtttgagcatgagtatatttcctgaatactggtcttaaatgcctagtagtcattcagatgtaagactagtctgcaaacgtccatgcccgagacagggaaacaatgctgagtggtttgctgtatgcaaactccttcttcctgtcttttgtgcatctggcctgagatttatctatcggcgagatatttggacaggatgtctctcgtggtgtaacaggtaaatggtgaaggacttctgacatttttcttattgactgtgctgttcactaactctttcttaggttaaaaagaaatcaagcatcagttgaacggctttgttttcctaactttaactctgtttctttttcttttttgcagaagaggaaaaatagttcaggatatgcaaaaagatagagtgcttttttttttaatttgacaatagttgatttagaatattgtgttagtttcagatgtacagcttcaggttcttttccattatcagttattataagatatgaatatagttccctgtgctatacggtaaatccttcttttccatttataaaattgtaacgtatgataaaggtgcattatgacttatcaagaaaaggataccctattcaaaaatactgctgggacagtttgcaaattggaaaatagaggacaaaaatagcaactcaccataaaacagataccaaaataattcttaaggttaaagattcaaatataaagtataaataagtaaaagctaaagcaaaaa

SEQ ID NO: 32704 - DNA, 906 bp, Bovine  19866880609378
  misc_feature (1)..(1): n is a, c, g, or t
naaatatatatatatgtatgtatatatgtataattgaatcaatatgtatgtatgtatatatgtgtaactgaatcactttgctgtatgtttgaaactaacacaacattgtaaattaactacactccaataaaaaattcattaaaagtaaacaaaattaaaaattcagttcctcagtcccactagacacatttcaaatgcacaagagccacttgtatcataccagctgctgctgctactgctaagtcacttcagtcgtgtccaactctgtgtgaccccatagacggcagcccactaggctcccccgtccctgggattctccaggcaagaacactggagtgggttgccatttccttctccaatgcatgaaagtgaaaagtcaaagtgaagtcgccaagtcgtgtccgaccctcagcgaccccatggactgcagccttccaagctcctccatccgtgggatttttccaggcaagagtggctggaaaagactggctaccatactggataatagagagaacatactcaacggcacagaaaattctctttgcatagccttggtcgaaatgatctttaaaataaccttcagctcttaacactgcaaagaaagacaaactgaaacaaactaatttcttcattgataggaaacaaagctactggaatttcattgcctaatttcaacacaaaaagggttcatgtcactgttttgcagtcaccttgatgagttcccttcagttgcatttaaattgggttcaatagatgtgttcatggaaacagcctgataacttatctgcttcaacatgcagagtaaattcttgagttatttatggggatttgagatctcaactggtattttaaaaagggagataggagtgcggaagagaaaaaagctctatttcatgttgcctgaag

SEQ ID NO: 32705 - DNA, 820 bp, Bovine  19866880644171
  misc_feature (1)..(1): n is a, c, g, or t
nctttagaaaacaaaggaaattgtctcatccggaggctgcaaagctcttggctataagaggaaggctgtggaggaagtgggtaggattgggtagagagacaaacgtcaaggaaataaatgtatcacaatagcggctgggatcctatccccttgtcataatccagcacagtagcgtggccttagaaatcaatcaactgtctctaaatcagtcctatctaaaactatttaatgatctgaaggagtagaaaggaatgtaacatatccaaaatgcagtcctattgcctggattctattatggtgacatagactcatgtgagatgatcctgctattaagaatcaggacataaaacctgcctagaagtaagaccatcttgtcatgcagccctttcaggaatcaggaactacatctcttagcagagaaactaaaatattcccagaaacaccaaattccactccagggcacattctctgtgttccagtgcaccgtttatttggtcattcatttggagtacacagaaaactgtgtactgatgactattggaatggaggttattacggtcgagtaccccacccccaccacaccctcgccatggagagagggctcagtaacagtgggaagggtgggagatgggcggtggacaaataccgctagttgagtaggattgttaaatgtatttacactgtagactgtttgaactggaagaaacctcgtaagtcactttatccagtcccctcatgctcttactgagtagttggaaatccagagtagtggaggaatgctcctaagatctcctgtgcattaggagcaggacacagtccc

SEQ ID NO: 32706 - DNA, 763 bp, Bovine  19866880681067
  misc_feature (1)..(1): n is a, c, g, or t
nagccttttaattttgtccttttaataggtatgaggtggtatttcttatggtttgaatatgggtttccttggggctaacaatattgaacatttcttaacatgcttattgcccagctatacgacttctgcaaagggcaattttcaaggtaagagatataaatttcacatgtgtaagaatttgctttattttagaaacaatttttgaaaaatagaacttggaaaaatatttactaaaagagtcatgaaatattcagattatgaagatcaaatatatttagaggctaaactaaaaataatgaaggcaggaatatggtagaaaatattcacattttatttgctttgtattttgcactgtacactcatctaatgctctaagaaactaggggactggaatttgaagaaaggagctcagactgaattaacttgatgtcagtgaagaagggaaaagctctgctcttttcccttccaattattccttcttccctagacttcattttatagatcatgggctcaattattcactgtatctttttatatctagtctcataaaactgtaagatgaatcattacaaaattaatattcaacaggctttatataactctgcttaatgccatgtataactcagatttttatcaccccaaggcctctcaagatctataaatgccactacattaataaaataccatgtatttaactctaacattcccatcacaactcaataccacaaaaccactcaatttaaactagacaaccagacagaca

SEQ ID NO: 32707 - DNA, 2035 bp, Bovine  19866880710651
  misc_feature (1)..(1): n is a, c, g, or t
ntgcaacccccatggattgtagcctgccaggtactctgtccatgaaattttccaggctagaatactggagtgggttgctatttcctcttccaggggatcttcctgacccaaggaggatcgaatccatgtcttctatgtcttctgcattggtaggcggattctttatgactgagccacctgggaagatccatatacagtatactcaccattaaaaatgtagttcccatctgtagctctataattggccccctttacccatttccttctccacagattaagttcttgctcacataagcctctgggtcaaactgctacaccagctttcaaaatgacacctatgaggtacacatcctttatgggaaagtgtgtaattaatgtgtaaacatctaataaacattattgataagaggcttttattttcctttccaaactaagcagttttttttttttctaaatctctggtaattttgtccccttttatagctggctttgcctcctagaactttccttccaaaggaactggactggaaagcctgtgcctgaagtatctgggcagttttcacagagctaagcagacaaaaaatcaaagacaacggttttggtatattccaaaatatcaaactgctctcatttcccccacaatatctttcattttcagggaaatttgttgtgcacattatattagattggcaaacatattaggtatgtaaattttggttaggccaataaggaaattactgtgtaacacagagttattgaatacaaaattcctattcagctgtatacaaaacaaagacttcagtgaatggataaataattccataaggttttcaaaaataatttttaactgcttctggaactgaacactatctttaaaaacaatagagggtctgaaaacaaaattaactgggtttcattttaatacatgggaggagaaaaacacaaccaaaaaaatgtgtgtctgtctgtgtgcctataaaaatttacctttattttggttgtatttgcttataaaacaactaacaaagacatactttgtttcagaaaaaagtctcagtttagaagtatataaaaagttaaaatccccccatcccttcctcagttatcttagttacctctcttcctcaaggataactattaatttgataaacattacaacagtctgtttctcatatacatttacaaacacacatatatatatagtgtgtacatgtatacatattcatatatacacataaatatacatgtaaacaaaaagaatactatacctagagcttattatttttttcactaagcaatctttttattatcttcaatagatactgctcttcttcatatttcttcactgctacgtattctaacctttctaaatttctcttttaggaaaaaactcaagaacagcatgaagcgataggcaaaagcaataaaaatatgtcccagtatttaaaagaaaaacttaacagtgaaatcattgcccataaaagagaatcacagggcagtgacaatgtccaagaaacaaataatgatgataatgaagatgagggggaagatgaagaagatgatgcagaagatgaagaagaagatgaaggaaaagaagacagtgaagagagtgatcaacaaaaaaagaggggaggaaggtgagataaaggagcaaataaaaaatggtgagaacacgggccaacaggtaactagtaaagtaactgaagaacagaaaggcagaccagaggctcaagacaaaattgagaaaaaaatatcaaaattggatcccaagaagttagctctagataccagttttttgaaagtaagtgcaaggccctccggaaaccaaacggacctggatgggagcttaaggcgagtgagacaaaatgaccctgacatgaaggaactcaacctgaacaacattgaaaacatccccaaagaaatgttgctggactttgtcaacgcaatgaagaaaaacaaacacgtcagaccttcagtttagcgaacgtgggtgcggatgagaacgtagcattcgccttggctaacatgttgcgtg

SEQ ID NO: 32708 - DNA, 2206 bp, Bovine  19866880713966
  misc_feature (1)..(1): n is a, c, g, or t
nctgcctgctgtcagtgccctggggaccggccagtgggaggagccggtcgcccggcctaggcagagatgctctgcctggaggctgttgtcttctggtttgttcttccccactgcgttacagccccccacatttccgaacacactatcaggatgcaaggtccaacacagggttattatttttttttctgatgaatgttttgatggacatgaaacatttacaaaggtctaaaaatcaaaagcaaatttcattacatgcttaatgaacttatttgtcagaaagaaatcaggattcttccgggaaatctagaaagggtgggtgtcatccttctagcaattcctgaaaaccctcatggattattaattttcctggagggaggggctgtgatggcctatattggtttgcaacaccagaagcatagctgtatttgtttcaaggaagaaggctcaacttcttttttaaaaaggtcattctttatgtacatgattgcacttttgatggaggctaggggtggagaagggatgactattatataatgcaataaaatgtcaggtatcacaaatctttgaagtttggggcagtttagctaactctgaggaatccagattcatgagcagaaacctttctttctctgtgcctggcaagacattgatgaccccattgtggatataatgagaagaaaagtcaggctgagaatttaagtatcatctgccaatccattagcaaacaatggaaagtcccgcttgcatgtgagactgtttttctgaaaatgacaggtttactgtatgaagttaagaagccaagaaaacatatttatgatgtgtctgtcataggggtcaagacttgtgttcaaaacccaactccacaactgacttgctgtttggggacaaagcatgttatttctctgagtcttcatttcccagggggattgggctttcttttagtgatcagtacaagccacccagccctaaaccacatcctgagtcttccaagtttccttttttgtagcttggatatattctaacaaggattttgagaaccagtaattgatattttctaaatatcccactattacttatagactatatcatatatattcttttatgttatatgacatagtatacatttatagaatgtatgttgtctatgtatattttggataggaaagttatgagaacattctaatgagatcttgatattgacttttttgagtgcacatgagaaggaaagccatccttgaccctcctgctgctgctaagtcgattcagttgtgtccgactctgtgcgaccccatagacggcagcccaccaggctcccccatccctgggattctccaggcaagaacactggagtgggttgccatttccttctccaatgcgtgaaagtgaaaagtgaaagtaaagttgctcagtcgtgccggactcttagcgactccatggactgcaacccaccaggctcctccatccatgggactttccaggcaagactactggagtgggttgccattgccttctccgaatgattccgtcattatttgaggttgataattagacaccataacccagctcttgtaactcaacgggtcaaactctctttatattgtctgtgcttgcagaattttaaaaagcttggacatagccaaagacttagggatagcaagcttttaattaaacactaatgaagagcagaaagaaagttttttttcctcccaggaatccaggcaaatccaaagggtccatccatccttatttccaggggatgggaatgatctgggccagggtcagaatgataatcaacttccacagagtgccacgaagagaaagccaggggtctgaaacgtttgtcagcattggtcaggccaaagagggcaccttccagagcttaaccacagggccgggcacaggaaacagagatcacttgacagtcagcgctgacgagaactgcagaaactgccagcttccacaccctgggctgggcacgggcggggacttgcagctggtagaacacagaagcgggggtccctgactgaccctgttttacaggggtgggaggaaacatctcactctgctctctgccctctgtttccttaacggaatgactttcagagaactactcgcaatcagcttacactggcttggggctattttccataatgaaaaagagtaaacacacacagacacaaatccatttcaacacacacagcctcgt

SEQ ID NO: 32709 - DNA, 996 bp, Bovine  19866880742535
  misc_feature (1)..(1): n is a, c, g, or t
nctctcttactgaacatttttgcatataaagatggaaattcagtttccagagaatcagtctcacttataaaaacaataattaaaaccctaagcaatcctttatcagataccttctttgggtctggtattcagttctttatgtacctgacagctaacgtttatttatgtccttgtgccactcaaggcattcagtgttacacacattatctcatgaattttttacactatccagaatgccaaggcttcagttctcctctcttactcaggaggaaatggggctcagagagaaaaagcaatccactcaaggtcagatttgctcaagttggagcccacagcctctgccgtgatctggcatgcctgctgcccatcactgccagctgtctgccccagggggctaacccagtctgttacggtcactgaagtaccctagattctgtccaaagtgcctcctcctggaggcaaatgactcctttcagggtttgcaagaaattctacctttgagacgttggagatgaaaggaaaatatatcccaagtaacaaactgagggctttgttagaacacgtcacacttaataaaaagcagagagtgttgatcctttttcaacgacactctcccatcattttccgcctcaactgtttgttaagcctaattaattgtgataccgcaacccatctgggcaagataaaacaagagagatatatcagcttttaatactcagccctaaatggaagagtgaatgtcccatgtctgctatgtcgaccaaattcaaatctttactcatcaagcaagtctttgttaaaaggcacgccttggtgcacgcctcaagtctgctttttatttagttgcatgactacagaaatgccttatagctagtatctttattattcatggtttctggcaaattaagtctctagcctctccaatatctagaagtggaggaagtattcaattccaaagaaattatgccttcccggctgtgctggccaggcaatgat

SEQ ID NO: 32710 - DNA, 1205 bp, Bovine  19866880907292
  misc_feature (1)..(1): n is a, c, g, or t
naaacacaagaaaatgattaagtatagttatctcttggtagggaaacttctgtgcatgctctgtgctgtttcaaattttaccgttatctgtattagcttttaaaagcatttaaccttgaccaacgatcttggttttctactttgtaaactggtaataatacttgtcttgttaactttagatggtatttcaaataccgaaagagaaaatgcaggtacattgaaaaagatttatcatctttacatagtaatgcatagaaagtaaaagttgctcagtcgtgtccagctctttgtgacaccatggactgtaaagtccatggaattctccaggccagaatgctgaagtgggtagcctttccctactccgagggatcttcccaacccagggatcaaacccaggtctcccgcattgccagcggattctttatcagctgagccaccagggaaacccaagaatactggggtgggtagcctatcccttctccagcggatcttcctgactcaggaattgaaccaaggtctccagcactgcaggcagattctttactagctgagctgctagggaaacctgtaatgcatagaagttaggtgttactgctaatgatgatttttttagctacaggaaatcattttataacccaggatttacaatggctaggtatgaggaaaatttttagggaaaaggatgaatgagaaaggctaagaaccctgctacaaattatgagtggaaaaaggctttggtcttgtttgcctttaaggtcagaaaagaaaaataaaaaggggcaaaaaatatatacaaatgctcatgtaaactttaaaaaattgttaaataaaaactcaggcctatagaacattttcaaggtccttaaaaatgaagataaaaaccttgtgtgaggttgcacaggagccttgtaattaaaggagagtcagtggaggccaaggtgatcgaaagagaaatatgttccctccatgctgagtgcattttaaacaggtgtttgcaggtatcaataaagctaacattaaagagaaacagaaaaacaacgagacctcagagtattctgcggagactgaaactgcaacaaactcaccccctacacttcctattaaaagctcattaactcccagctgttcatccattaggcggagaggaagggaaaatgcatgccctcactgccaatatttatacccagaggttttcatctcataaa

SEQ ID NO: 32711 - DNA, 2191 bp, Bovine  19866880923655
  misc_feature (1)..(1): n is a, c, g, or t
nacgcaattgttcccctaagtcaagacacgctgtacaagtcatcttcacttgtcagcaaggtcttaagtttaatttgacatctttgaagaatcttctgtttcaagagcaatgaactctatgttggaggctaacctagctgtgggatgacagtgaagatactcagagagagagatgtctcttcggaaaattaacaacttgtcttctaagcaaggcattgactttgaagggacagagaggattgaaaagttgggtcctgatttaatctgaagcattcatttgattaaaagtcagcctgtgtctactgtgtgctttgttttaggctctgggccttttcttgctggggatgtgtctttaggatcctatgggacattatcagggggaaagaatcacacaaatgcagattgatagtagttaggatacagtggtcagggaaggccattgtgttgggttggaatgatgacatgtagccagctatgggacaacctggagaaacagaaatctaagtaagcagtggggacagcagatgagaacggcttggcaaaggtagggaggaaaaggaggccagcgtgagaaatactgacggtgagagaggattgtcgtgtggccactatgagaagaagggagtgacccggggccaggggtacagttagaagcatggctgtggaagtagtctaagggagagatgctggggcttggctgagtaatggcattggggaaaaggagagaagaacagatggatgggatgtgttttagaggtagtgctgcaaggatttgatgaatgggaagtggggcgatgaagagaaaggatgcatagttttatggtcggagcaaccaggaagtgatgggggtcttacttgggagaccacctggagtgattagttagggtgtctgcatcctttgtctgcctccagagcagtgactgagttgctctgagggctgaaacagcaaaagtatttgtaaatatcctggaatggggactctgtttgtaaagactgtatgatctcctttttgtgattcagacgtgctaataagtgggtgctggaaatgtcatgattttctaatcacagccttcttttgctatagccattttcagcagacgccagttcggagcaacatccaaaccctctctggcttctgttgtttgctgctggctttactgttggcatgccactgttcacagcatgccgactgggggtggggcggggctctgaggaatttacttttgctctgggagactttgggggaggttgcctgtttttgttaattatggcttgtgaattactttgtcagaaattttgaaacccagaagtctaaaaaaattacaaggcattgttaaatatttaagtactgctaatttctctatgtggtatgagattttggctgagattggatctttgggctgtttagtttcatccttatcatcttgtgtagagtcacaggggcttccttggtggctcagtggtaaagaatctgtctgccaacgcaggagatgtgggttccgtccctgggttgggaagatcctctgaaggaggaaatggcaacccactccagaattcttgcctgggaaatcccatggaacagagcagcctgccaggctacagtccatggggtcgtaaaaaaggcaaacaagacttagtgactaaacaacagcatggagtcacagatccaattttgcctattaaatcaaattttacatttgtttcatacagtgtgttggataagcatatgttgggacattgttttgtattcgtggagagtcacatagtaagtttagtacgggaatacaagcatcttagcttgtgaaaatgtctgagtaacaatgagaaatgttatgttttaaaatgaattattcttttctgttatgaaaatagtataagctcatcctaaaaaaaaatttggaaggtgtacaataaaacttgaccatagcccaatcacaaagaactccgtacgaagttgaagcttctcaggaactggaaggccctggaaggggcttgttctttgattccaccgacgtctcactttgcatgtgaagaaactgtctgaatggaaaggtcagacccttgagaatgggctgtcctgtataattcaggctctcggcagcattcctttacagaagctgcaagccagtatggctaagcacaagccacagagcacccggggttagaattagagaaacagattgtatatgga

SEQ ID NO: 32712 - DNA, 791 bp, Bovine  19866880946828
  misc_feature (1)..(1): n is a, c, g, or t
nccagaagcagccagattgtaatgtaaacatctgttaccttttctctgctttcagaactgattatgaaaccaggcttcacatcagagacccacagctttcttcatctgtattcctggattaattccttttctctctctcatggacacatccacagactcaaatcaaaagagccataaaattggttaccatgagctcagtcctcccaggataaaactcctatcttctttgtgttctgtcctgctctttgcagactgtcgggtcagctcaggagtgtagagctccattaaccaagctggaggatgactgagtctgtcccctggtacctctcattctccatgtgtactgaattcctaccacctcaaaccctaggggctgatgctcagctaaggaagtttgggaaactaacaggttaatatttaaacatccccaataagggcacatagggataagagtgatgtgcagggggtgtgcaaggagacatttacatggagttgaacatttgatagtaaatgtctctttcactagtttctgctggtatttgccatatttacattaagggatgtttgaaatattttgttgaccttttaaaaaatgatagtagcaacaatgactatcatttgttgaataaggatattgctggctagtgcaccaagcatttacaaaaattgtgttaaaatacaaataatagaagtttacctacttaataccattgaactgtatgctttaaaatttgtaagtccgttcacattgttgagcagtcatcaccaccatccatcctcagaactctgtt

SEQ ID NO: 32713 - DNA, 957 bp, Bovine  19866881039664
  misc_feature (1)..(1): n is a, c, g, or t
ncatagcggtagctcttagtggtgcaataaggggaaattttatgcttccatgtgttatcctaagttttatacaataaatgtaaatttttgagtaggcactatatttatgtttcaaaatttgcacttataaaaggtatacagtaacaaagtctattttcctagtcctgtcccccagacaacccatttctttctccaatagtatccactagtattggtttcttgtgtatctttccaaggatctattgataaagtttgtatgaatatatatacgtacattgtttttatgctttatgacataaataatagcatacaatacactgctttgtacacatctattatttcacccatgtggggggtatatctgtagaatacattcctacacactgaaagtatgcatttggtcaaagagagtatgcatttttcatttggataaatattgccatattgtcctctgaagttatgaaaaagaaaatattttcataattgcttccagtactttaatggtttgagttttttttttaatatttccatttagatccatttacatttttatcctggcttaatggatatttaataagaaaaacaaattatttaaaatattaaattcctcactcatagtgaaattcaagtgctgctcatccccatctgttagatcacaggatctggatgcaaataagggtatcttgcagaggttcagcttacgccgtgggtgagtaacatagccagacctctgctcgcctgtgtgctgttttatcggcttccagagtctcatggtagtcaagaggcaagcctgagagcttgatttccaccttcaaatgaatttttcacttcaatagacctcaaggtcgctgtttggatttttcttctgaaatattgtaagttgctttcatcatttaaataagaagtggcctctcctgcagtacttgggtatgtgtatgggctgcatgaatttgtata

SEQ ID NO: 32714 - DNA, 3438 bp, Bovine  19866881070971
  misc_feature (1)..(1): n is a, c, g, or t
naactaagatctcgcagggcaacaaaaatacataaataaaaataaagatatccaaatgccaacagtaaagataaattcagtaagttatggcatttttacagtgaacaaatgatcactgtaatagaagccataagatgaaaaggtacattgcatttcagagcttccccaggaggagaagggccacatatctgaatcactataggaaatttttttaagagtcacccctccagtccccaaaacttcctctttcctggcccaaattctgatactgtgtcctggagatagtgagtgtgatcttgggcaagtccgttgtgaattaaaaagagatcaggggatacaaaataactttgcagagtaatatgcaaatataagaaagtatctttttttttttttttttcaaattatagtgtttatgaaaaagaaaaatacgataaagctttgctctgaagaggtttcctctctattaaaatgtagcattaaccttatggcagtctctgtgccacatatttgacctgtgtcctttcactgggcttccctggtggctcagtgataaagaatccgcctgccaatgtgggagatgggggttcgatccctgggttgggaagatgcccagtagtaggaaatggcaacccactccagtattcttgcctggagaatctcatggagccaggcacattgcaaagagtcaaacacaacttagggaccaatcaacaacatcgtttcactgtttcactgcttcctgagctaaacacttgcatccttcagatttacagggaaagactttcttctggttaatatctcccaggatgcaggcagcagctcagaaacacatgtagcttctgcatggacggaagaaaacatttcaagtgcaggcacttagttgtcccttgatgaatttcagaattaaacctttgtctttgctttagttataaaatctcagtggtgggtgctaactccaggtgtgacatgtgtgtattgacgccccataatttatgtatgcaccgtaattcatttaacccatcctctgttttcctgtgagtccaaacgcccccaggctgccaagggactcctccaggcctgggttgttatctgcagctgtaaattatcttccacaaacacaaaggcctctttggtaatgcagcccagatgtaagcatttgaaaagcttgatagtgagcaagcaggcatttaaaaatcagaagtggggaggttagggaggggattgggcgtgacctcattggaaaagctcccatcgcctcagaggaggaggtggctctggctggtaccacccagctccagcagagccagggtcttgggtctttccccctctgctttgcatttatcatactgcctcttgctcttttttttttcttttctttctttctgtctggtcttcccgctcttcttccccctctttttctcctctttccaaaccaccattgtgaggttcaggaactgtaagtgacttctcagaggtaccagtaagtattgtgtgtgacacttggagctgagaattggctgtgtgtggagagttctggtaggagatgtggagaaacactgctacctttcagtcaaagttgctgcaaacagagtctttgaaagacttttttcaagtcttttatcaccccctggcctgtttctggaacatgtagaaagagtttaactcaaggaggtatcatgactacaactcatggatccacatcattccagttgtttgcttgcttgttttttaaaggaagacaaacatttggaatacagcacaacaggtaaagattctggtgaagaaagatttattgatagagaaagatgctcccaacatattctggggaataaaagcagaccacaggattgcacttaagtaaaagatgtgattaggaaaaaaattaaaatattaacagtaattaatctctgggtagagtgatttcctcaagggaatcaaccctgaaaattcattgtaagaactgatactgaagccgaaaaccccagtactttggccacctgattggaagagctgactcattggaaaagaccctgatgctgggaaagattgagcataaaagaaggaagggggcagcagaggatgagagggttggataagatcaccaactcaatggagttgggcaaactccaggagatagtgaaggacagggaaacctggaatgctgcagcccatggggtcacaaagagtcggacgcaacttagagactgaacaacagagagtggttatgggaatgattttttgcttgtctatttatatattcctacgataaacacataaagcaatttttaaaaaatgcaagtgtgacgtgtaataaaaggaagaaaagtaaagtgtttgtggctggatagccatgagttattttagagctatcaaagagtaggtgatttacagtaaggagaggacaggaaagttcatctcttcccagaggaatgtgattaaaaagcacagagaaataaaggattccttctgccttgggcccaacagaggtatttgaggcagatgtgtgagtcagccagacctctttgcccaccaccacacgccaatctgaacgttatcccagaacctggggaaagcatgtgtcggttgccttaatattgactgtgacctcctggcctaacccatacttgaacttccaggcagttggtaagcagcctctgtctttgaggatccaccatcctcattcatatgagagttccagaaagacacaaaatcattcaaagcacaggctgaacctcaattctactgtcttacaggattacatttctgtgtgctccctggatcacatatcagacagcatttgtgggaatctgctcagtctcctctctaatctgtcctcagtgtgacatcgaaagggcagaggaaagcagtagtattatgaagggtgaaaaggctggagggtgcagaagttcagagctcggccatgaactcagggtttctggctagcattccgggggaccaggtaattcctcattgtagggagccaagctgttctatgggatgtttgcagcatccctggccagtagcattctcttaagtcaggaaaatacaaaaaaaaaaaaaagtctttggggatatatgtatatttatgggtgattcacgtttttgtgcggcaaaaactaacgcaacattgtaaagcatttctcctccaattaaaaaaaaataacaaaaacaaaaaagtcttcaacataaccagatgtacctcactcatcccttaaaaaccagtgctttcaccttgctcttgacttttaaccctaactgttctgtgtattacctttgtggcctttggcagcctctacgggctttgctcctcatctagaagacgtaataggaactgacagtaatacaggggggttgttggaggatgttaacatgtcatgaagaccctcactaaatgtaaactatttttagatataaaaataacaaagactgcctcaacca

SEQ ID NO: 32715 - DNA, 1765 bp, Bovine  19866881103410
  misc_feature (1)..(1): n is a, c, g, or t
nttaataaatctgcaatgcctggcattgtacttgatttatagtaaagtgcccaattgatgttgctgaatgaatgaagcaatgaatgaatgattccctttggggatgtgtaagccctctcactctctacaaactcctcacttcagagatttctgtggcacatgtctatcaaataccatttgctggaaattccacatggttttctgtccagatggtgcccatgacaaaggcaaggcattctggcacgcaggaaattcagggtgccagatgcctagtcaagtcactgtattattcatcatcaaatgttgttggccagggaactgagggctgtcagctgagccccgcggtgtccagtgaagagtctggtctctaaaattacagcagctaggaccctcattagggagagaggacgctgtggtaggaagatagaggttaaaaaagggagaagtttctcagtcttgttttggctttgcaaccttgggcaagtcacttcacctctctggttctctcagcttagtgtttttataaatgaaaacaaattgtcatcagtatttcccaaacctggttgtgtcctcagaatcttcgggaaagctttttaaaatacagattcctctagactagccattagcaaacttggtcgatgaagggccagagagcaaatatttcaggctttgtaggttgtatgatgtgtgttccagctgccatgcttgagtctcccactgtgtcatcaaagcagcgacggaagatgatgcgtccaccaacgaacgtggcaggatttggccagctttcctggtggccgtggtttgctgaccaccccccaatcgcaccccctgctaggccaggcatggggctctgctgggtaatgaccggttttcttatttacaaaagctcctccagatgacagggagaggcagctgcccttgggatccaccagattagatgctggaaggcttcttcccgcccttactggagttctcattctctggttcttattttcactgtaagaagtggctactctgagtcagcactatttagatagagatcttaatattctttcaaatgcatcccatttgggtattagctttcaacatctgaagtttttattttctcaaaattcaattctctgttccacgctttcaacatctcaagtttttattctctcaaaattcaatactctgttccaccaggaaaggtttgaacggtccttttcattgcatttagaccaaaaagcacttctgtgtgtgacacctttatccattcttcataggtgacaacttcactgctaacttgcagatgcaaagttgaatattatcctgtttaggcactaaagggatacagtgaatctcaactttaagaaaggataatagaaaaaatatgaaattatgaaacaggtatgggtgttgatactgtttcctttgtatggagagttccctttctactgaagtcatgactgctgggtgataagacatcctgagccctagagacactcctgtttttcacttatgttcactgagcaattgccatagttccctctttcactttcaaaagtgtccaatttggatgagaaattacatagccattcttatgggtgacctggagggaagatagtcaaaacgatgctccattgattttgcactttctaaaaggcaggcactgctctgagggttttattgatattatcccaactaatcattatagtattttgccgatggcttgtgtcttttgttgttgcttcagttgctaagtcatgtctgactcttctgcacc

SEQ ID NO: 32716 - DNA, 1171 bp, Bovine  19866881150254
  misc_feature (1)..(1): n is a, c, g, or t
ncgccaatgacatctcccgggggcctgctggaaatccagaatctcagacccccaccccagatatactgaatcagaatctgattcccaactgagtcttgtgcacagagttggacaaacattgctctaatccagcatttcccagacttcagtcattcacatcttcccttttatagcttttgccattttccagtactacccaccctatgtttcacctaatatatatttttaagtgattttacattgacactgtcttgctagcctcaccctaagcaataatattgtctgttaataatttattaggcgaggcaagacgaaatttattatttaataaagtttgaagttctgagtgtaaaaacaaattattttggcacacattaaaataatcactgaagtaaaatggttctccatctatcacctaaaatttactcatatacccccaggagtttatgtaccctggtaagacagtactagacattttgtagctgaattagaagacatcttcccaactccagatccagtatttccagttcatacctgctctcaccttgctgggtggatgcatttgtcctcaatttaccaatggttgtggaaggcagaaaaccttggttctggcctgcaccacccttaaataacttgccaagtcacatcacatattggggtcatttttgaaggctggcctatctcaaaactcccttccaagtctaacaatataacataataaatgagagcagaggctctgaaatcaaaatgactgggggttgcaagtaatggcttcattacttgctaatgtcattaaatctcggttttcctcatctggaaaatgggagtaataacaacaacaaatggccataacattcagatcacaggacttgtaaaaataaagaaaatgatagctaaaaaaattcttagacttaaatgcggcacatagtgttcaattaaaaaaacataactattactatttttcctagcttcatcaaagcacaaataatagttaacatttattaaatatttagtatgtagcaggcaccacatgaaacaattttattttatcctctatccacacaatgaggtaggaactctgattctccctacattagagatgaagaaattaaagcacaaaaaacgttaagccactttcctttatattttaccaggtaaacatgcatcctct

SEQ ID NO: 32717 - DNA, 907 bp, Bovine  19866881268537
  misc_feature (1)..(1): n is a, c, g, or t
ncatcaaatgaggctaattacaccaagcaaaactcttccccgcagcatatggatgaagtgcaccatggaagcagctgggagagatgtaccccctttccaaactcactcagcaagatggaagtgagctgaggcagcgtcccttcctgaagtttctaaatctgcatgatcatcaaaagcatttggtcaccagaatagtaatacgaatctgaaagcttacaagcaacaattcagatcattttctcaggatagcttcctatttacatgtaaatgattttctattttctttataaacgtgctcagttctgtccaactctttgcagcaaccccacgaggctcctctgtccatgggatttcccaggcaagaatactggagtgggttgccatttccttctctagacaatcttccctacctggtgactgaacccacatctccattggcaagcagattctttttcactaagaaacctgggaatcctatcacaattccacctaaaagcctctgagttgctttctgcatgagcaacaagattttttaaaccatttttgtttattgccattaatatattggtttctgttatgaaagtggtttttataaaatgtattacatttcacagttgccgttgtttttcttcaggtgtttctgtggttatccgtgaaatatgaaactggcaatatttaacgtgtattgagggtttgctctgagccatgcaccatcctacttaatttatatatttacatcaatatctatctgtatcctcatttaattctctcattaataacatatggtgaatattactctcagatatcttttatatgatgaggaattagaggtcagtaagttgccaaacatcacacagttactaaggagtgggagctgtggtttgaatccagcagactgattcaagat

SEQ ID NO: 32718 - DNA, 1251 bp, Bovine  19866881274793
  misc_feature (1)..(1): n is a, c, g, or t
ntgtagtaggatagcctggctggggagatatttggggggcatggttcccttccccccactgccttcagtcacacctttgccagcagccagccagcctgcattaagaacctggataaataccttgaacctgcaaagtgagctccacaagtggtttaatatccattttaacatcctccacagaggaaaatacctgagtactgttttctttcaattttgttaatctctagtggttttctgaagcccagagagggtttccgtagggctttctgattttcagggttttaacagaagaacaggtgagtttgagctcttgggtcttaaagggacagccaaggaatcccagagcacttgaatgggagccagcagcaccttggtcctcctgttttcagctcagccagttattaattctctctgaatgcagcggcacacacacagatgaggaaggttgattaacggcttcctgcttgctcgctcatctggtcccagacactttgaaaatgcagtgggaagagggtgggggaaactaggggtgttcactgggcagaaaaaaagaaaaacccagtgtagtgttggatgtcccattttgcactggtgctgctgttttgcatttaattagtggccagtccttaagccaggcatgtaacattttggttgtgtccttgagctgctacagtcttttaatcacaggccccctgccccacttcttttgatgtactattctacaggcaaataaaagacccagatttgattccacgggactggtaaaagtagaagcgggggggtggtttgggtttgtaggtctttcctgatgtttcatgattaaaggggccctggcaggtgaagagaaagaaattggcttgtgtaacccttaaggagagggtttccctttaatgtctcaagaagtggaaaacagacgatggggaaaataatagaatgggataatggaataaaggtgcaggaaatattctgtgagcctggaccaaaagaatgaaggagaaggatcagtgattcacccaaacgtagcggatgaaacattgatccaggggagcttacaggaggggactgaggcctccgaggtgaggtgcagagaattaaaatgatttcacggcgcttgggctgatgagttgggtgctagagccctccgtgtgggtaaggtagccctgtctgctgacacacacatcccaacatacagacaccctctccaggaaggtttgcggcattttatttttctgtttcagcttgttagatgta

SEQ ID NO: 32719 - DNA, 1081 bp, Bovine  19866881548785
  misc_feature (1)..(1): n is a, c, g, or t
ngtcgcacagagctggatacgactgaagtgacttagtacacccatatccacggtgcatatatgtcagtatcaatttcccagttcatcccactacctgcttgccccccttggtactcataaatttgttctctacatctgtgtctctatttctggtttgcaaataagagcatctgtatcattgttctagattccgcatatgtgcgtgaatatatgatatttgtttttctcttgctgacttaactggcttgtgtttttcatgctaagaaaatgcagtatatacagcttcagtgtttctgtttatgatcgatggccttttttctgcagcagtcctgtaatagtttgccttcttatttttattattctcgctgcatactaatacttgaaacattttagtaaatcatggttctctggttcctacttcagactcatttaactaatttaatgagctctgtctaattatcgcatttcacctttcatacaagagtgcagcaatgctttcactgaaatagctggtaatagctccaacactcagaaagggaagaaaatgaggatgtataattcaggactcacaagagttcagatagaattcttacagatatatgtatatagatattctatgtataccttcattaattgatccattcatacattctttatgtatgctccaggcatcacaaaagacatcacatgagcttaaacagctctttcttaggcccgtgtcccttttaggggagaataaaacacgatggttaataactcttgagctagactgtgtatacttgcctcctggccgcaccatttcttagccatgtggccttgggcaagtcagttagccagcttatgactcaatttccccatcagtaaaatgggcattattatatatgggattccctcatagctcagttggtaaagaatccgcctgcaatgcaggagaccccaggtcaattcctggatcagggaagatctgctggagaagggataggcaacctactccaatattcttgggcttgccttgtggctcagctggtaaagaatccgcctgcaatgcgggagaccgggggtttgatccctgggttgggga

SEQ ID NO: 32720 - DNA, 1248 bp, Bovine  19866881586125
  misc_feature (1)..(1): n is a, c, g, or t
ntgggatttttaaaaattgacactctctggtctttgatgtaaaccgtgttttattgatcagctgttatcaacttcatgtaaaaagcatgtgatcatgagggacaatgaaaaatgaagactattttatttatgtgtatgtgtatatgtatacgcatatttatagtctctaagtacataggaaatataatttgaaattatactaactccctttaaacctttcttatcttatctttgtacaagtgcatcctaacataaacatgatctgtatgtttcttggtttctctaatattgaaatgaaagtttttgcaaccatattttctatgtattctagaaagcagttgtttaaaatgcaaatttacccacgttccttcaatcctctttcgtctatttgccttgatttcccttgttatctaaagaatttttcagttcaggcattcctatactttgaaatcatgtccttgttacttgttattaatgctctgtttatcataccaaaaaaggaatcccaaccttggatttttgtttcattttgtagatgagcttcagataacgcagttgtagatctgccgcttctttaatgactaactgatgaattataggttttctgatttgaagtgtatttagaaaaagcaacaaaatgcaattaatctgatagtaataggaacagaagttaatattggcctgaagctagactgctcattgtaaacatctagcctgcataattgacagtcacagaggctcacttctggctcctaaaaacggtcctctcattactgcctgcacagcccagcttgaccccattcttctgcagagttctgcccagacatttccaagctcctgcgttggtcactgacacaacagcagctgtgcctctctctgagctttcatggctctctcattgctctggcctggtgagcccctgaaggggagtggcagagggcacacctgggttcatgaccttaactcaaggctcccagctttgaacttgggtaagactttgaccccagggaccacccttgaggcatgcttaccttgagaggtggctgtaaggatgagcagatattgtctacttattataggagctccgaagagctctgacaccccccacagggagggaagatgccctgcagtattcactgttttttttttggatggggcggcacttcccacccacagctcccagccttgagttgggatgttgttaccagtcacagggtacctcttccctgttctctctgctcctttcca

SEQ ID NO: 32721 - DNA, 1888 bp, Bovine  19866880453695
  misc_feature (1)..(1): n is a, c, g, or t
nccaaagcctttgactgtgtggatcacaattaactgtggaaaattctgaaagagatgggaataccagaccacctgacctgcctcttgagaaatctgtatacaggttaggaagcaatagttagaactggacatggaacaacagactggttccaaataggaaaaggagtacgtcgaaggctgtatattgttaccctgcttatttaacttatatgcagagtacatcatgagaaatgctggactggatgaagcacaagctggaatcaagattgccaagagaaacatcaaataacctcagatatgcagatgacaccacccttgtggcagaaagtgaagaagaactaaagaacctcttgatgaaagtgaaagaggagggtgaaaaagttggcttaaagctcaacattcagaaaacgaagatcacggcatccggtcccatcactttatggcaaatagatggggaaacagtggctgactttgtttttctgggccccaaaatcactgcagatggtgattgcagccatgaagttaaaagacgtttactccttggaaggaaagttatgaccaacctagacagcatattaaaaagcagagacattactttgtcaacaaaggtccatctagtcaaggctatggtttttccagtggtcatgtatggatgtgcaagttggactataatgaaaccagagagccgaagaattgatgcttttgaactgtggtgttagagaagactcttgagagtcccttggactgcaaggacatccaaccagtccatcctaaaggagatcagtcttgggtgttcattggaaggactgacttggaagctgaaactccaatactttggccacctgatgcgaagagctgactcattggaaaaaaccctgatgctgggaaaaattgagggcaggaggagaaggggacgacagagaatgagatggttggatggcatcactgattcaatggacatgggcttaggtggactctgggagttggtgatggacagggaggcctagtgtgctgtggttcatggggtctcaaagagttggacacgactgagtgactgaactgaactgaactgaactgaacccccaataagaaaaaaaaaagaaacgatggttctcctctgccttgggaaatggatgtaccagcttcacaaagacctcccaatactgtgagccagtatggaagggggccctgcttataaatggtttcattagggtgagacgttcaatctctccatgcttagccatttcatcctaaaaatgagatcaaaggagcagataccttatggtgctgttgtgaaaagcaaaggaattgatgcacggtgagtggttttaacagtatgtggcaaatggcaggcactcagaacacatcaggcactactttcagtctctccctctaggttctttcatggggaagggccacccctggttcgttgcatctccagggctggatacagtatatggcttacaaagcaggtgctcaaagcaggcagaaaggaatgaggaaggcaggaaggagggagggagggagggagggaggggatattcacagacccagagtttagagctttcatagaattgtcggctttgccctcctcccagaccatgccttctgcccacgaggtagcaggagtgaccaaggtgacttttgcccgggctctctgcccctcgctggctccatctcagagggagtgctctggagaccaggacactggactcaaggtgaggaggcagattgggtggcgtttggctcagaaatagctgcctgccgttttccggatgattcatccaccacagctggcctcctgccggatccctctgctcttcctcccctgcaaggtgggaaccaggagactgacctacatcagatccccatcaataccccgggcgga

SEQ ID NO: 32722 - DNA, 1200 bp, Bovine  19866880454931
  misc_feature (1)..(1): n is a, c, g, or t
ncctcgcctctaactgtaaggatggttgggtcttgtgagcatgagaccttgccccaggggttaacatattgtcatctcaaaggaaactggaattttgtgagcaagggaggagaaagtatgaatattgggttaataactgatggtgtctgacactgagctccacggggaatttgagttttctagatgttgcccttcacacaaacctattaccaagactgtgttggcaattttctccttggagattctctgaagggttttcatgggagacatcacaaagcaagaatcaggactctatcaagcagcttgctcccattctttgatcctcagaggttcactgaagacgccaactgaaatctcgctctgcgattgctattttctttctttctgtagccgtcttccactttgcagctctgacactaaatggaaaagatggcaaaagcacactgcgttgacaatagcaccatcttctgtccagagaaatgtcagcttcttgacagatcagagttttgggtcgtgcccgtcattccagagcagacacgcatgtaagacactgcacttaagaagaagtcttttgagtggggtcttgagccctgtgcaccaatctttttaaaggtatttattttattgaagtatagttcatttacaatgttgtactgatttctgctggacagcaaagtgactcagctatacacatgtacattctttttcatattcttctccattataatttatcacagaatattgaatatagctccctgtgctatacagtaggaccttgtcatttatcctgtctgtaataacagttcgcatctgctaacttcaaactctcaagccatccctccgctacccctccaaccttggccaccacacatctgttctcgatgtctgtgagtctgtttctctatcacagatgcatccatttgcgttctattttagattcagcatataagtggtatcatatgatatttggctttctatttctgaatcacttagtataataatctctgggtcccatccatgttgctgtaaatggcattatttcattctttttatagttgagtggtaatccattgcatacatggaatcatggtagatcatggcatccagtcctatcacttcatggcaaatagatggggaaaatgtggaaacagtgtcacatttcattttcttgggctccaaaatcaatgtaggtggtgactg

SEQ ID NO: 32723 - DNA, 798 bp, Bovine  19866880510049
  misc_feature (1)..(1): n is a, c, g, or t
nctccggatatgcccaatcccaagatcccaagctatcagcagaaaggcaggatacaaagctgaagcccagacacactcactcactgactctccactgctgcctcagctccaaccctccactagggaaagacgccagctgctggcggaaagtgacatgtcaaaacttcttaagccaagaagggccctgagtcctcaaacctactcctttcttctcatgtatatagacagatagacatccagaagggggagaaaccggctgaagtcagtggtcccagaactgggccccaaacccgcagctttggcactaggtccagtgccctttaacccacatgattacaatcccctacactctgcaaggatcacctaaaaacaaatcaacaagcactaagactcagctcagttctgccaaaactagtagacagctttaggggttaggaaaacttacaaaataaactagtgtgtgtctggagcccccgcaaccactcctagtttcggtgattcaccgggactcagcatacaggtgtacatacggccatgattcacacagcacaaaaatgcaaagcaaaacccatcaacgggaagaggcgcgtgacgcgaagtccagaggaaaccaggcgcaagcttccaggagccctctccaggaaagtcgcacaggatggtctttattcttctggcatgaaactgtgacaacatgtatgaagtggtattctaccaggaaacccactggagactcaagatttttcctgggggctggtcacacggcactctctgcctagcccataccactcttaatagtta

SEQ ID NO: 32724 - DNA, 1217 bp, Bovine  19866880513172
  misc_feature (1)..(1): n is a, c, g, or t
ntccttaaacagctgtcacactgtcccagttgtttatcaagaaggaggtccccagggcttcatcgaggcagacttgaactcaacccctgcagtgttgatctgttccctttcatgtccccctgggcgaggggtgccacagcctgggtgcccatgggtagatcctggcagcctctcagcttctgcagctcatcacctgttgatttctacccagaatatgcgtttggacatgtcaagatttcagcggctcctacaaaggcaaactcctctggaggaacctgagatttcttctgcacagaccagcctcacaccctgtggggcagtctgtcagcaaagcgtttacactgggcacggaagtaacgcattagatagggtaggtgagggaagccttcattcagcacttgatcttgaactttgtatttgccaagggcttttaagtcatttccgttagctgttactcttgaacgtccttaggaggtgggtagaaactggtgtcctccttttgagaaaaaggacatgaggagggacgtgtcccccagggacacatccatggagtgaaaagggtcagagaccttgctggggaggcgttccgctccacctccatccactctcagccccctctgcatacagtaagccaacagggaggatgtttctggagcctggctttcatccaggaatcgtcctgcatgttagcctgctagaagccaggttgaggtctttgtcacagtcatgtggcaggtgagggggagcctcagaggggtatgtgctgtgcagtaaatcacagaaggatgaacaactgctgggcgcacagaaagctggcgctcactccccagccactcccgagccagctttgaagcaagatgtatttttaaacacaagccacgtacagaaaatgttcccttgcgtgtccccatagcctactaatggggcaacagttggcaaccaacaccaccagcccgtgctcagggctgtgttctcaatttttctttctattcttgtcccctggcatacgataggggttgctgtcccgggagactacaggcgactgacgaaaaaggttgcagtcgactcttgcctgctctcaattttaagactcggatttcgttcagacactgggcctgtgagtctgtgtctgtttaccaagtgggaactattatttttttaattcttccagcagattccatgaaactgcccaatgtttcccagaaggctgttgtccc

SEQ ID NO: 32725 - DNA, 1372 bp, Bovine  19866880579885
  misc_feature (1)..(1): n is a, c, g, or t
ncccgctgaaggatactgtctggaggtgagcagagaagagcgtgtgtgaattttctcccttgtatgatgaggttaaccgtccctgcagccgtccttacataataaccgtccctgcagcaccgccttcacgtcgtaaagctctcagtgtactttgtcaccgtgtgcagatggcttgctcgcgctccgctcttgagcagtgaaaattggctagtcattttcactttctgtttctcaggcagtgtctggcttgtaaacactggaagggggaatatttaactctgaacagaaatctgttctgacattaaaaggaaatgagtgaaaacatttgtgcaggtgagatttgttgtatgaagcccattgttatgaaagatcaaaaagatctactcttttaagtgcgtattttaggttctggatgattgaaattgtatagcaaatgatctatcacctcactgatcataatagataatgtgcttacgtaattttaagaaccataaacttatttattacagttagcatgtgaaattaacaatatagagattattaaaatgtatgtaaatgattactactttcttcctttttcaactgtaattatcatgttttgcctttgatttttaactgtgtgacctaaatttaaatacacacacacacacacacacacaacctgggacctttcctctaaggaacttggaagtatcagtaacttaagctactgtgcataagagtcgttgttgctgttgggttatttttgtgtgtggattactaataagctggccttttaaaaaagaaatatagagatttgtttattgtgagatattcatcatagaacattattgtgtggtttctgttgcttaattgcaaaaattatttaggagttttcaaatattttaacatgctctgttctatgtcctttagcacccagaatgctttgtttgacatctttctgaaggactcttaataactctgtagtgctaagtcagccttttctattcacttctccagcaggagtaagtcccttgcttcccctcttccttcatcctgactttgactgcctcaccctcatatatttaatatattttattgtccattaattatatgaatcataaccgtgtacgtgtaaataaaatagtggctcatgagaactcttgtctgtttatgcatttggagctatacttagtagctgcttaataaacacttagctgcatccaagccagttaaagtttgcatgaatattgttaacaaagaaaccgtattcactctaaaagcttttatgaagacttgcacaatgttagaagtttgttatttcatttttaaattgcctgttgtgcttctgcttcttacgcgccttgtcacctttgaggatttctggatctca

SEQ ID NO: 32726 - DNA, 881 bp, Bovine  19866880588295
  misc_feature (1)..(1): n is a, c, g, or t
ntgctctgagtgataacagagaatccccaaagtgacactgcccgtggctgggcctctggcattgatattttgtttgtcttttcatctctaggtctggcacacaattcagacttcagcataagcagcttgtaatattttggactattttcatatgtgttatttctgtctctccatctagattttaaattctaaatctgctatgtcttagcacaggattaaaacattggttcactcacagaaataactctctaatgtacatgaagtcagaaaggaaaacagactcataagttgcctcatcctatagttgagaaatctgagttcagaaaaccatgaacacttaagacagtgaatcatttattcatccaagaacaaatatttagtcaatgtctaatccagttattgtagtagaaatataaagatgattcagtcatggaccttgttctctaggaacttcatgtctgatgtgtgaaggagataagatatgaatgaacatcagtaactattctatgtgaaaggaagctgtaagcactactaaggtgctaaatggactgtaaccaggtgctaaaaatgaatagagttgatccagcaatcccattgctaggcatatatccgaacaaaactctaattcataaagatatatgcatctgtgtgttcatagcagcactattcacaataccaagacatggaagaagcctgtatacccactggcagatggatacagaagatgtgcacatatatacaatggaatactatgcagccataaaatagaatgaaacaatgcaattgtaacaatgtggataggcctaaagattattaagtgaaataagccagacaagacgaatatcatatgatggtcacctgtaaacgggatatgaaatatg

SEQ ID NO: 32727 - DNA, 2726 bp, Bovine  19866880604569
  misc_feature (1)..(1): n is a, c, g, or t
naactgagatccatgtgctgtaaccagagaagcctgagcaccacaaccaagacccagtgcagccagaaaaaaaaaaagaagaagaagaagaaatagcctgcttggccctcatgcagtcccaccggtgcttctgaagcttcctaagccaagtgggaagggttctgacacactccaggtacttactgagtcgtggtttgtgctcagccctgggaaggatcctcagggcatgtgagaaggttagatactggctcctgaccccaaggcatatataggccagatgaaaagcaagaaacgagaaacattatggaccatcagcaggaagaataattaaacaccaggcagggtgacctccatcgtgagcgtgatgagagatggtgaaggaacaagagagatgcttccacaggagagttttaaatgaggaaaagccctcctttcctgctgctaagctgggtacaaccctgtccactgacctttccacaggcctctgtccttttcttagagggttctccaaacacagcctcaccaactctcatcagcatgaggacttctttccatttggggcctgtacctgtcagtttacccttgtctaagctgaattttatatcctcagctagacctcatcgggccctcactgtgtttagatctgggtttcagatctcctcctactttgcagcttcgcctaaaaccacccagctcctccacttaatacagcccagagcataaagatattccaatatatgcttgactagtggagatttgcacgtgaggctttagttacaagcaaccctatttccgcacgagctgatcgtctattatggagtcctttgaatgcacttgtttgtagctggtagagagttccttggcctactatttctggggttgttgctccagagcaaagcagtgcctttgtgtgtatctattacaagacactgggcttcccaggcagcactagtggtaaagaacccacctgccaatgcaggcgacttaagagactcaggtttgatccctgggttgggaagatcccctggaggagggcatggcaacccactccagtattcttgcctggagaatcccatggacagaggagcctggtgggctacagtccacagggtcacaaagagtcagacatgaccgaggcgactcagcacacccacacgcattacaaagacattaaccacacacatggcccatcttctcccttacatggcggcgcagccaggggtgattggaaaacgacattttaaaccccaaagcaaattacagcaaggaatcggtgtgaaattactatcctctcctcggagttcctttttaaaagtcaggcagcgggagcccaggataaaagttggcctgtcagacaagcccattcaagcttgcaattccgctgtcatttgcccgatgggcttgtgataaagagcaaggataaaaaatctgccaaaaatagtgccaccgagaaaccaacacccaggccaactcaggagccagcgctgtgccagctctgccctccccaggaagacagtggctctgaggatctgttctgacagagatgtcgtgtgacctccaatttcagcaccaaggagaggaagggccgaaaagagctccagctgtgaatccctgaagaaaggggagggggaacaaagtttacattgaaaatcttggctttccaaacagcatgttgagacagccccacagcagacaggtttgctgcaggcctggaacttgcctggggtggccgcagcctggagattcacctagaaagattgtaacactgagcttccctctctttgtacttttgctgggccttcgctccctggagtggtaccctaggggcctgagagaaagagatacccctcttagtagcctcgagcaatgggagcccaggcaaatggaccaacgggtgaactttggaaaagcccacagccacgtggcagcaggcgctctggatatcccaggccgaacagaacctgctcagcccaggctctgtcaccagatttcggggggggaggtggcaggctaatttcaggctatttgcccctgctatgagggggtaagacagaaggacacccacgcctgccaaatgacaacgctcatagaggtaagaggtcacacccatggacagaatcagatgttactgtttcagctcatgtttattgtgcctctgggagtgaggtgcctccttggaactccccaagtgccctgacaggcaggtctcagtcccagtttacaggtgggtccactgcatctcagaaaagctcactaacacgccccagttcattcacactgttgtgaaatgggtaagccaggagtcagatgccagtctttgggacccaggtccagtggtttccatcagaggcatccaccaagcctgcttcagaggaggcagctcccacagaagcggggaccattgtggggtctgtcttcacctgcagggtgtagcatctccaaaccctttgtctgcatcttcttgtcttcatgtctgtcacccacttgccatatggaaccaccggccagattttaaagtagccacaaatatctggcaacatataacctgacttgtgtttggttgataaagaccctcaaaggaaataaacacaggaactgcgaggagtccagggtggtaatcttttcccagaaaggacccctccaggggccagggtgtcagggcaatgtattgtctaataggccgcaaagaacaacaatcatcatggcggttatcaggaaatcaccta

SEQ ID NO: 32728 - DNA, 2177 bp, Bovine  19866880677481
  misc_feature (1)..(1): n is a, c, g, or t
nctgcagtgcaggaggacctgagttcaatgccctgggtcaagaagatcccttggaggagggaatggcaatacacttcagtattgttgtctggagaattccatggacagaggagcctggcaggatacaacccatggggttgcaaagggttggacacaactgagcaaccaacactttctgtgttgagaaccgcaggatcaatggccatatttctgacagaggcataactttgagtcaaggtttgggcaacgttaagaagccctgccctgtgcaggacctgtgcctgggctctggcgatgcatgaatgcatccaacacaggcaccttcgtactgtaatgaagattcagatagataaaagatattcctataccaggtgggaatgctctgaggcacgcacggggagcacggttcagggactctgtgatctgggagagctgtgaaaagtttcctgcaaaggtgggagcctgagtagagcagatgatgtggggtatggggagtgggacatttcagcaggaaggacagtgtgcagatgtgaagcagcttgagttgccaggggcctagaatgtcaactccaggagatctgggtgtctgggtcttctcagctctttcctgagagccttgacctgagctggacaccatctggtacataataaatattagcagaatgaacaaatgaacatatgatttttatcttctcaggggtgtggggctaccgagagatgaggctgggagagcagcaggaatgccatcacagatggaactctgaaccatgttcatcagattttatccataaggcagtcattctcagtaagttcaaaaatgaggacccacattgagtgagggggaaaaagtcttctcagacactcccatagtcgcagcagtacttttagtaccatagatggagaaaatgcatacagactttaaaaaaaaacacaaattttgcgatctttacaatgaattctgtgatcactgtagaaacatacaagtaatgtatttctccttaacattgaagggtatgaaatgtgtgaatcatgaccgtttgagctctttctagcaaacatagagggggaaagtctttctcagtccattgtctggctgagaactttgaagaactccagatctcatgtggtctggtctgtgctggtcccatctcccgaaggtctacagagatgtgtgtccctcctgatcatcttctaccctccttgcaaatcttgccaaggaaccccaagatcaggggggttttgagggtccagtcttcccagaattcacttcaccatggcctaccagggcttcacaggtggcgctagtggtaaagaacctgcctgtcactgcaggagacataagagatgcagggctcaatccctgggttgggaagatccctggaggagggcatgtcaactcattccagtattcttgcctagagaatctcaaggacagaggagcctgggctatggtgtatagaatcacaaaaagtcagacatgattgaagcaacttaggatacacgcacacatcctcatctccacccaatgagataggtactgttactttctcagtcttacagaaaagaggagagagatcagggaaataggtggcaaattttaatgaaaaactagatggaggaaggaggaagtggatggtttaggatgattcacagattctgctttagtctatgaggaaatattaagggagctggggacgcaggggaagagcttaaagccgtattagtaactttatggtctttaaccttccatatttattcttactgttcatattcctcttgtactacatttcctacaacaacttctaaatcattcatcagtaattaaccaaactactaactatcgattaaatcagactcagccaaagagataaaactttgacactgacggtgaaaaatggattctctttacactcttttccaagtccttcaccatgaccctgattcattagaggcagtctttaaatcagccttggaaacgcaaggagaaaaatcttatgaaattgggcatgtgctttacgcaggcctagggtcctggggtgtgctgcatcctggctccggggaccagctcccgagacagcttttgtggtcacgaagtttccaggccagcagcagtctctctctcatcctttgtcaggtgctgctctcaccccgcagctgacctgaggcccgtggtatga

SEQ ID NO: 32729 - DNA, 1476 bp, Bovine  19866880711220
  misc_feature (1)..(1): n is a, c, g, or t
naatccttcccctccccctcctcagattatccagttatcagtgtccctgcaattctctgtcctcagttctgaaccagaatttaccacctccttcaaagaatgaagtttcattgctcctatttgcacttccagggacaccgagcaggatcagaggaggtatttgttgagtaaatgaagtcatcttgtccaccatcctgtgcttgagttccaccaagagttgtattttctattttggttttatatgtaccacatgctggggctttcttgcctccccttagaagacataccacacaagctaataaatattctttgctaactgccttccatcactggagcctgtctgccatccacacagagacagccacagtagggggaccaccttatcctgtgcatccaaggcaaaacaaaatgattcaacacttccaaaactagcacacaagatgcaaatggtttcaaaaaatagaccccaagccaaattgaacacaaataccaagggaagagaagcagacagacagaaagagctacatgagagtctaggcatacccagggcaggtttaattagctctgccctgcagactttctctgacacacacacaggtatcccatacaaaaaggcaactggaggtcttctagtatcactggaactctgcagatgcttccggatacttccaaaaacatctagataccccacacatgtactctttttgagagcagcaacaaggttcaccaaaggtgtgagacagtctgtggctggaggattgccagacatttattaagcacctactgtgtgccaggcatgtgccagccaggtactgtcacctacctacctactgacctgaatgcattcatttcccaaagtcccctgaggtagattgttagttctgttccacagtcgaggaaactgaggctcagtgtttatgatttatacactgcaaggggggagtctaatcccctgagctgcccaattcttagtttaatatacttcccattagccacagacatgtatgtgcaaatgttaagaaagcaaacctgggctctgctaggcgatccatgtgaagagtaggctcaaggctcacctggaggcagccctaagggacttgggggagggaatccccgttttcactccttggaggccaaccctaggcctggctggaggggggcctgggcctggcaagtcacctttgccctctgaagtacctctgaggtcacagtgcccagctctggaggcctctccattcatgcccagcctgcttctgcgtgcctcctgggaggtgtcctgcccaaagtgggctgggggctgttatggggaggtaccccataactaaagagcagggccgaccgatttgacttcatcagtgaagacagaggtacttcccatgaagaccccatgaacaagaagacacttccagcttccccaagggacacaaatatccaactcttcccctccccaacttacttatacctctgggcaagatc

SEQ ID NO: 32730 - DNA, 1410 bp, Bovine  19866880980163
  misc_feature (1)..(1): n is a, c, g, or t
ntgatcttccgtgcggttttttgttaatgccggtccagtgcatcaaaggacgtgacttgagttataaattcctgtgctgtcagggacctgtaatactgcaatccttacattatttgcataaaaataattcacatctttagaaagggaaaaatcagtacagaaaaagacatcaaggtgatacccggatcgtaaacacacaatgtgtttgttcttgtaactgagcagttttggagtagtttggcactctctgaatcagttattatcacttttgttagccctctctacccaggttgatattgttttctgctttactgataaaggctttgattctcaaagaaggaagattgcagaggcagtggcagatgtctggggtgaagctggagcagaatctgacctggagaccccacagatgcccagatgggctggacggctggtcaggtcatgtccaccggcatcaggagggcactggggctctgatgtctctccaagtcaggggaaagaagtgcctagaggctccgctgcttccctgatggaatcctcctccagaaccagcttctccgcctcccccgcaaggctcctgcctgcctttggtagcccagacacagctctttctgacagaggggtgtccaccagcctcctccatgcacacactggcttcagatgttgtgtattcttcaaaggtggtggcaacaaaacctcccattctaggcactcctcctccagggacctcaccatcctccagttgagaggtggggtctatgttccctttgaaactgcatggggattcccctggtggcccagtgcttaagaatccacctgccaatgcaggggacgtgagttcgctctctggttcgggaagatcccacatgccgcagagcaactaagcccctgcaccacaagtactgaggaagatcccacatgccgcagagcaactaagcccctgcaccacaagtactgaggaagatcccacatgccgcagagcaactaagcccctgcaccacaagtactgaggaagatcccacatgccgcagagcaactaagcccctgcaccacaagtactgaggaagatcccacatgccgcagagcaactaagcccctgcaccacaagtactgaggaagatcccacatgccgcagagcaactaagcccctgcaccacaagtactgaggaagatcccacatgccgcagagcaactaagcccctgcaccacaagtactgaggaagatcccacatgccgcagagcaactaagcccctgcaccacaagtactgaggaagatcccacatgccgcagagcaactaagcccctgcaccacaagtactgaggaagatcccacatgccgcagagcaactaagcccctgcaccacaagtactgaggaagatcccacatgccgcagagcaactagcccctg

SEQ ID NO: 32731 - DNA, 1471 bp, Bovine  19866881029897
  misc_feature (1)..(1): n is a, c, g, or t
ncttgtactgcttgctgcacgacaggccaataattgaaaggtcagttgctggagcaaggaataacaactttattcataaagctggcaaactgagaagattgtgagttcatgtcccaaagaaccatccagtctgggttagaattcaggctccttttgtactaaaaggggagagagtagagtcgaacacttcctggttcccgtcagtctccagagaggatgtgttaatttcttcctctctacagtcattcacaagtaggtctagtcaggttatttcctgtgagctaaacaaaggtattttagcttaatgcacattacttggggagcattatgtataatttaagcttgtaggcatcatccttttagtgataaacttgtaatagaatacagaagtttcttccctattatattattaatctaccaatttctaaccagccctatattcaatggaaggactgatgctgaagccaatactttggccactggatgtggagaaccaactcattggaaaagaccctgattctgggaaggatggagggcagaaaaaagaggggggcgacagaggatgagatggttggatggcatcactggctcaatggatatgagtttgaacaaactcggggagacagtgaaggacagggaagcctggcgtgctgcagtccatggggttgcaaagagttggacatgacttggcgactgaacaagaacaagcagccctataagtaatgtactgttattacccttagctcctggttctctgctcagagcagccatgaccatggttactaccacagcaaccctagtcctggaattagaactagtgtcatcattacaaaggctttcctttttgcgacacaatgacctagaaaaccgtgaagaacttgaggataataatagacttgcttttctccttcagggcatgggtttctggatcccactgtcagtccctgctttctggggattctggcagggtagttgccacttactcaataagaggactgaaaatccacaaaggtttccccatggaatgtcatcaaaagagctccagtattccactttggtaaagtagaggatgacaggaatacaggtgatgaacaggatgttaaacacacccagaatggagagaaataaggcggcttctccaaacttagcactgccgaggaggagcttgaacaggacctgccggagagagcagaggagcgggggtgacagtctgccttgggctccaacgtgccagggagaagcgagtgcccttggtaagctggggctggaccacggggccaacggccacgtgacggtaaattccacctcacgtggccttcagtgaagggcagcagggttcctccatgctcagtaatgtggcgatggagagttactcctcgggtacacagagagcattttcaggaatcatgggttttcacaccacgcttattcctccgtgctgtatccatacaccacatcgcagcctcaggca

SEQ ID NO: 32732 - DNA, 857 bp, Bovine  19866881293903
  misc_feature (1)..(1): n is a, c, g, or t
ncaaaattgcctaatcaatggactagaaatatagtcactgtgaatataaattctttcctcttctaatgatcccaggctaatcgttgcagttcttctggctcgttttcctgattaaaccaggagaataaagacaacaggaacatgtgactcctgcattagcaagctaagccatgaagcatgagaagaaaccagtgagtgaaagggggatagtgagtctagtataatccattctgcggcacacaccttacctaatatttgctatattgatagccgccctccaaccgccaaagtgttactcttaaatattgggggaaaaggggtggggatttagagttagcagatctaaatttaagtagaggcttctctcagtaactatatacaataagtcccctgcatatgaatgaattccattccaagagtgtgttcataaatccactttgtttgcaagtcaacaaagttagcctaggtacccaactaacacaattagtatagtactgtactgtaataggtttataatacttttcacacaaataatatataaaaaaaccaacaccaaaagtaaagaaaacatttttaatctgacagcacagtacctggaaaagtatagtagcacagtacagcagctggcgtacagaggctggctctcacattagcatctttggaattttgcaacttgaaggtcctggtggctcagtctgtaaagaatccacctgcaatgcaggagacttgagttcgatccctgggtcaggaagatcccctggaggagggcatggcaacccactccagtattcttgcctggagaatcccatggacggagaagcctagggtctacagtccatggggcgcaaagagtcaga

SEQ ID NO: 32733 - DNA, 932 bp, Bovine  19866881329770
  misc_feature (1)..(1): n is a, c, g, or t
naagaaccatgttccagactttgacctggagctggtatttcaggatcgtgctgccaaacttggaaagtcaatcagcagactgattgtagtggcctcactcattgataagccaaccaatttaggaggtaaaatggcagttttccagggggcttgcttacggtcttttgatcctgaaaatctatactcaaacccagtgccatctggggcctcctgtccacattccaccttctccgggagcttcagaggaacgcccgggtcctggtgggcttggccctggactggcggcagcatccctgcttgtcccgtgcagggctgtgccggacctgtgaggtgttcggggccgcggcgctggtcatgggcagccttcagtgtgtcagagacaagcagtttcagcacctcagtgtttcagcagaacagtggcttcctttagtggaggtgggtggaaagtgcatgattattaaaattttcattcaccagactctttatagtactctgtcttcacctgtccatccttttgcagtagtccagcctgtcatattttaaaaataatactaaaaagtaaaatatagcccactctgttctcccattcttttttttatctctcacactattatatttttagaaatcatcaataatgtagactttttagtaaaatgtgtcctgttgtaactcactctggttttataaatgtatgtgatgttgggagcattcttttttatagtgtataattctgtctttttcctgttaacaaatttcagtttcatcagaagttttttttttttttttttttttttactgcttttactcccagcagggctgtaaatgaacgatttaatattctgctctttttaaactaaggtaaaaccacctcagctgatcgattatctacaacagaaaaaggcagaaggttacaccatcgggggtgtggaaca

SEQ ID NO: 32734 - DNA, 1089 bp, Bovine  19866881502393
  misc_feature (1)..(1): n is a, c, g, or t
ngaaggaaggaagtgctcagtgcttccatctaccaacaatgtacttcctggatgaagtattttctacacagaggtgcttaaggacacgtgtgtgcctgcgtgctcagtcgctcagtcgtctctgactctctgcgaccccacgggctgtagccctccacgctcctctgtgcacaagtaattataaaattattgctattctcacgctttagtttattttctataacctgttacacagtgtcaataagaaacagatctaggcttagaacatatatgaaatagtgattattttcaatagtctagaaatcaataagaacctatagaaacaaacaaacaaaacaagtaaaagcaaatgaaatcatattccatcaatatggaatcaacagtgcacaatgaatgcaaatgctaacatgtcagctccggacgggcagtctgctccttcaacgctgcctccccagcaccacgcagcaaatatttgctgaatgtatgaggttaaagaaaaaggtcaggtatttcttctcattctgagtaccaatgatataccctgagtaccaatgatatacgtggcaaaacaccaacagaagctattgatcctcaccatcttgggtaccggaacctttcaacaagcaagtgtgcagtaacttcaacagcaactgcaggcatcggtcagttttcagcaagggcatgtaggcatttgtaccaaacttcacaagggcatccaggagaggatctaagaatatccttaatacattctgtgtcctccgcttttcactagacattaaaagacatgcccaaatcaagcatttcaaaagcatgaagaaactgtcttccacctacagttttggttagctaaagattccactggacggaattactcttaaggacgacctgttaggacggggctttccactcatgctttcccagtgagtgcagcaattcacgggagaagaaagcacaagaacaatacatgtccttggttttgggcagaagtatgaacaaaatcctagatccaacttatcagcaaattaaaatgctgagacctcgcttccatatttcagaaaaaaaacaaaacaaatatatactagtcaagga

SEQ ID NO: 32735 - DNA, 529 bp, Bovine  19866882157371
  misc_feature (1)..(1): n is a, c, g, or t
natcttcttccttatcggagagaggagtctggagggtaagagcttttaatagacgccaaactagaaagcatttggcagatggctgtgttctctggggccaggcacttattagtcagcctaatttagaacagatcactcttctctttttataaataactgttgatgctcggcaaataatatgtaataataataaggttctcttgtgcaaacaacgtttttgtttattctagactatggatcagctcaggggagtggggcggaggacaggctgtgcagctcttttccttcgaagcagctgagatggggaacatcacaaacattgcttgaacacagaggtcagaagggaaatatttagcaggagggagttttggagcacatggagcatgaacttcctctgacaaggcggaggtcagagaagactgctgtcctgccacctaccggtctttgtctctctctttccctctctactactgggtgtgggtgtattgttactttttgcttatcaccaaattaattcagctcactcgca

SEQ ID NO: 32736 - DNA, 1726 bp, Bovine  19866880164378
  misc_feature (1)..(1): n is a, c, g, or t
nattggaatgaaaactgaccttttccagtcctgtggccactgctgagttttccaaatttgctggcatattgagtgcagcactttcacagcatcatctttcaggatttgaaagagctcaactggaattccatcacctccactagatttgttcatagtgatgctttctaaggcccacttgacttcacattccaggatgtctggctctaggtcagtgatcacaccatcatgattatctgggtcatgaagatcttttttgtacagttcttctgtgtattcttgccacctcttcttaatatcttctgcttctgttaggtccataccatttctgtccttatcgagcccatctttgcatgaaatgttactttggtatctctaattttcttgaagagatctctcgtctttcctgttctgttgttttcctctatttctttgcattgatcgctgaggaaggctttcttatctttccttgctattctttggaactctgcattcagatgcttatacctttccttttctcctttgcttttcgtgtctcttcttttcacagctatttgtaaggcctccccagacagtcatgtgaagtgataaatcaagagaatggattgagagggtggggaggtcaactggagattgggggaagatgaaaaggtttctggcagggaagctcacattcctatttccattctaagtcccctgactggggccatgctgggttatttatcttcaatgacatacaacttcattatcgattagtatgaagagaaccaaaagttatgacaggcaaatagtcgttataattgatgtacttcatgttgctgtttctttcaggttatcgggggtgggggggagaagccaaatgttgcaaaataatctaaatgatttcctatattcttctacttatccagggtttctgttggtatgcagtaaattttatgatgtatgctattatgtctaagttttgaaactcgtttcctgaaacatgcttagttatagagctgaccagaattattatttactgggtttaaggctgcccggtaaaagataccttttatgtgtattgtatacaagaaagagacagtgaggtcttcatgttactatgccaacatagctctagagtgtgttcattcatttcttttatagtgattagtttgaataacagtcatttaatcttctcaaatctccatttcttcatttattaaacctgtcctgaaaggttgcctggactaaagaagttcatatatgtgaagacacttggtttcaggaacatacgggttctgaatttttctaaactttactgattcatgaagtagcagctatgagataagtgacttgaatcaatgcaaagatatacatgacgtgttctctaccctaaatttctgaggtacattcatgactaggtcagtaatagaacttaaacatgtgaccccgtgcactgtagcccatcaggctcctccatccacaggattttccaggcaagagtactggagtgggcaccattgccttctccaaatagactgagcccacagtactgttctgtctgtgacagtgatttgtaaggggtcttttatgtacttcctgccggggttatggggacactttctgccaggagctcagaactctttcagcactgactgcccagcaacagcagtgctctctctgcataagacgaccccagatgccctgggctgcgagtctgtgcaaggtgccatcactgagtttccccatg

SEQ ID NO: 32737 - DNA, 1345 bp, Bovine  19866880592467
  misc_feature (1)..(1): n is a, c, g, or t
ntcgctcagtcgtgtccactctttgcgacccgatgaatcgcagctcgccaagcctccctgtccatcaccaactcccagagttcacccagactcacgtccactgagtcagtgatgccatccagccatctcatcctctgtcgtccccttctcctcctgcccccaatccctcccagcatcagagtcttttccaatgagtcaactctttgcatgaggtggccaaagtactggagtttcagctttagcatcattccttccaaagaaatcccagggctgatctccttcagaatggactggttggatctccttgattataaatatatttaggtgtaaatcatcaccttgttacttgttctctttctgtcttatccattctgtcccctttcatctcttattctgcattcctttagattaattgaatgtatttccactttatttttttcccttggcttttttattattgttgctattttagaggctgctctatgcctcatggtgtaagtcatcatattaaacctttgacatgttttcacttcacatatatgacatttacaataggcatacttccatttctttttatctggtctttgcattattgttggcatatgttttgcctctacacaactatgaatcccacaatacttctttatttttgtttaaacaatgaactgtcttttaaagagactgacataataaaatcacacatatttctccatgggtcttaagctccatctcctcatttctggtgctctttatggctttgcacaaatcattattttcacttgttatcattttcctttagcctgaaggacttctataacatagctgcaggtgctctggaagataaattattaatatttccttttttaatgtctgaaaacttgtttcacattcatgttgccttactggccactgtccttctaatctgttaagatggttcttttcctggactagcaccatttctttacacatctctctgggctctgctaaatactagagggaatcctctgcccatcaacccagtccagctttccatttcagtgttttgtcttgcacattctagctgtcttggaccttcagctttgtcttctcaactcgagagagtctgctgggttttctatggatttcacatcttgtcccaccctacccacacacaccatcacttgaaaactctctcaaggcagcaaactgctcacctagtttgtttcccatctctttgagattactccccttcataatttggtatcaggtgtcttgaaaacattttttcccccttagagtctttctttttgtcttcttcttttgggtatttcaagaagagattaaatctagtctctgttaccccatc

SEQ ID NO: 32738 - DNA, 1281 bp, Bovine  19866880711222
  misc_feature (1)..(1): n is a, c, g, or t
ngttcctccatccatgggattttccaggcaagagttctggagtggggccccattgccttctcccatttacctgctccataacagaccattcaggccctcccaggtactagcttactggattcaaagatcattaatcttatcccatcctccatatatacggactccttgccatgaataatttcctttcctttctggcaatctcaagtatattttaagttcaattgagtacacgtcctcctttctcaatgaaaccatttgacagttctcaccatgaaaacctctctccattattaattctcaaaactcattttgaacttcttgtttatttcagtttaacaattaagaatgtattactggaaaaaaaaagaatgtattactgggtttcctgaattacacatattttctccaaaatactgtttgtttcaatacagaaaccgtccccttgtcttctaatatgcctaagtgactaccatacgcatacagtgaaaactcagcagatgcttgttttttgatagttgttaagttggtgaagaaatggtggctccattatcaataacttaatggtcaaggactaaatgctactttaaaaattctagcttaatcttgaaatagaatactctgtatctggacttacccaagaatcctgccatgtattataaatctatttttatgaataattatagatgaaattgtagataaatggctcttgtgttcggttgttctgggaagtgcttaacattttcaaataatgctatttactttttcattgtataacaggctttttaaaggctaatgccaaaagttgtttacttatgacttatttgtgctttaaaaaaaaaaatctgatgtttaaaactgcaaacacatgtttcccattagaaattaacccaaaaatgttcatttgattccttaaatggaattaagctgatacatgttttatagtaaatcatatgttttaactgagcatttaaaattcttcccataaattattatttcatattcatattacaaagattacaatgagcccaatactcatattttttttaaattttcttgaataaatgcagaaatcatgttctctctcctctcacttaagtgactgttgctaaaaacttctgtaggtgcatgcatcttgcatgcatacgtgcttagggggcttcagtcatgtctgactctttgctaccccatggactgtagccctccattctcctctgtccatagcattctccaggcgagaatactagagtgggttgccattccctcctccaggggatcttcctg

SEQ ID NO: 32739 - DNA, 848 bp, Bovine  19866880788258
  misc_feature (1)..(1): n is a, c, g, or t
nagaattgtattgaatcccaaatcatgaaaagttagtgacctgatttttccaggaagcaagcattatatttttattttttttctaattaagaaaaaatagaatgcaagacatttttctaagttgactgtaaccaactatggtggaggaacatttctaccattggttaaatggcaaagtgtatgggaaattgtgtacatcatccttatcaaaattcataagtaatcaataaaaacttagtacttattattatgtggcttttaataagtctcatagatgtaatatgtcacattttaaagcttcttctgctttaacttgtgttttatgtttagttctctgaggatctaaccctgggcacaacggggccttttctgaataacctgtggagtaatacatgctttccacaatgagaaaatcagggcaattctgttttttcaacagtccccccagcaccctgacatcacaggaataaactccactcttagagatggaaggccattccaactccattgtgcttacttttcttttttgcaacttttttcaaaagtaatgctgacaaaaataacttgggggagtagaaagaaaacttaattagttgaaaggaaaaacaacacatcaaagtctacacccctgagctaaaatgcaaaacagtgttattgttcttaccagaaatcctttcttggctttcaatatgtgaaagtgtggaggagattaatgaccctttagttgaaagactccagcagaaagtatctgtaaatcatttgctggtttcaagaaaataccctgagaaaatatcattagatgttctattttagtaatagattccactttttcttctcgcctttttcct

SEQ ID NO: 32740 - DNA, 1104 bp, Bovine  19866881035864
  misc_feature (1)..(1): n is a, c, g, or t
natatattttcagtaataatccactctcaaaaactcctgagaggtagtatagtgatcattttctgagcagcaaatttgaaatgcatatgctgaaaatctatgtgagggaatatgttgctcagttaaaccatgtacattgcaaagaaccattcattatctctacctgttggaacatgtaggaaaactccccttgagatgatttaaattttattctggatataaaatgctctgaaaataaatttaactaccaatgctagctcctagccataagacaaataaaatttaggcaagaaagtatattcatagcagaacgaatttgtgaatttttctatttgtgaatggcttggaataaacacatcgtgaatgtcactggcctagtatgatcagatatcttaaaatgtcattaagatttaattttttattaagataaaaaagtttattagaataataataaaagtttgtggtggttagatatgtgtgaaagaagaggaatataaatattatcagaaatacttattaattaaaaataattttactaatgtataacatgcaaaatacatatgtaactgacgatcttaatggagatccgaaacattcttagtctacgatttagtgtttggtctagaatcatcctttatactgactctacacatatactgcactctcttttaggcttttatggtcagttgaatagactattattgtcatgtaacagaccactgatccccccacaggtcatattcctgcaaagagccatattccatgctgctacaagtcaaactgacaaaccagcaagcaccttctgaacacttgtttagtggatcaccagcttaaatccacaggtgaatttctggagctcaaaatctaattgtggacctaagatagagtcaagaacaattagagaatgagatgacaagtgtagaatcagtactcagttgtttcaaagagaagaaacatctatgtgacttacataatcagcagagttttcatggaggacacaggctaagtcacattttgaaaattaagtagaattttagtgagtggaaagaagcagaaagagccatcaatacagatagcctgttctttatcccaagggggttcaag

SEQ ID NO: 32741 - DNA, 950 bp, Bovine  19866881619921
  misc_feature (1)..(1): n is a, c, g, or t
nattatttaagagaatgttatcttcttcaacacaccaatatctgagtaaaatgcccagaagttgctgctgttgctcctgctaagtcacttcagtcgtgtccgactctgtgcgacccagaagttgcccttctttaattctctttctgtttacttatattgagctgcatttgcaacacaacactttattgctctgtaaatgcataatatgggcttttggcttgcttcattttgtttgctttttaacttgcattataaaagtagtgaacactaagttatctgtagttttgctgaattggaaatataacagcaagatttgtgttctagcatatagtatatagaagataaaagcagaagaaacatgaaatagatatgctggctactacacaaatctgtctggagaagtttactctgcctaatggatgttagtatcggtcagcttgtgtgttagtcctgttgagttaaagtgttgtctcctttgtaatatcattgatgacagactactctttagaagagaaaataattgaattctatactgctctataggttttcttttcttcccatgggcatttgtaggtgtgttatttacagtgtaatttcacctattagttatttatgtgactcttcaaatttccatcagacacaggcagtatcatgaagtatatagattacattatgatacatatcctttgttacattagagtgttcaagccttatttttttttgacaacacagatattttatcctgaatttcttacaatagtgaggagacgtataacatgactcaaaagaaatttgaagttaatatgtcttttgatacatctaataaaattgccactattttccaaaggcagtatagcgtatcattcttattaagtgagagatttttgagcatttttacaactaataagttgatttctgattttgggagagtagtttttaggtcacggaaa

SEQ ID NO: 32742 - DNA, 746 bp, Bovine  19866881807184
  misc_feature (1)..(1): n is a, c, g, or t
nataatgattatgaataacatatacacaccgaaggatggtcaggatgcttggtacaccagcaaaagcagaaaatacaattgtagcaaagataaaagcaatgaacaaaggtaatttataacactttggatcacatgtcccttttgtagcatcaataaaatcaccttgatcatctgaggttgttaatccttctttaatgcaagaacaattgtagtatgtctataaaaatgaagataggaaacaatctttagaaatataatcataaggtaaaagctattatagtcataaaataaaaattaaatcattaactgtagggagactaggcagttttattagtaaatattttttgccgtgttgctgatatttgttgttttagtcactaagttatgtccaactcttttgtgaccccatggtctgtagcctgccaggctcttctgtccataggatttcccaggcaagaatactggagtgggttgccattttctcctccaggggatcttcctgacccagggattgaacccgcatctcctgcattgcagacagattctttactgctgagccaccaggaaagcccaattagtaaatatgcctacattagatcgtatgttgttaatttataaattcaggactaacgataaataatatcaaggcattttacctaacaaagaattgtgtacatgtgaatatacaattagtagttacttaggaaatattccattaatttaacaaatttcactaaaaatattta

SEQ ID NO: 32743 - DNA, 1481 bp, Bovine  19866880393821
  misc_feature (1)..(1): n is a, c, g, or t
ntcctcagatactggcaaagcttcaatttatttcctttcatttgccaatgacaatattcttcatttttggcctccactgggggtagctttctgatgaagtttcctttacagcatatgtacatccttgtacacacacacggaagtgttcatgtaactctagttggtaaaagagtcaccagcagatgctacacagatctttaactgtagctgattgctacagctacatcatgtcagagttaaagctagtcttaatttttctctaatacatattcgtagatgtaaaagcctcaagtctaatgtcttaaatggttgttggcctcacattcctagtgtctctaagtttacacacaaggaccattgctcacgtctggtcaatccctttatgtgctagcatcttcagcacggtgtgacgtactttctgtgtaattctctacttttcttactttgttttgaggtagccagacttcaaattgtcatgtaagtgacttttaaagtatacttttaatgttttcccaaaagttctttaaatattattttgaagctaatatgttaaagtctttctatattgaccacaggataactgtccatatttaccttggaaattaatatatttgttgctgctgctgctgctaagtcgcttcagttgtgtctgactctgtgcaaccccatagatagcagcccaaaacgcccctttgtccctgggattctccaggcaaaaatactggagtgggttgccatctcctcctccaactaattgttgaccattactatattacatttatcttcattattctcttcttagactctaaagtgacctgatctggaattaaattctctaagcctcagtagcaagattccctcttttgtcttatttccttcatggttattatgggacaaagaaaggtacactgaattatttcaagaagttgaggtcagtctagaggtaatctgttctgtgcctcttcaagaatttactttgctatccaaaagagatttttactgtggggaacaccatgcacaatggcactctatattgagtcttgtgaaacagaaagagtaataatataccataaaatatatgctatcttgttacttttaaatttaacaatacatattagtgaacttgattgattagaaattcattcaaaattgttcatataggagggaaatatatcaagtttcaacttaagtccaagaatggcctgaccaatataacaaagttcttactgtcttcaaaacatcagagaacttactatccgtggcttggtctttgaagtcaccatgacaccatcgcctctgataaaagagtttatttataacttgctcagcttatgtcttttcccactgaatcagcaggctttctaaggtttggggatataatttcaagcactgttaaacctctgtcagagtttggttggccccctgaggggccctgtgtttcaacattctctttactaagacaagacttctcaagtaaggtt

SEQ ID NO: 32744 - DNA, 1751 bp, Bovine  19866880406543
  misc_feature (1)..(1): n is a, c, g, or t
nactttatggcatgggtttttcacaccttgtgagacaaccatgtacagactagtcatttctcattaccttcatttctcagtctactgaaaacgcctggtcacttcactgatgaagctgtcttgaaactggagacaagtgctcacagaagagatccctttttaaagtcatgtgtttcctaccactttgctgaaggcactgtcaggcacagtccgccttgagcctgtggagcctactgcaagtttctgaggcctttagggttgtctgtcacagaactgtattgctagagttcccacggtccatgtgggtagctttcttcaaaccaggtaccaaactgagaagagaatcagaggcctgtttcatgcaattaccaccaagagttgcctggtgtcactggaaggtcttttgactaagctaattgtgtgaaatttttctcttgattattttgggctctaaagggaactctgaaagtcaggatttatagattgaggaccccatactagcccaaagaagtcatctgggaacaatgtccacattcataaaatgatagtggtgggactgatgatgtgaaagatctcttcctgctctaattattggagaaggcgatggcaccccactccagtacctttgcctggaaaatcccatgggtggagcagcctggtgggctgcagtccatggggtcgcgaagagttggacatgactgagcgacttcactttcacttttcactttcatgcattggagaaggaaatggcaacccactccagtgttcttgcctggagaatcccagggacaggggagcctggtgggctgctgtctatggggtggcacagagtcagacacgactgaagcgacttagcagcagcagctctaattataaatgattgtgattcttctgatttcatgttacgtatcactcttggatattatcaggataaatttgttacagcagaaaacctcacatttctgtgaggctgtgaacccctgaagaggtcagcaaattgttttagacaatatggcacatcagaataacccagagttttaattttcaagcattgtatttttccctcagtaagaaacatctttattccccaaacacaatcaggacagaagtgcaattttaataaaatcattcagtagaaatgacaatgatccttcaaagtttagtctttatgtatgtgagtactgagtcagatcttaaatagctgagacctttgcaataaaatttattgtgtattaaatatcctgctaagttaagattaaacattcaaagcttggcttttatccaaatgtataaaattcttcactcagaaataatcccagactttaaattaaatatagcctttagcaatgcctataaaaacaagggaaatattctacattaataatgtcgataaaggacagaaatggtatggacctaacagaggcagaagatattaagaagagatggcaagaatacacggaagaactgtacaaaaaagatctttaaaaaatgggccttagaaaacatcactacaagcaaagctagtggaggtgatggaattccagttgagctattccaaatcctgaaagatgatgctgtgaaagcgctgtactcaattatgccagcaaatttggaaaacagcagtggccacaagactggaaaaggtcaattttcattccaatcccaaagaaaggcaatgacaaacaaagctcaaaccactgcacaattgcactcatctcacacactagtaaagtaatgctcgaaattctcca

SEQ ID NO: 32745 - DNA, 1062 bp, Bovine  19866880454603
  misc_feature (1)..(1): n is a, c, g, or t
nagggttgaagaaactcaacaacttgatcgagcctcctgtgtagtgctgttccagcaggatgttattatttgccttgcaggggatccccagaggagcagattccatcttagtcaaatgtcagtataaaaacaaaatcacttgattcagagggcaagctgtcctgggagactctgtcagcttggattgttcatccttccctttccttctgttaatacaaatgactggcagttgtttatagttattgaaacattataatttttccttttaattaattaggtgatttgatttgcttgatttctgcaaacaagattgacaacaaaaatcccagggtcatatttcccatgtgctttaagttatttaagtttatatgttcagatccatgaatattatttagcttatgaaaattgcagttaacttacaaataataagaattttcagggaagttagacatcctcctggattgaagggatcaataatatttgttcaaggacctatcggatgtagggtattgttccaggtgtcatcggtacaaagaggacacttttcacaccaaccttagcatcatggaattacagttaaattggagaaagaaaacttgcagatacagaatttatgaaatgcaagacagaatgcttctttgggggaaagtgttcacgttaacagtctgttgttctcctcaaacaccactttttagttattatagtctaacaacaagaaaacattgtggtaaacttttcaagggaacttacctaagaacaggaaatattatcactggaagacatgagacattttggtaagacaaagttcaatttcaaaataaaagcattcactcttctaattattttgtaatttttttcataccatcttagttccaaaggacttgacccactatttatacaagtctttttaaagaaatgtataatgccagagaagaaaatttcagacaaaccagagcatattttttcacaaagttatacaccaataaaagaaaattacgataaaaaacattttgtgactttaattatagcatttttctgccatacacgacttccataattata

SEQ ID NO: 32746 - DNA, 1430 bp, Bovine  19866880495509
  misc_feature (1)..(1): n is a, c, g, or t
ncgtggtagtctatcttcttgttaagaatgtcaattatactcaactgtcagttttattggtttattaactgtagaactttttaaaggtactgatgcttgcaggagtttcctgtttgagttcattggactgcaatggtcgatccttaagaggaatttagattgggagatgtacagctctcacaggtcttattatgctcactttgcccacatatgactgttttttcatacagcacagttcatgctcctccatggtcccaaggagattgtacatgtaaacaggaattttctcttgtggggtgagagaggagtcgagcaggatgtgaaccaggctaataaaatgtgaatttataggtgttctgcttctcagcccactccttgtgtctgctaaggaccagcccttcctgatcctttaccactgtggagaactgttcttcttcatttttgtagttaatgaatatgagaatttattcagagattgtaaaaagattgtagcaagctgatgaggctacatcagtgctcacatgaattaggaagaaccaaagcccaaaccgaacaatctctcagagcttgctaccatgacattttatctgtgcaaggactttaaaaagggacacactgtttccttacattttttccctctgaatgttttagtgcattttgaaccagtccattgtcttaacaattgtctacacatttatttttaaacactaatattgatctaaaatcttcatatgtggttaaacagtaagtattatcccagagccatatggtaaccatgctgggaaccttttaatttagtatttaatcaaacaagcaaacagatattcctcatgaaaaatagatattgaacccagcatttctattacactcacaaataataaaacatgtggttttgtaagctatctaacacttttctcacagtgaaacgcttttcaaagttaatgtcaaatattcccagagagcgattcttaaaatgcctaagaatgtaaatggccaaaaattgaagttaacctcttttgacaattctataatatctaccattacagattcaaaacagggcaataattacatatgaacacttggctcgttatgtctgaaaaaaatttagaataagaagccatgcaggatgctcccacatagcattgcataaaaatatgatttgatctgatcatcatagtctggaacatatttttcttggtatttggctgtttcccccttatgcttgaaataaattttctggagtctgtgtctttgctacatgctatgtattcagaacaaaaatatctttcttctctagggagtgactgaggcaagcgcttctttacatgggatattttactgcctgaagtttttcaggttcttttgcttagaaatgttactcattacatttttaattcttactatttttttttaatgcaccaagtatcttt

SEQ ID NO: 32747 - DNA, 1053 bp, Bovine  19866880505464
  misc_feature (1)..(1): n is a, c, g, or t
ntagtgtctgacgcatagaacccaaagtttctggtctttaaaaacaatcaaacaacaacaaaaaccccactaccgagtcttaatgtacacattcctcacaaagagatgcctgtagaaacagataatatcaatagataattcgtcaaaatgccaggtaagtatcagcaaaattttaaatgtttgttgaaagatataaaaacaaattattctcttctaaggagaaagaggacaaaagtctcactgccaaaaacattccttggaatcccatttcccaaatgacctaggtttttaatttcaagacaaaaatacctgattttaaaagataagtatctaccctctgggaaaaactgatgatttcttatttttattgccataaaaggaggttcaggaagcctctaaattataggtttcaagcaaccatttaatttagattaaattagacagcaattgtatgttaaataaatatgaaatggctctgcatgtatttgttaaagattaaaccttctgtaatacttggcttctattacacatttgttattgctgatttttaaaataaatcaccatttaattgaaatacttaaagaacatttacaaaggaaagtatagtatttagcaagacccatgagaatctaataagcccagtagggtagctctttcaaaagtagccaattctccaacattgtggtagaaaacttgtagtgaaattgtggccagaatcctacacaatctttacaaatggcatgattcaacttgccaatatgaaaccaaaaagagttttattttaaacattttttatcaaagtagttttggtctgtcataggttcttcccatctgccattaaaaaaaaaaaattgaaagaattatagacggatgaaaataggaactccttcatctccatcagacacttgagtataactatcattttggaggggaaaaatgaaataccccagaggacactgcattgtgatttttatcctgctttcctaagttggagatgtgcaacagaaaaaagaggcttcccgagatcatgctaaaagtaggcatcttaaggca

SEQ ID NO: 32748 - DNA, 2375 bp, Bovine  19866880520510
  misc_feature (1)..(1): n is a, c, g, or t
naattgcagcacgtcagacctcccctatccatcaccaagtgccatactaagataattttagtatttttaaaaataaagttttaagaaatataaaggaaatatgtttgaacaaagaactattcctgtaggatataccttaccactaacataccaaagccataatctgggcatttatcctaatgtcagacattatctgtctccttgtccaaaatccagtcagttactaattcttactgactcagccaataaaatatcccttatttctagctcttccttccttataatgatggccactgctttactcaaggcaaccatcaaagggactatgccatcactccctgccttacctcctagtatccaaaaagaccattcattctggactgatcatcggtcccttggctgacattcttcaaaaccaaagccttcaaataaagcatgaagttcttcatatgacatacaacttcctgcccagcattgctttcttctcctctccgatttcacactatttctgctccataagctgcagacataaccaacactttgaagtccctactatgccaggtcactaaaatgctgctagaaatgatgtttccttcccctgtaattccttccttcccttctcactgaaaaacattcccactcatccatgaagaattatttcacaaatatctagcctgggaagccattcttgatacctagggctgcaaaggactccatcaacatgacttattagtatttaaagtggtcaaaatttcttcaacaattgccatcttccggcactgtgactgccttatacaaatattcaatcaatgtctgactgtatgaatgaataaatgattaatgaatcagtaaattagaacttgttaagcatgagtcccagcaaacagcagacaagagaatcatatcttactacttgaagatgggaccctaatcatgtaggctggtctctgcactgcagtggaaagtggatgagtttgaaaactgcgtctatgcatccatcccattaaggagactggagacttgctagacagcactgaagaattatttagacaaaaacactaaagaaacagattctaagagatacttaattcagtcagtctcaagcattagtcatagagaaagcaatagcttaacacagaccaggaaaagacaaacacttctatactatactgttgcagcagctcaacatatttgagactctttacacagaggctacacttagattctttataacaggatgaactgacactccatttttcaagaaataattaaaaaatgctgagtccttgaaaattctgagaaccattatccgtctcaaaaagatgcacagcttcctgctgaaaaacacaaggtcagggttatgaagaaccgtggtggctaaacagatgtttctagaccatgtacatgagatgtgaataaaagtcagtctttggttaatgaagtccaccagctactaccaattgctgccgatgcctaacatgggaggatttagcacaaaagaaatgggagatgcacttctaatgactttgatgtccttgttgaaaaaaactcaagcacttgagggcataagtggcatcttcttatcttccagctgaagatcatgaatttagatagaaaataataatgcggttaagaagtgggctggcgtcagatcatagagcgaagaattctgacagatttggaatttacccaataagcaattaggagccactgaagttctttgcagagggaagtaagtttgcattctaactcataagttagattcatgtaaattgaatttatggaatcaattaagtgtgacataaatgcctctagaatctactaaaactataacactttataagacttgaagacagagtactaaatcttaagtggcaataaccctactaagctttattgggccttggaatcatggctaaatattcttcagtctcctatacataacctctttattttttaatctgaaatcctaagggtgcttttgaacagtgtacatcaaattaatagtcttgcaagagtgtgagaatggtgcccaccccaccatctatagagctacatgctgctgctgtcgcttcagtcgtgtccgactctgtgcgaccccatagacggcggcccaccaggctcccccatccctgggatcctccaggcaagaacactggagtgggttgccatttccttctccaatgcatgaaagtgaaaagtgaaagtgaagtcgctcagtcatgtccaaccctcagcaaccccaaggactgcagcctaccaggctcctccatccatgggattttccaggcaagagtactggagtgggggtgccattgccttctccgatagagctacatataaacctccaatacagcattcctatttataaagga

SEQ ID NO: 32749 - DNA, 1047 bp, Bovine  19866880532581
  misc_feature (1)..(1): n is a, c, g, or t
ngcttaaaatatttaactttgttattgccttatgtgtttgttttttaagtgctattgtgaaatttatatatgtgtatttgttttgaactgtggtgttggagaagactcttgagagtcccttggactgcaaggagatccaaccagtccattctgaggaaatcagccctgggatttctttggaagggatgatgctaaagctgaaactccagtactttggccacctcatgcgaagagttgactcattggaaaagactctgatgctgggagggattgagggcaggaggagaaggggacgacagaggatgagatggctggatggcatcactgactcaatggacgtgagtctgagtgaactccgggagttggtgatggacagggaggcctggcatgctgcgattcatggggtcgcaaagagtcggacacgactgagtgactgatctgatctgatctgatctgatatttgtttcacactttacctaaaataactttatgaaaattgccttgaactaaggattgtgacaacttttataaattaatctttactgaactctgctgaatgattatcctgatatttcatttttacctaaacctagcactcttcttttttaaccttcctagttacatttcttagagagttttctacatatgtcatttttttgaggtgagaaagtaatttattggactgtttcatgttttcctttgtttaatttaagacaaaacatatttctggaatggactgttgcagaggaattgtgtcaaaagcaaagtatctaataacctcttcactgcctttgcaagagctcagtattaaaacatttgtctagggcattaaaatgacgtacagagtgatgtttattgctctggaataaaaagccctgcatgctgtttttccagaaattcttttctttgtctcactgcatacttggatttgctatgcaatatgatttttattccttgagcccagacttcctagatataccatccttgatctgttcacttcttgtcttctatacatcaaacaatgcacgcatcattggagtctattat

SEQ ID NO: 32750 - DNA, 830 bp, Bovine  19866880534279
  misc_feature (1)..(1): n is a, c, g, or t
ntggaatggattgagaatgcaatacataccacagagaaatacattttaaaaacttttcttgctccattacaaaaaagtgtccaaaagaaagttggtcaaaatctttacttttttctctttattttttccttttatttatttatttatttttttagctttagttatgtctactccaagtttgcctctaaagtgttctttggacattttggcgaccaagaagaagtttttagcatttgccttttaaatgtgttggcagtacaagttttccaagttttgaaatgaatcaaactcaaatgtagagacagttaacaaaggaacttaaatctaggctgtgagcacatacggtctctctccttgtcacatgtggattgattaaatacacagaatatccaacatttggcttttcttgaatctgctgatacgcccacaaaggcactttggcagccctctttatgttttcatttgttttccttgcagagagcaatgagctctgtgccagcgtcacagaccgcagcctccagggcaatgaaggcggattcagacagttgaatgggaagacgaataagttgttccgccccagagctgactctaatgagtgattttaaaaatggcttctttcccatttttaaaaaaatcattgtttttgaaagtaggaaatgaatgagccatgtatttcatacagtaaaatacaaacttcactactatagcttaatacatttataaatacctctcttaatcctcccaccacttatggccccttgtgatgacataggcatattgcctctgggttataacaggacatacatcttctccaagctgttggttcccag

SEQ ID NO: 32751 - DNA, 1952 bp, Bovine  19866880538932
  misc_feature (1)..(1): n is a, c, g, or t
ntaaaatgctaagatgcatagcaagactacatcacccatgtcattcccagatattctgctggtagaattcaccacagattttgtggtgtcatattatttgacagccagattcaattataccacattataccagaacctcaaaaagcaaagtggaatccagcaatgatgtcattggtgtccatcctatgagaagaaccgtagacctctggagccataactagattattcttggagaagggttgatccgtgatcgtctgtcatgcgacccagtgctgggaaaccagatgatcctgggaagaaaacaaaatgccccaaagggcctcatgcatggtatatgaggccttcttagagtctgctttactcttggtgatatagtgactgttggtagaatagtgatatcttgatagtagcaataagaatttaaggtcattttcagcattacccagatgcaaaataactttgaaaataaaggctaaagttgacttcagtggaattggttctgatcaaacctatttgtacctattgtgtatgtcttagtcatagtgcattttcctttggcttccctggtggctcaggcagtaaagaatccacctgcaatgtggaagacctgggttccatccctgggttgggaagatcccctggaggagggcttggcaacctgctctagtgttcttgcctggagaatctccatggacagaggagcctggtgggctgcagtccatggggtcacacagagtcagacatgactgaagcgagttagcatgcatgcatacacagtatacatgtctaatatattttagatatttttgcaatattttccatgatagttgattttattttaaagaaaaagacataattacttataccgcatcttaacatatggaagaaaaatatccttatggaactgttggtactatacagatgtatatatgtttttaaaatgattgatattctagaagtaagcatactataaatgctaaaagccacaccaacaccaattacactgttttatatagtcattgcttgataatattttgttgaatatatagatataaacttgagagtatatttggatctagcataatagctgagcgatctttgagaaggtacttctgcattttcattattatctatgaaaattatcataaagacccatattcttagattgttatgagaattaaatgaaataatgttttcaagttttttaaaagctacaaaagtagggcttccctggtggcccagtgtaaaaatccacttgccaatgcagaagatgggtttgatccctgatttgggaagatcccacatgactcaaaacaattaagcctttgtgctgtgctatgcttagttgcttagtcactcagtcgtgtttgcttctttgcaacctacctggactgatagccagccaagcttctctgtgcatgggatttcccaggcaagaatactggagtggctttcatttcctcctccaggagatcttcctggcccagggatcgaacccctggggtctcctacattggcaggcagattccttaccactgcatgacctgggaagccctacatcagagctgaggttgtatgtttagaatgatctcatccctgtactacaaacaatactagtcttaaatattagagaactaccttgaggagttttcagtgaaaagcttatgtttgattgtagcacatacaaatgaaattttctctccttaaattttttctatttctcttttgggcactgaggggaatcttgcattcttgagatctagaccaaaggctacgtgagtgtatataaataatgcaggcttttcaacacatggctaatttccatggtcaaactttctccagttcttatccaaatctcttccacatcccttctggagagagagatcttaattttctgtctaaaatctgtttgtattcaagacagtcattcatatcagaataatagaatttaa

SEQ ID NO: 32752 - DNA, 1014 bp, Bovine  19866880636246
  misc_feature (1)..(1): n is a, c, g, or t
nctcatgtgcacacataaatacctatacccgatcatgtatgtgtattgtgggctttttttaattgacggtggagttgcatttattgtacttcaggcctttgtaaatgcacgtgaactattgtaaactagaaggcctttgtaaatttcagttgccatcctctttattttcttgtgattataagcaccttgagggcagtgttgccgtttttggttcaccacctggcttgttacggttcttctaatatggcaggtgttcaataaatcccattgaatgaggatctgtggttgactgattaacttcttggcaagtgaaacaaatttaatattccccttgagttcacaaatggtttatgcacttcacaaaggaccatactcagaatcattctggccttacaagtatatgaccaacaacttttaagtactacaatattaaggggccctaaaatgaagactgcctcctatccacatggagtgttttcatttatattaccctgttattgcacacatatcagacaggaatatggtttacacactggaacctccaaccaagcagtctcgcgctggtctttgtgtgctctctgttctttgcgaatcacggattagaactgcagcctttctgacctgcaataaaactcacacgtttccttaaacatatgctactatacaatgaatttcattgaaggagaaagtgaacgtgaattctccctgactgattcttttcagctttggggggctatggttagtaagatcaaataatgccagtcatgtcaggtagtgccaggaacttcaggtctccataaattctgatcctggaaactgcatgactgaattagaaagaatatttttccctgtcaagacttcagacttattttaaactttgggcccttctactcaacttttctgtgacttctcagacaaagcaaaagcaaaagccatatttaaagagaaggaagtggcacaaccctaaatggctggaaataaagctcactactggaaaatgccctttaagagttt

SEQ ID NO: 32753 - DNA, 821 bp, Bovine  19866880660525
  misc_feature (1)..(1): n is a, c, g, or t
ntcttgcctggagaatctcaggacagggcagcctggtgggctgccgtctatggggtcacacagagttggacacaactgacgcaacttagcagcagcagcagcacattcagtatactgacatggatatgatctactgatcttgttagagacatatttttaactaacttgtgaacatactccaaactgcactaaatatctcactctgtcctcatattgttccccacactcttctccatgattatgtgtttgattcctgagtgagttatttgccatgttctgagatgaagaattaaagagagatatcaggtacttgggggagggggtggttggaggcaagaatttgaacatgtagagcaggggatcccacaagacacccagttcaagatgtttggcagctatttggcttgacagctctgcaactctaatcccaacactgtcatgcctagctggaaagcaagtattataattaggtcaaagaaaccaagaaaaacttggccacctttagaaaaaaaaagcaccatcaacaacagttagtgtatctcctggagtatgttcctctaggaaaactccttcttccattccttagggcttctatttacacctctccttggcctctacagtgaaatgtcaagaatacaaagaattatttgattttgtctgaggatagagtttattttaaaagatgttaacaaattcaagtgatggcagagtctagtttctataatataaaatttcaaacagccagtttctgttcttccatccctttgatggggcccaaactaaacatctccacattcattacaaaagacctctgtagagta

SEQ ID NO: 32754 - DNA, 1205 bp, Bovine  19866880712651
  misc_feature (1)..(1): n is a, c, g, or t
natctgggaaatgtggattctccttacatagctgtaaaacatctatgaataaaaatgttctaccatgagttctctactgaggaacagtctggagtaaagactattagatgggaatcaacaaccttaattaagttgttctagggcagtggcaaactagcctaatactttaattaagttatttaattctctggggcagttttttttttttttttttcatttgttaaaaaaaggtggttttgtttgagagtctcctttttttaaaaaaaaatcaaaagtaataaaaagctcaaaatagatgtgtgagaacaccaaatataaggatttaaaacagacttctgtctgtttgaacttagtgttatttgtgaagaaatttggtatcatactttgcttagaagtaattatctggggaaactgaaatttcattttcccaaatctattagttactgcaaatttaagctaagataggccatttctgtttaagtaaattagtcaaaagccaaaagagaagttgagctcaatgagagattattttcagaatctctttgtatcatattcaaacattacaacttaattaacaaaggctacagctctaaaagcgcctgtaaattccgtttcttcaatgtacctctctccctgtgtccctattcatctctgaaaagtcaatactttctagactgtaacatttgctgagactttaatttccaaataaatttattcttttcagttcttcattttattgaaactgtaagttgacattcaagaacaattcaccctaatgttggaaaaaaaaatgcttttccattattgctattttgaatgacttccaggaaagaaaacagattacaacttttgataacatacgaagaaaatattattatcacagcttgaaatctgttaacagggactttctaaggaacaaacattaaagtacaacagaaatttaattacaaggagattttccacttgtcagaaatatttgcattaatgtcagtaataactgcaataaagagactattgtctcgtgttgcaaaaaagagaaaagatgaaagagatccccataatccttgttacagacacactaaagggtcattgattatttagcttttctttgggataaccctaaacaaaatatggagaatgcaatgggcaacccactccagtactcttgcctggcaaatctcatggatggaggaaggagtctggta

SEQ ID NO: 32755 - DNA, 812 bp, Bovine  19866880735662
  misc_feature (1)..(1): n is a, c, g, or t
ncacgtatgtattttagtgagggtgttgatgaaagtgatgtagtactcataatacttcattcaaaaggcagtagacaggacaaaatagtgctggaaaccaaaaatataattgtgtcctttgggaacacaggacatatttgatgatgatcatgaccatgctgatgatcaattttgaagacaacaaaatgccttcatttcttagcgtacaccatctggttttcatttcttttgaagatgaaaatgccctcctatggattggctcagcaggtgtgttgtttcctactactactttaaaaaaaaaatttactcagtaagtgatttcattcctgaatcaggaaaagaagatagatgctgctagaaatgacaatgtcaaactcatgacagtgattatttcaagctcagaatgaatcacttttaagacaggaacctttggtttatttgttttgcggctattaggcatttaatacttccactgagacagagtcaactttctaaagataaatagtaaaaaaaaaaaaaaaatttaaattgtcctaaaataaatgctaggataaaaaataagtatgaaaatgctgattggagagaaattgtctcccaggagaacttccacatgatcactttatatccatatggaatcttcaaagaatcctagtaaatccacagagctttggggaaatccttctgaattaaaatggtactgaattgttggggaagaccagtcttttagtctttgaaatctttccgtgaggagctgtcctgctttcaaatctaccatgttgccagtgagaggtgtgggagaatttgcaaaggtt

SEQ ID NO: 32756 - DNA, 1480 bp, Bovine  19866880822017
  misc_feature (1)..(1): n is a, c, g, or t
natctgagaaaacatgatctatatattgtttctgttcattctacgaaatgtattcggggcacgaaaaccttttctgaagcctcttatagattccactctttttgtatgtgcctgatgctcttggtacatggagatctaagcagtcctctcctatctgatcactgaaaatctgtcttgttcctacagaatggatttgctgtggtgaggcccccaggccatcatgctgaggaatccacagccatgtaagtaccaaggactgctggccatctcccagcgccacgattcctggcggtcacctgccccatgcatgtctctgaagcctctaattgttagcagatggactgagaaatcttgcgaggtactcccagaagcagatttatggcttcagagatcatatagcattttaaaaaatgctctgaacattatttataatggttttcctggctgatttgctttcttatttctctgttcttctctattccgcagggggttctgcttttttaattcagttgcaattaccgccaaatacttgagagaccaactaaatataagcaagatattgattgtagatctggtatgtattcctggccagagctgcattttcagtgactctagataaaagggactgaatttgtatttctctgttaggttgccttgtttttagcacttgcaaacaactgaaggggtgtgtttcctttgaatgtggaaactcattaaattcaggaattgcagttctgaaaccataaacattcacgtttcactttcatggtgttaactgcaatttaatgagaagaaggcgcagatcggggcaacttttatgatccttaaatgaattgatacttccacagttaaaataacccaacagaacctgaatttacttttccctgcagaatatagactttaaatagtcagatgtgctggaaagaatgttgttgctttggtaaccaattggccacttcccctggttagcaatcatgttgcttgttgtgcaacagtggtattattaaaacaagtcagcgtgtctttttttttttttttttttcctgaaaagatctcagatcatgtatgccagtttgggatgactgccggcaggaaccctgcgtgattaagagtcagaggcattcgattagtcttgccttttaacatgatgcgttcttacacaatagagttataatttgtttaacaaatggtttgtttaaatgcagatgacacttggcatgttgtctatagtagattcacaaataatgagctggatatctgccgcatacaaaaggaccagcccaggaaagggcgaaagaaaactgactggtgatttatgagccccgttttctgtttgcctccagttcacgaggaggtgtaataggttgtctgacaaagcatagacaggaaatgaaccctggcatccaaagcgaacctgctgcatctgcacttaattaatttttgcaggtgataaaagatttaaaggcaaaatatgttagaa

SEQ ID NO: 32757 - DNA, 1196 bp, Bovine  19866880831555
  misc_feature (1)..(1): n is a, c, g, or t
naggggatactgaggagctttggggatgtcatcttcagtctatccctataacacatggagagctccacagagctgttcctttctgcggttgtcccaccgtgttcaacagggaattcatgccaaaacacaatttaataagtgcagtttgaaaggatagccaaaaccacaccatctatgcacatagctttctgattggctaactttatccaggaataaatttccatgctatttagcagactaaataccctaggatgtatatccttcagtcaatatttttaaatattacttctcagaaaccaagttttgataacagtcaggtcatcaaggttatcctttgtcacatccaggagtgtagggattgcatatagctaatcctgattgacagcgtttccaattccatattggaaacctatgagattccagtctgaattgtctcccactccaactccaccaaaaagcataccaaggcaacatctttagtttagatagtgacaagattactttaaaaacagttctggttatactaaaaacacatacattgtataatgcagcccacataaccttagagtttaagctcttcaaaagtggggatctttatccattttctttattgctattttcccaacgaaatagtgtctggcatatagttgatatttaacaaaaaattggtaataattggctagcagagtgataaggaataaagcttttaagaatcattggtgattaaaaattgaacttatattattaacaatgcaaatatttatatgtaataaatggtagtatgcaacatttttagtgtctacaaataatgtcttctgaacatgtgaactcaagaatgtcttatactaacttagatgtcccccaggaacccatgatccattggttgggcagtactgaataaaagttttgtttttattattttggccttgaaatttgtctcaaaggatatctgaaaatacctaccaagttgctgagaaaatggtgtgattaagtacatgggatatgtactctgctgagctacatttcactcatggatccactgtgttctagcctggatgaccttaggaaatatactttacttctctgaagtttttgaaaaaagcataattacatctgtacatctaagtgttgtgaggacaaatgaaataatatatgtaaagagtttcacacatactaagagctgtataaagtgctcc

SEQ ID NO: 32758 - DNA, 1974 bp, Bovine  19866880843938
  misc_feature (1)..(1): n is a, c, g, or t
natcaattttctcaccatacagcagaggtatatacatgcaaatattattaatcctgtttgcctttttctacacaaaaacccagagaaggtagtatctcagttttaaaatatacatattttatatacactttcatccatttcctcaaggaagtatttctgcaagttccataatgttcatctgcttctatcctaaatagcttcaaagcacttctaattttcttgacttaatgatagcagacagtgatgagggaaaataattttttcccattattaattatggtattgattttaatgcctttaaaaatcatttaaaaaatcaatctacttcagcttttatgaacagttttaggtttacagaaaaattgtgcagaaagtacaccgagtttctatatattattcccttccccaggttctcccattattgacatcttgctttggtgtggcacgtttccaatatacttttaaaatatgttttgggtaaagtaaatattaaggattaggctacacttaatagatactgaaagcacattatttttaaaagaaatttttacctttatattaaaagtacacaaaagagacatatatacagttgtgactatatttttctacaaaagatataaataggacatacataatccttcccattttcatgatgttttataaaattctaagtctgctctgaagcttccttttaaaaatatatgcacacaacagtttattttctgaggccacatgggccttttacttcataatgtgctaattgctctgactctggcccaagctctttgcggggctgcttgcctctctctgcctgctacatctgtgtttacatgtataacgggatcactcagagccctgctgcagatcctttcagcttccttaaagactagacctcaaggaatctaacctaagtacaagtcacccagatcagttactctaaaaaccttaccctgattggatctccccttccactgacattttgatgcaaaatcacaggcaatctatcccctcaacaggatagttcagttcagttcagttgctcagtcgtgcccgactcttggtgaccccatgaatcacagcacgccagggcctccctgtccatcaccaactcctggagttcacccaaactcatgtccatcgagtcagtgatgccatccagccatctcatcctctgtctcatcctcatcctccccttctcctcctgcccccaatccctcccagcatcagcgtcttttccaatgagtcaactcttcacatgaggtggccaaagtactggagtttcagctttagcatcagtccttccaaagaacacccaggactgatctcctttaggatggactggttagatctcctcgcagtccaagggactctcaagagttttcaataccacagttcaaaagcatcaatccttcagcactcagctttcttcacagtccaactctcacatccatacatgaccacaggaaaaaccatagccttgactagacgaacctttgttggcaaagtaatgtctctgcttttgaatatgctatctaggttggtcataactttccttccaaggagtaagcatcttttaatttcatggctgcagtcaccatctgcagtgattctggagcccagaaaaataaagtctgacactgtttccactgtttccccatctatttcccatgaagtgatgggaccggatgccatgatcttagttttccagcgtttctcatgatatactctgcatgtaagttaaataaacaggatgacaatatacagccttaacgtactccttttcctattcgcaccccagtctgttgttccatgtccagttctaactgttgcttcctgacctgcatacagatttctcaagaggcagatcagggggtctgatattcccatccctttcagaattttccacggtttattgtgatccacacagtcaaaggctttggcatagtcaataaagcagaaatagatgtttttctg

SEQ ID NO: 32759 - DNA, 968 bp, Bovine  19866880870082
  misc_feature (1)..(1): n is a, c, g, or t
ntactttatttacatttgctttatcgttctactgcctatgctgtgttggaatttgaacctgagacatctgatttacacttatcttcatgatactcaccaatggaatatgtttcagaagttgaattaactaatcaactcagatgaatgactagtttgagtaataagaattttgcttttgtttttattcttcctctctctctctttggtagtagttaatgcatactggtaatcagtttgcattgttactcttcaattaatttggaagatgcttaaaatagcctaatcattatatagagattaatctttaatcagatgccttttttaaaaagatataaccttttatgcaatcttaaaagactatatcctttagtaaaacaggttctaattagagacattgtcctgctgttcctaagtagtaataatttaggaacaattcatgggccaagggattatataaatttccccaaaattatagatactgatgataaaaatctagtgcagaaagaaaaacttttaatagttcaatgggaaaaaaagaaaaactatagcaagcaaatcattcacaagttaaaactaaagaagatactttagaaaagaatttgcatttacttccttttacaaatatgctatttttttctgaattctcgattaaaaaaacgggcatagtggtttacatatccaaatatgtatatcattttttttagataatcttgtgtaaaaaacccaagaaattcttcttcccattttagaggtgcagaaactgagtttcagatatgtctgaatcacttgctggaggtaccatagctagttagcaatggaacgagccatagaactctttattctgagtttcagtccagagctctttccactgcattacccaggccctcaatttgcagcagaagttttgccaaagtaacacagaaataaaaagtctagtcccaaaggtgcttcaatgctaaaatatgaga

SEQ ID NO: 32760 - DNA, 4606 bp, Bovine  19866880871716
  misc_feature (1)..(1): n is a, c, g, or t
ntgcctgtgtgttggtcctggaggagctatgctggagttgcgtgcactttggtgcacagggccaggttctgcccgaggagcttagggggcagggagggcttcctggggtgttcaccaaacccatgtgtgcacagctctgaagtaagttctcaaagtcctctcccttcccacaatccagttgtaagataagtatcattctgaagttctcagatcactctgcatataaattaggtctggaaaaaatgtttaacttaatgatcctaattctaaatgttctccctgaatattttcttctctgaagtggcatcatcatatcactcactgacttctcagaagtgggctctggaaagaattcagtgttctctagcaggtccttgccacaaagagcaagcaagaattcgattagtcttcttcccaagccagtcttcatgactgtgacccacccttaggcaaaaaaaaaaagaaaaacttggagacacggtaccttgataccatttctaggacttaaatgatctcattaaattccaatgctagatatcatgttgacatttgaggaaatatgattattgacaagatgtaagcctgttatacactatatcacttcaaaaggagaagggccattaggccataattacatcagaaacagtatacacatttggctggtttataaactgtcactttcagaagtaccaagacatataaaagtctccaaaggttccattatggccctatttccaacagtattctctgacaaactaaataaattactgcatgtattggacctttgaggcttggggcaaagaatggaaaaattatttacaaaagcttgaaaatatttaatcactaaggcaggggggcaacggtgttttaattagcaggtcctcgggccattggctgactggaggctttctcaaacaacccaccaaatgcactgaatagctgtttgccagccttagggtcaggcctgagatgaaacagataagataattggctctaatgaaatccagaaggccttggctttcttgtttgagcttggatttgaaaagtgcgtgtggaagtgaggcttaattcaaaccagaactgagctaggcccgtttctcagtgactttgatattgtttgaagttctaaaagtgttcgccacaccactagcctgctgggctgggcctccctggtacccttaattactgagctttattgctgactttactacacaggaaaggggccattatatgttccatcaacatcagctcttctcagattggaggaaagggcagggttaaaggccactgtaggaaggcagaaacttcactttgaggtagtcagatcgtttaccagtgttgggtttcaccgttatgcgcatacattccttacaacacagaagcccgatttccattttttaaacaagtgattacttttcaaaacatttttgtttgtgcctgttttttgcagagaggacatttatttttaggggctgatatggttgcacctgatatattgaagggagaaaaaaaaaaaaaaaccgccacactccccaattaatcatcccaccagaaaagtctgggtggattctgtaataatgaggattattattaatgcccctttgaagtggaaataagtgaggaaccctcctatggtgtgaaagttgttttgacaccctgaggaataaagacccctcaggagactctacaaaattaaaccccagcttctagagtctctcacagaggggtgagacaaaagtgctctcaatctagttcgaagccaagaagcagaaactaggagatctccctcttaggggttggctgcagagtccccaaggcttctgtcctctccaagcttgctgctgctctgtagctttttgtctatttggtaaagacgtgttatgcatcttaacaaacttgttcaacccttagccctcgtgatagggggaatctagtcgtgctagaaagccaaaggacatggagttcaggcctgcttcctgtcccgcttatcacctcttgggtaggaaaggcatgagcgataccatctgagtgtgctctttttgaaataaaaacttgactgtttttccattatttatgttagtttgacatgaatgagttccaatctcacgcatgatgctggggaccattcagccggtgctcctgtctgagtgttcttatacacaggctccgctggacacactctccgcacgggtgagagaccatacggagagcctagggaatcagtattgagaagacgggactgtgagccttcacttcctaacctcctaagagaaatgaaagggaccttgacagacttgacttgtcagtgatgaacaagatgtcaactcagatcaaagggaggagagtcgtagggtattcagctaattcaaaatgtatgtttttattaagcagtgttattgactgaacgcctttgtcctcccacaccccccaatttcatgttgatgctctatgccccacccccttgtgatggtatttagagataggccctttggggaagtaattagggtttaaatgaggtccctagaccagggccctggtctgatgagattagtgtctttataagaagagacaccgtaggattttctgtctctctccccctggatgcgccaccaaggaaaggtgctctctgtgagcacttggcgagatggtggccctctgcaagccagagagagaactctcaacagaatgcaaccgagatggtaccctgacctcagactttcaggctccagaattgtaagataagtttttgctgtttaaaccactcagtctacggtattttgttatggtggccgaggcagagtactacaggggccccaaggatctggggaaacagttcaattatggctctaaatttgaggcatcagcaaaagtattttccacactactctctgctaaaactatacacagaagacattaataagcacttctcaccaataagtaatgtcgtttggtaaaaaaatctcctcttgataatttgcaaaagcatattaaagacttttagaattgcagtagtaaggaagtcttagattatttaacacgtttcttcaaattacttgagcgtgaaattctccactcccccagtttcttttcccccaaataactgtaaatattacagaaactagcattccacagtttgagaaatcctgatatacagggagcaaatttagctggcatgttagacagttcattgttagttaaataaacgtgagaatagaaaataagtatatcaatactttagattcaagcaatctaataaaaataactgtaatatattgcataatatacaataaaatattttattatcacatacactgaccacttgggtgagcgatattccacagactgtcttctccatttcctactggttgcttccagatggttcttagataacacatggttataaagacaaagaagggaaggagaaacaggaagatcaacaagagaggaaaaaggggaaagagggtcagtttcctttgatatcactgttaaatcatccagtgaattttcttagggtaacgttactgccattcaaaattatagcaaattggtgatattttacagtcattgtgtatattttgtttcagtgtaactatgtgagcatatttcccaaacttattagatgagatgtgacacacctaaacgcatggatttgttttttttaaaactcttacaattggcaactaattgcaaggtgaacatctaattggttttatgggtaaatccatttatggacttacagaatagtaaaaccctcattttgttattcatggctacattctgctgaggaggaaaaggggaaaattagtttgtctttatttcaataaggggagagtttcaattaagtaaatacccttcatgataagaaagcacaccctgaaataacacagtaagagtttaactacattacttctcctggttaaaaaagaaactggctctggggatcctatagtatcatgatgtggtaatgtcatcttgtttccaaagataatattactagacgtacacatgtcctgaactttagcaaaccactgctctggtcatcacatatttattcagatgataattacagttatcagggcaataaatcggcaaagaccttcatcattttcttaaaatgttcttttgttttactgcatgtttaaatgttcaatcagtgtctttaggttgtccacataggttgaattatataagtgaaagaaaacccaaataaaagcacaagcataagccaaaaaattatttatatcaaagcattcagaagtcataaatagcattatgacatacaagccttcatgacatttaaccgattcaaaaaaaaaaaaaaaaggagaaaatacttttcttgaataacagaacaatgtagctttccttggctgaactgatcctgattccaatatgccaagtatgggatgagcgtggggaatgtggtgtggctagaagacgcagtgatataggctcttgtgctgggagaggtagaagtgtgacatctctcatcccaaaatgactgttgagggaagttttccttagaataaacctgcagaatacttttcctccatgaatcatcaataactacttcccgggcccaacattaaaagaaggatctttcttc

SEQ ID NO: 32761 - DNA, 1517 bp, Bovine  19866880879696
  misc_feature (1)..(1): n is a, c, g, or t
ntgtaagaaaaaatagttgagacttttctttaaatgagcttgtaaattccagtcaatcttacgttcacttcatttttttttccaaaaaattctcccatatgaaatatttaaaatcatattaattaaccagaaaagaaacagctattttaaactgcaatggctatcaccttactcatacgtttgacatgaatatgtgtgtgtgtgtgtgtgtgtgtggtgagagagagagagaaagttgtttactatcattcccaacagccattccattaaaatccttgaattggaaaataatcaaattaatgaagaaaaatattttacatgttctgttcttaaattggagaaggcaatggcaccccactccagtactcttgcctggaaaatcccgtggacggaggagcctggtaattatcttgtttgtttgtaccaaaagaaaagttttaattttagaaaacaaacgcagtccattaatttaaaagcagtatttttaataattggtcacccttcatcttccattacgtagccattttggcagataatgtaggaatgaaggattattaaggttagatgagactggttggtactcaagtctcacagtttaattagcatattgttctaagacaagacatgaaatcatttggagcctcagcttcttcatctgggaaatgggaaaaatgatatttacttctcaatttcacagagctgatgagagaatcaaataatatgacggctgtcaaagtatttcataagtggataactcttatgtaaacataaaatagtatttttcaaaagttttgaattactcttgatatttcagctttttctttgtgagaggatacattgatgacagatccatagttgctggaagttgtactttctaagttttaagggcaatttaaataagagacaagaagtttttttttgtaaaagtagtgtttgcattctgtcttttcactcagctgtgtccaactctttgtgacccaatggcctatatagtccatggaattctctgggccagaatactggagtgagtagcctttcccttctccaggggatcttcccaacctaggaagagaacccaggtctcctgcatttgcaggtggattctttaccagctgagccaggaaggaagcccaagaatactggagtgggtagcctatcccttctccagaggatcttcctgacccagaaatctaactaaggtctcctgcattgcaggtggattctttaccacctgagctacctgggaagcccttaacaaatgataggacacctgaattataaatttttaaaaatcagactgttttaaaccaatcaattggtcgatccaattgacccagttataaattttcagaaaaagtgcccataatcttatttcaaaacactccaggatgcttaaacttctcactctgttgacattttaaattactttgcagggaaaccttctgatacttattcttccatttgctaaagttccttaattcaaagctccctatggaattgctaacttataggcattg

SEQ ID NO: 32762 - DNA, 658 bp, Bovine  19866880911127
  misc_feature (1)..(1): n is a, c, g, or t
natgagtaggaagatttgtttccattacatattatttgttctatactttaaatattgaggtggttatacagcaataaaacactttacaagtaaatgctacatttgagactggaatttgtttcaggaagcattctttctcatctaagttatttttaaaatatcatcaggactttgactaaaagtatatagtagtatcagggatgaagagttcagcatggtttagaggagagacagttgtagacagagtctgaaggaatatgtagcaattttagtcagtatgagctaaatcacatacaagcaatggagtctggacagtccaaaaccaagaaccagatggaaagactggaaataggcagattcaattaccctggggcaggcaattaaaactacaaactagaaactgaaatattatccatcagaaaagcagatggacagcataaaagcctagaaagaagcaaattgtgcagtgggaacaccacaggcaggccaactaggcaacaagcccttggttgctgagcaaagaacattagtaataagtaggctcaccttttacttaatccaagagcttttaagtatttgcatggtttgtccacattcagaggtatgggcatgtgggcctgcatgatcagtcatgtccaactctttgtgaccccgtgga

SEQ ID NO: 32763 - DNA, 914 bp, Bovine  19866880919922
  misc_feature (1)..(1): n is a, c, g, or t
nggatggagtgattctgcttctgctgttcttaaaatgacactttggtcttatcctaaataataggcttttaataaaaacatccaccaaaggcagacaattaaacaatacataaagcaacagggggcaacctcgtggttcagttatagtctggagccattccaaaggagaacatgtgggtattttacaaggaacaatacacttttccaaagttattataaaacaacaaaattttaaagtgggcctaataagcccttcaaacttggtacaggatttcacatttggctctgacagtgggaggatctgtttacatcctaattttttcaaaagcatgtttagagaactatgtcaaacattatgcctatatatctatattagacatatcactgcttttttttagaagacatacaatatgctaatttgcttactttcaaaaaactgacactagtaaactaacaggtgtttactagtaaaactaactagtaactaactagtaaacttccctggtggttcagcagtaaagaatcggcctgccaatgcaggaaatgtgggttcaatccctgggttgggaagaacccctggagaagaaaatggcaattcattcctgtattcttgcctgggaaatcccatggacagaggagcctggcggactacagtccatgggatcgcaaaagagtaggacatgacttagcaactaatcaacaacaacaacaagaccatagtaacaggtgactgatccttctttcataattaaatattttccatttggatcctacatttgatttgtatcaattgcatatcctcaaataactaaactaaagggaatatattaagcttctgacagacttcagttttctgagtaatttacaatttaatcaaataactttaaactaaatcaattaaaacatgacatccc

SEQ ID NO: 32764 - DNA, 2310 bp, Bovine  19866880982200
  misc_feature (1)..(1): n is a, c, g, or t
nagtcttctccacaccacagttcaaaagcatcaattctttggcgctcagctttcttcacagtccaactctcacatccatacatgactactggaaaaaccatagccttgattagatggacctttgttggcaaagtaatgtctctgatttgaatatgctatttaggttggtcataaccctccttccaaagataagtgtcttttaatttcatggctgcagtcaccatctgcagtgattttggagccccccaaaataaagtctgacaccatttccactgtttccccatctatttcccatgaagtaatgggaccagatgccatgatcttcattttctgaatgttgagctttaagccaactttttcactctactctttcactttcatcaagaggcttttgagttcctcttcactttctgccataagggtggtgtcatctgcatatctgaggttattgatatttctcccggcaatcttgattccagcttgtgattcttccagcccagcgtttctcatgaggtactctgcatatcgacctcttaaatgaaaagacagcacctagtggaactctgctgatagaaattcccaaggtgaaaaacacatggcaagtcctctgtggttctggtggcccaactacacatatgtggcccccagagcaggctttgattgcaaaataagaggctgaatcttggttttaggaactctacctgtaccacaggattaaaggtacagaaataggctctcaactgtttcctagcagcctgcccagataatatgttaaagagctgagcattgagcttccaattaggaaatacttccagaagtacagtttcaaatggagtcactgtgataggtgcagttattagtgatctcagttgagagactggaagtttgactacctctgagtcacaggctactaaaaaatgatgatattcaaattttcttgatcatgttgcacataaaaaggaaaagatgcattctttctcactacaatgcaatggacacatttttttcccacaagctatccattttaaaatgatggaacaatgaaaaacaattaaaaagtagtggctcttattttaaactgaatactgaaatttcaatctagtttctttataactacagttgccataaataaatgcagccttttggtgtgtcaatgtacattcatgtttgtatggtgtgtgccaagatgtatgcatgcatgtgtgcatcagtggatttgaaagttgttatacagtgagaaaaattctagggtaactgctcccaacattagacaactggaataagaatgtgctacataataaactaagtgttgccattttctacaatcactcacagaggtttttgattcactgcagtttctgtattactgagaaaaatggcagttaattacctctaacacctatgcaggaacagctgggggaaagaaaaggaccatgaaattagcactctgtgactgagttaaatataccatttagcttaacagaatcaactatcataagtcaaacttgggttataaagaattaatttcttttttttgccaaaacgcctttgttttgatccataaatcccttaatgcaccctgacttttattgattctgttcctgaaaagggtccactgccaaaagctgaactgcaagtaggtctttccaacagttttatgaataaaccagaacacacaataaccacttacttctatgattatagaaatggttttacattgtattctagtaacttgatggacgagtgtgcttattttttaacccccttctcatgggggaacattcagtttttgagaagttaaaaaaaatttcaaaagagtagtgtacagaaaaaatgatctttggttgaaaataattgtgttgtgtgttaaatcttaaacaactgtgaagtaccaaaacagaacgtagcttataaattacttaatacagcttcctacatttataggaaaccctgctatagaatcagcaaatttattgccaagctatgcagtcacatggttctccatttactcattccacagatatttatggagcacatgccatgtacatgacaacatgataggtgctggggatgcagagctgcgataaagactgacatgaatgatgtgcctgcataaattctaaatttccttccagagactacttccagtcactgtcatcatctgagttttccagtaaactagttaaaattggaaaataaggcatgcacgtgcatgtgtactaagtcacttccgttgtgtccgatcctgtgtgaccctgtggactgtagcctgccaggctcctctgtccacgggatctccaggcaagaata

SEQ ID NO: 32765 - DNA, 754 bp, Bovine  19866881005333
  misc_feature (1)..(1): n is a, c, g, or t
nttaagagatttcttatggaggatttattctttagcctgttatgatttcatttttatagaagcagctgtacttgttatcgcactctgccacatcatcagtcatctagctactgcagagaattccccccggcagaacaggacattcatgggtttatattactgccataaattctttcactgtaagtttttatacaaataatcccatgtctcttgtatacattacgccaattggttaataacatgatctctaccaggggatttctggaatgttctatcatttaaaacaatggtccagagtacattattacatacactaaaaatactccaaatgaaatcaggcactctgaggacatctatatgatgagaaaatacgttttcccttgatttttcaatttaacctggtgacttttcttttagctgaatgacatgaaaacaagtgttggaaaaagggatattataaggttagtatgttaaaaaaaaattaacaatagagtacattctcaaatgagaataagtttcaggccatgaaacttttcacagtttttttcttccattgctgttcagaatcccagcatttccatcatgccagttgttaagtagttgtcagattttcggccattagcaatttcttcacacaatagaagtgaagagtacttaagaacaccaattggtccattgactaaagcatgaatgtactaatctgattttcttttacctccttttatgtgtgaagaatacgataataggatctcaa

SEQ ID NO: 32766 - DNA, 2714 bp, Bovine  19866881027138
  misc_feature (1)..(1): n is a, c, g, or t
nttaatcacaaagtaaagatggataaaaaaaaaaaaagaggtgacaataataaaaagcctgaaagaacaggatcaatcccagaaggaaggaaaatgaggacgagaacatgaaaatagcttgacctctgcttgctgggaagcagaataaagtctctctgtggtcccctgagcacaaatcacgtcagccaagggtgaaagtcacctgaagaaacagatataagtcactgggtacgtttattttccctaccacaatccagaaggaggaccaaatacagtcaggatcccagaatccgtggctttgcccgcatgagtgatagcaggtcattttcagtgggccaactccagcactgtatttattcagtactgaaatgtagtgagagaacagaaaattggttgacttccagaattatgaaataaaacatttgatcacaaaattaaccaaatgaacaaatgtcttttgaggtttgctgtggtagctgcattttgcatcaagcctactttgggatatatagcattttcatcttatactacatcaatgtgcctcagtcaatgaacatcataaatgtcagaatacatatgatattgtatattatgaaatccccatcttttctctgaagcccaacagaaatccatacctggatccttaataaggaaatttgctctcaacacagaccatctagccagggagataagtctttaattttttttttttaattcccccaagctaatactaacacatacactgaagttctgttcatttaaattatgcaagttttctttgcagctgaggttgaaattggttatccaactagacataattaggttatattctctcagctctggattttgttgcttttcaataaatggttgataaaatggaatgggtccaccaactctatcaaaatctccaagtttggaaggaatacagtaagttaagtattctttgtctgccattgtgaattgcaaagtatagctctgaagcacaattttgaataagagctataaattaccatttcacaatggcaaaagtaacttcttgttttgtatagtaggagtaatgctgtaagatcagaagacctgtttatttgtcccctagatctggaactaactatactttttatattagacaagtcaaacctccctgttttttagattcttccagtgtaaaacaacgtaatgggctagatggcctctatgagtctttcctatgattttctgaatgttgaaaacaaatttagttcattcaaggcttctatttaaagaaaaatctagaggcaaaacatgtcttaccatgaagtcacagcatcaaatcatttttgagtaggcttcataattgctataataatgatagccacaactatcattatatagcatttatcaaatatctgcatgctcacatcaccatgctagactaaaaaatatatatgttaaaaaaaaaaaaaaaagcagatgtggtcctggctagactcttaggagcatagtgaataaaaagagaaaatgatttcccacattcaactgctccctcaaaggaattattcttcaggtttttccttcaacattattcatgatgtgtagtattctgtttacttttaagttacaaaagaataaccaagaacagaaccgacaaaattaagtcagtcagtgccacctgtagttggaacattgacacaaatcctaccactttttacaggaaaatttaatgaaaactgttcagaagaaaatcaatgaagccatcaaatattgggtacctgttagatatagttttcagaaacagagggtgtggagtataagatgaaaatcagtaccttagtgcatttatatccttaattccagaaattagtcatcatcttcttaaaatagttgtagtttatacacagaaatataagtgaacacaagacctaatggttggcataaacagaaaatagtctacaggctgagcatagaatgactgctatgatctttctgaagctcagctgtgccttgaatgaggtggggacatgggatatctttccatttatctgtatcttcttcaaattctttcatcagtgtcttacagtttttagctacagaacttttacctcttcagttaaatttatttccaagtgttttattattgttgatgcttttataaattggattattttcttaatttccttttcagataattcactgctagtatatagaaatgaaactgagtttgattttgtatcctgcaacatacatgaatttatttggtctagaagcttttgatgaagtctttagaattttctgtgtacaatatcatgtcatctgcaaacagagacagctttacttcttcctttatgatttggatgctttttatttttcttgcttaagtgctctagcaagacctttcagtgctaactagaataaaagtgatgaaagtgggcacctttgtcttgctcttgatggaaggaaaactttcagcatgtaaccattaagtatgatgttaactgtggacttgtcacagatggccgttattatgccatatgtggcataattatggtaaatttcttctattcccagtttgttgagagtttttattatcaaaggatgttgaattttgtcagataattcttctgtacctatttaattgattgtacgtttttctcctttaccttattaatgttgtgtatcacatttattgatttgatttatactgaccatcctttaagccttcaaataatgtacttgat

SEQ ID NO: 32767 - DNA, 1457 bp, Bovine  19866881066487
  misc_feature (1)..(1): n is a, c, g, or t
nctgtaaatgggagtaatacatgatgtagaggtcatgtgatggataatagaatttggtacagtgctcagtagagtaacaggcacgtagtagtagtagtttagttgctaagttgggtccaacgcttgtgacccatggactgtagcccgccaggctcctctgtcccggggatctcccaggcaagaatactggagtgggttgccatttccttctccaggggatcttcctgacccagggattgaacccatgattcctctattacaggtggtctcctgtattgtagggggattctttaatgactgagccactggggaagccaacaggcacatagttggtgcttaatcactgttagctatcaatattattatttaccctaaccagaaacttacattcaaatagcaactgcgttttaatttactttttcttctttggtgaattctcatagtattataaagggaatttacttgcaaataacattttagcgttttgaaagtggagcagctatatggcacagtaatttataattagtaatatttattcaacaaatatttgttaaacagctagtattcagagtttaattgtaggcactatcgaggtagaaaaataagaacacttttatttcaaataggttttattcactctacaactagaggaaggtctagttcagtagaaaacacaagacaaaaaggagagctttcatattctttgaaggagaatcatgacgttaacatcatcaacaataatctggaacacaccattggcttttccatttagtattttgaaatacaaaagaaaaggaataagaaggtgaatagtccatgagcatattcaacaatggtattgttattaggtattaatcctttattagataattatttttcacatctgggaaaacatcactggcagcacaattttaagaaaagtttggcaacatgtatttttctcagcagttctggatgacagattttagtgaatgctagccaaaaaaattaagggcaaaaccactggtgcacagaagacaacaaactgatcttattacagaaacagatagcagaccacaatataaaagacattttaattttacaccaagccagaaactccagattgattggcatacacatcaacaagcctggtcagtgtttaatcatgagagtgacaagtattgatttcctgcctgctctgcccaccttatttaaaaaatatcaggatatttgctttcaaatgacacaaactgccaaggctataatctacagaatgaccactcactgttaacagcatgcctgtttatgcccagtcgccactgaaaagacaattacatatcacccaactgtgcagctagacgttgacactgcttacccagaaagagtttaggaatcttacaatttaggaagagcatatgaagatccttaatctaaaaacagtctttgcatacccaaggaagtgccattcctcttcagat

SEQ ID NO: 32768 - DNA, 1067 bp, Bovine  19866881077076
  misc_feature (1)..(1): n is a, c, g, or t
nttttgtttaggctgaagagtttcaataagatgatttttataaaactctaaactggagccaatacctggtaaaagataacagggtatattaaaaccatgttagaagttttaaaaagtccttaaaaaccttgaatcaggaaacaaattgtgtgtctgtgtattgtgaagcctaccctcatttgccatacctttctttcagttcaggtcagttgctcaaccatgtctgactctttgcaaccccatgaactgcagcacaccaggcttccctatccatcaccaactcctggagcttgctcaaactcatgtccatcaagatggtgatgccacccaacaccctcatatccttccttatcctacttcctttcctgtaagtcaggccaccatctcctgtagccagaaggattggtgttctaactagcatcccttgtgtacagtttgcactctgccttaaaattccggattcattttttattccaaaatcaaaatgatctaaaatactattctgatcatggccagctctctgtctaatacctctccattggcctcaagatgaggtccaaatccttcaccatggttttaaatgcagcattgagtctgctggtgctgctgctgccaagtcgcttcagtcatgtccgactctgtgagactccatagacggcagcccaccaggctcccccgtccctgggattctccaggcaagaacactggagtgggttgccatatccttctccaatgcatgaaaggaaaagtgaaactgaagtcgctcagttgtgtctgactcttcacgaccccatggacttcagcccaccaggctcctccgcccatgggattttccaggcaagagtactggagtggggtgccattgccttctccgagcattgggtctatccctgttcaattaatgcatccctcacaaccctctccttcctacctcttacatttacccaccttatgctctagtattgtatgaagctttcatttatctcccagtctttgcaatgttttaaaactcttcctggaatattttccccctgcatctcataccagtcatctgctaacttctaaca

SEQ ID NO: 32769 - DNA, 833 bp, Bovine  19866881136414
  misc_feature (1)..(1): n is a, c, g, or t
naatccataaaagcatattgtcaacacttgctgtaaaatacatctggaatccaaccatatttcttcatttctacagccaccatccttgtccaactcaccatcatctctcacctggattattgtaatagtctcataatgggtgtccctgttcttctcaccctttgctatttttcactgcagcagccagtgattccaacagagtatcgtggtaatttacacatatttcagtaacttccccctcttgcttagagtaaaagccagtatgtttctaatggatcataagtaactacacaccatatctatgactttgtcccctgcttctctctgttttgctcactcaatagccttggccactttactttgtcatgaacctgccaatcacattcatgtcatggaacatttgtacttttagtccagtttgccaagactatgtcccacatatttacttgactcccttcatttccctcagatacactctttctattaagacttatttccctgttctttttttttttttttggatgtggtgttcttcattatatttttgacactcaaacaaactttctgtctagttcttttgattattgtctctgtccttcaattaaaacgtaagtgaaatgagcttagggatttctgtatttggtttattgtcatattcctgagcttgcctggcatatagtaagtatcaatactatgtgttgaatttatgattttcaaaataagtaaacatttttcccccctgtgagtgtatagttacggacccaaaaccccttacttctagacgtcaggaatttctccggcaaaaacaatttcaactcagtgttatctctcct

SEQ ID NO: 32770 - DNA, 2090 bp, Bovine  19866881215363
  misc_feature (1)..(1): n is a, c, g, or t
nacatgtgtgtgggcacttttctttatcacaaccacatcatagtcatctccaaccagcaacagatacaatatgttgaggcatagggtgtagctcccctaccctcccgtaactttttaaaaagtgtcaaatgtgagaactttggagtcctttttctttaagcgataaactcagttacatatcaatgtcaataaagtgttctaaaggacagaaacaaaggtggcagaaatacaggaaattatgtcctatgagggaaagtgtaagacataaaagtagcctagcttagaaaacaattgattatgggtcatattggaaaattttatatagtttaaaattccatttgacgtccaggaaagtttggttaaaaaatgtggatttgagttagaataatcaaaaatattagcatcttaaaacggtaatgttttaccaagaacactgagaagggtaatctttcatttgaggttacaagaaagttggcaaatgttttaaaaattgagactttattgtttttcccttgactatccatatgtctgagtttgcctggggaagtgatattgagcagattggaggtgtttttttggttgttattttattttattagacttttagtctctgaaatattcagggaacatacatattaatatgaatttaaaataatatgagttacagaggtaggtaaggccaatgaagatgttgagaactttgtagaagaaatgaataaaggatgtcgataggtcttaatttcccaaacttgcaaaacttctgcaggaaccagctttccgtgctttgggtttcttcatttttattttcttttattatgttttttactacttgttctccatttatacaaaaatgtttcagtcagtgcagattacaaaatcaagcatgatttatatttacaacttcagaggcaaacctgactgtttcatggggtgggtcaaaccaaacattttttagagtcatctagcctatttaatttgaaaagtagttgacaatggcatgtttttgtgtaagttaatgatgtgagaaatatgcattgcatcttgggctatttcaacattcagaaaggttctccaccaacagaatttctaatatttttttttacccctttcatgacacatttagttgcaccaaataattcaagttcagttatgtactgttcaagtgcctggatatttcaaataagacattcttaaagagtttctttgccactagggatggttgggcaattggagcaaaatcttgtcagcttttttttcaaagaaaaatcttgaatgttttccttacttagttgaggcacaaaaggaaagcaagatggcctctgggcaatgttctacaaactatgacctgctaaggacctcagttttcaagtttattttgtccctttctttcctttgttttccccacagccacttgctaggccagttattccaggattctagcagagaaaagaaaccttgagagatggttgccatgaatatatttgtatttgttgtaactacccttttagataggtaaaaaacagaggcatatataaaagagcaataggagcatagagcactgaagaatttctgtatcccccaggcctctgcctgtagcatttataaaaactgagagccactgtctgtccatatgtttagagatgggatagaatgaaaacaccacagcttaggaaacctagaaaacttgattctggtctcgttgtggccgctaatgctgtatccttagtttggtgcattatggtttcctcagctgtaaaatggatactgtcagctcgactctaagcttctttcttattgtataaatttttgttgactgaaggtgtgacaaagccagacattatctggtcagtgtcctgtgtgtgtgtttgtctgtgtttggtcccactctggtggaccccatggactgtagcccaccaggttgctctgtctataggattctccaggcaagaacactggactggttgccattcccttcgtcagaggatctttctgatccagggatcgaacccacatttcctgtgtctccagtactggcaggcagattctttaccactgagccacctggggcgtgctctgtatcgtctaatgaa

SEQ ID NO: 32771 - DNA, 1467 bp, Bovine  19866881279244
  misc_feature (1)..(1): n is a, c, g, or t
nactttggccacctcatgcgaagagttgactcattggaaaagactctgatggtgggagggattgggggcaggaggaggaggggatgacagaggatgagatggctggatggcatcactgactcgatggacgtgagtctgagtgaactccgggagttggtgatggaccaggaggcctggagtgctgcgattcatggggtcacaaagagtcggacacgactgagcaactgaactgaactgaaagtgaagcatatcagtgaaagtgccagaatcttataaggatgttctttgatctctgtataaaagagcagagataaaaatataaaaaatgactatgatgtcatctatgtgaaagatcagaaaaaagagaattccagccacttagaaactggaacactggtcttaaagaggtgctacactattaagtttccttcacttcattgtacattttcacttgtaagactttataaaaatatgtgtgaataatccacaggtatgttgaataaatacaaaaaccttaataaaagaaataaagacatctatcttgtaatagcctgcagattgtctccaattaggcaaatcctctcattacaattctattctttataatctgttatacagtaacttagaaattgttatcaaaacaggtctcctcctgttttggaaacataatacttcatattttaactttcttctagaactttaattgtcagcaatttttcactaaatcaactgcaaatgatattagaaaaaaatttatacaggaatttcaggcagaataagcattttaatcagttattcacttctcctttcaatgacaacataactaggggatgtggcttccaaatgttttagtcttatgtcctcaatgtgaagctacttcatgttgaggaaagccaaacaaacaagcacctaacacattaaggtgcagaaatgttttttaagaaactatttcacaacctgtttgctctaactctcacatggaattgacaatattaaacaatggttacaaaacagaaattgtttctcatacttccccatttgcaaaccttttccacacattaaagtctttgttgcttagtatcattgattttttcccctccatccaccttggcagtgaccccataagcaatctgaagatccattactagtgtttttctaattgatactcagtttcacaattaggcttagaaaatcatgaataaaaaagttataattctctacaaactccaagtgatatttaacacagaatcctgtggaaaaaagtatttgttttcttgttatataaataacttgagaactaaaaatgcaatgtattacataaacaaagatggcttggcttaagagcaattattttctaagaacacattgcatcttgtataaattctttgatggccaccagtctgtcagtcttgggtgggttgcattccactgctgatgtatttaagttttttatttaattcaaatatg

SEQ ID NO: 32772 - DNA, 1175 bp, Bovine  19866881296193
  misc_feature (1)..(1): n is a, c, g, or t
nacagatgaatggataaagaagtcatggtacatatacacaatgggatattactcagccatagaaagaaactcatttgagtcagttctaatgaggtggatgaacctaaaacctattatacagagtgaagtgagtcagaaagagaaggataaatactgtattcaaacacatgtgtatggaatctagaaaaatgggactgaagagtttatttacagggcaacagtggagaagcagacatagagaatagacttatggacacggggagcggggaggagagcgggagatgtatcaaaagagtaacatgggaacttacattaccatatgtaaaatagatagccaacaggaatttgctgtatggcttaggaaactcaatcaggggctctgtatcaacctagagtggtgggatggggagggagatgggagggagtttaaaaaggaaggagatatatgtatacctatggctgattcatattgaggtttgacagaaaacagcaaaattctgtaaaacaagtaagtatccttcaataaaaaataaattaattaaaaaaatttgaatgtaatgaataaagtggctatgaatatcttagaatatgaggtattgaaatatttttatataatcattcattttgggtgattagtattttttcagggttccttgcacaaacatgtgaatactcacccaaaatatgcattttgctgtcagaatcttgcttggtgatctggcctgcaagcaaccaaatttgaaagacactggactgtaacaaaatatgatgggatagaggatgaacaggaacttcctttagtgtcctaaagacattgtgtttagatttctttcctttcttgttcatgatctcataaatatataggtaattttatttactaatacattctaattttaaattctaatttatggtcctttttaatggatgaattaccttgtatttccaattgcttactaaggcaagaattggtaaaatatttcatttgtcctggtttctccttgagttaataagtaccaaagcatatctaataattacctacagctattgagactgcagtttatttgctattgaaatcctggttgcaaatttatatttgctgattttgcttcttaattattgtcttaattcttaattattgtctcttatgatgtactaaatttttgccattataaaaa

SEQ ID NO: 32773 - DNA, 1196 bp, Bovine  19866881298518
  misc_feature (1)..(1): n is a, c, g, or t
ngtatttttcttttcagcttttgatgggaatgtaaaattttcaagcttccttgaaacaagtgaatgagtgaactataagctgaaaactagaagtcctctttatctttggatgtgaaataattgttcttcttttccttttcagtttcttctttgtggcatatgtggaatattgtgcgccaaaaaaaaatctggacttgtcgtaagtttttgccatgtttgtattgtgcactgaactgtttgaaatgtaagaactcaaaaagggaaataaggactagccaactttcatatcctgagtgttgctcatctaggataaaaagaagactgacaaataaattctttttttcttttcaaagaaaaccatcaagattattacagactgtgacaaaagaaaaagaaaagctttgatatactctttaaatacatgaatctgcaacctttaatgactgctgtggatggaagtctccacttttcatttatagacttccagacacaggaatccttcatcgagctaaaaaagacagagcttgaattcatgggaaatttaactgtttagatatggacgtgagcctaaagattgctggctttgactgtgaagttcattgtgcaaagcagcaaaacagctgtgttgttatagttgcagttaattcccaaagattttttaaatttaattttatcttctgactatgaatgcaaatgtcagaattctcagaagctttatggtactgtcttgcgtcttggggggtgctcccaggtcactctcatgtagactagagaaggattccagcatgctgaagtatggattccccctgtctttcatgacatttttttgagaattagaaagtagaaaaaaatcaattattttattgaggactataggaaataacataggcttttataagttggcaaaattaatattgtacatggaccctagaaagtagtctttgagactaaaaaaaggagaaggccagggaagggggactatgcagtcctttgtttaactcctttttctaattatagctctcttagtgatggtacctattgtaacagaaaggatgaagcccccattgcttcagaaatgtgaggtgtgatttttaaacattatcttaaggaaatgtttagatagacattttttggaggcttgtaatttgcatttgtgattcccccatcactctttcccatggttttcttactttcta

SEQ ID NO: 32774 - DNA, 1324 bp, Bovine  19866881300794
  misc_feature (1)..(1): n is a, c, g, or t
naggatggatatccttgattattgatacctctccctttgaatgtatttaaacaaatatatcattttgtgtcttcctgattgggcttataatatttaatgattatttgagatgcattatttagctttattttttaaggctaagatttatgggtaggaacaatttaatctagtatctcacactgttttgagaacatgggagcttgcacagttgatcaggtggctttctcagtctcttctggaaaacaaacagtgatcaggacttggcctttatgccatcctgcctggctcacagattgagagttgggagcaaataatgaggtcaggcctcagtgaatgactttttcattttatgaaaatttcccatgtttcacacaaagaaattttctctattgattatgaaataagactgccctggctttaaatactaactcagctgattaaataatggtgtaccatcctagttaagctctttttcctacataaattttacaaaacaaaacattgttcatgaagttgttaatattagaaataaaatgtatatgaaagcatatggaccatagttaactattaataaatcatgcctagtattatttctgcaggacaagtagctcaaggctccctgtcctccatggtactatgcttaaccactgattttatttctgccttattttttcccagtatttaataacagatcatgaactcatggaagtttcaattgcttcttgagttgcattactgctaaaaatcatggtcactaattaacatgagagttagttatgctttaaaagctatttgggtagttcagacaaaaccatacaaatttccaagttattgagtatctttgtcaaaagtgttaattttcacttttattctgactttataacaataacattattttacatatgtgttttgaggacttcatggtacaaaagtagttatcatatcctccctgtttgacatgcctaatttagataactgtctaatttatctgattatcaaatatctttatcatagagcttccactaccctctccacctccaacagaaaaacagacagagacaagtgtcttacaatggcagcagttcccccattcagttttaagctgaatatctacatgacttttccaaatatattttagtatatttttgtagttgctaatgtataatgtatataatgtaagtaaaaaactaactagatgctatacatgaacatgcggggtctgtagctaagttggtaaagaatctgcctgttatgtaggagacccaggttcaatccctgagacaggaagatcccctggagaaggaaatggcaacccactccagta

SEQ ID NO: 32775 - DNA, 2508 bp, Bovine  19866881323301
  misc_feature (1)..(1): n is a, c, g, or t
naggggcagtatcgtgtcccttagaaatcggattttcttgtcgagattaggattcaaaccctagctccactgttacttcagctgtaggaccattggtcagttccttctcttggctttagttttcttataaaatatagaaataaaactctctctctcccccctactgcctccatctcacactgccactgggattgtttaagggcttcagtgagaaaacacatgtgaaatatggagctcattgcctgctgcagtgggtcatcaatgaatgttggccaacatgcctgtgtgtgaaacaaggtaaggatgctgaagtggattgtctgctatcaactcagcattacacccacaccctcctaaggtctgggaaattgcatcccccaaactcccctttcctatttcatcctggatagaatttccctttgagagaaagttacatgaggtttggacagcagaagagaagttaaggtcattattttctgatgtggtggcaaccagacctgtaggcaggcatgagaatcacagcagcatctcaagcgagcacgtgagagccatccaaatcattgctgcagatggcagacgtcttcacaaacttccctagcttagcttcagtacccttgattttccatggcaattctctgatcttccctccccaatttctaagtgaaatatagagactatttggggggtaagtatagtaggcttaatttccccaagtgatcccaggctgacaaggctagttgtggtcaggttcagagagctgcctgagagtggaactcacctggagtagggcaactgctcctgtcctcctttgagagggcttacgtgtagatgatttgaataattctcctagactgtggcaccagtgcagtgctgggcacattgcaggaactccatagacatttactggaaagcagcatgcctgtatgactacttctgtttgcccacaccattcattccccttcatctcaaatacattctttcttcctctccccccactgtatgtttaaacaagagccacaatcatcttagaccctactcttctgatcacatttcatggtttctaggttcacctggctaatcaaagtctttctgaagagattgtcaagtgaaaacaaatagaagagcctcttactgtatcatcatagcccggaagctagctgtagccattgtttcaacacggtggaggaaatctgtctgaaagactgtgatgaacatggaaatagcagacctgagagatggtgatagaatcctcctgcagtagtctccaatgagtggcacaatccttaccattgcagtttggtcatgaaggataatccatcacctttcttgcctaatcaagtttgagttgagtctctgtcatcacactgaaagagtaatgtctgatgtctttgcttgtaccccaggagtttatgatgcccctactcctgccttcactgctggttacatccttaaccatctgcttttgggtggagaaaatgatagaggcaaaagttaaagaactgaattaggagagaaaatatggacacctatacagggaaggcaggaagagtgctcctgagtggtcttcaaaggcttagatgtgaggcatcaaaattactattaatttttacaaagtgtttaaaataaaaacatcctattctgggtaaaagagccaagggctaatgttaggacaacccttcaatttcacatagtgattagtcacctcatcctctgcgttcatgctaacttataatcctgttgagtcacatgcttacctcgttatatcacaatttataatcctgttgagtcacatgcttacctcattatttcacaatttatctacctagtagtcattgcgcttcattaccctgtaatctttaggaaagcagaggtcttattttatctatattcacatgttcaggatctaggatatagcttaccccacagttggtggttaataattttatgttcaatgaataaaatgtgttcacacaaagtatataaccaagcagtatctctgttttgacacaatttttaaaaaggcaccaaatggaacattcattaaagaagtattggacacattgtagtttaatgaaataaggaatttggacacttcctggacattttgattatgtgaggaaaaatatatatgcatatacatatgtgtatgtatgaggtgatttcttggtgtctcttccttatcgccttctctttctcctttctgagtaccaggtcatatgctatcagagctagagataataagatgtagaagctctcagttcttaccctgatgataaaacctagcagtagaaatagacacactggcatcaatctatctagctgtctatctaacatgcttaagagttatgttaaattgttaaatttaatgacttaaaagtggaacaaatatattgaaaagagtactcaaagtgactactttggaataagagtaatagtgataacaatagtgtctaatatctgtagtgtttaccaagtgccacgaactctacaattacataaggggccata

SEQ ID NO: 32776 - DNA, 848 bp, Bovine  19866881333388
  misc_feature (1)..(1): n is a, c, g, or t
nttaaaaaataggaaatgttaatgaaaaccaagctttgaggtattcaaggaagtcacaggtcatgattttacactgaaaaaatcagcatctgcatttcttgcattgaatgaacgtgtgtagctaaatcgttttgaatgtcattgaatgcagagtagtttaaattactttttctttttcatgtttatggtctcaggaattgagaatgcatttttttcactggacacattagacgttaattgatctaccttcattgtttctcagtagctatcctgtgtactacaggtttcagtaatagaatttgcacttccaatgtactggaccagaactgctaactctgaagcaatgttctttcttctctaacaagtcacaggtcctcatgagtggtatgtgacccattttcaccatcagtaaccaaatgactttttgtacaaaaggaatatcctttataactaaaaatcaaaatcttgtgacacattgtgaaaattatatggcctgacattgggttttactatgctttaggttattcgtgaggaacaaagaagatcatgctcaagactgaaaaggaaaacacttaaggaggtctgggcagttttaacagcatgagtgaaatacaacaccaaacaggatgtctttattccctttgaacttgaggcatcccatggaccctaagctactgaattctctagttagttatgtggtgccagactttcagtggcacttaatgaagataagtttctacctcatacttttaaatgcaatggtggatgaatcctgcctggccaaactgagtgttttatcaaagtctttttgcaaagcggagaaaatgtacacatttttcttaggtctt

SEQ ID NO: 32777 - DNA, 1894 bp, Bovine  19866881337917
  misc_feature (1)..(1): n is a, c, g, or t
ntgggaaaagaagtaatattttgtctaacagaaagtaaacttgagatggagtgggtgggtagagtcagtttcaatgataaacacctttggtttaatcagatttgtcaaatggcaaatgttacttcatggttctttgctttaagtttttacagtgaaatgatagcaattgaaaaagtggagtataagtaaaaaataagaatgaatgtttacttttagagttaggttaaaatacttccaaatattataattactgcttagctttgtatattaatgttaatatcaatttctgtgattctcccaggtgaccacaaatggatgattcaccacatatcctaataagtacttcagagaaaatggatagctcttctttcagatgtcctaaaaatagggaaacaagagtcaaggaaggagatgaatgaattccctttttaaaatcttttttaaaaactggaaataaatcttgcatttatgttagatcaactcaaatttaaagttcttagtatatctagaaaagccactattaattctgtattcaaaacatacatagtacaaatttttatatactcccacatatattctttgtttttcctccagaaagcttaaaaaatttaaaatgtgatagtatatatcaacttaattagtaaaaataccttaaattatatatttatgaatatttattcttaattgtatatgaagactttatatccatgttaaatgtggttgtttcaagaatgtatatttttagtacattatttttttctctttgctaaacatttgtcttagttgtttcatttattcttaaagaaataatatttattaaaaatttaccctgtgttcctatttaaatctcaaaacattcttgtgagtggagtaaattaatagatgaggaaactgagaatcacatgccagaaaaaagcccatttactttactgctgcccaaactgttttatccagtgtaattaacattcactgaatgcttactgtgtcacatatattcagtgttttttgtaatagcattgaaaagagcaagaaaattggtgatacaactatataaaagaaatgaaaatttcattaaatttccctcccatataactgcaaaagcaattttgccagagttttgaggttagaattgtatgatatgaaggctttaaaaagtgtgacctgttttttcttttttcctccatagaattgtaacacagaggcagacatagaacacatacaagaagtatttgttgtctaaattacatatgattatattcacaggaagatttggacaaaaatctatcaggagagtagatatcatttcgggtgtttgttattgtcccttttatcactaacgtccttaatgtcaacattcaattaaaagtacctaatgttgagaattacaaagtagattaaatttttagacatcctaaaaatccccttagaaattgctttctgaattgcagtcatttgcatttctctcattatttctttttttaaaaaaatcagttaattataatttctggtacatcaagttccagataatcaagttcttcaataaccatttctgctttatttcatttgccctttaatgaaacataattttcaacctcttttactttcaaagcactgatcttaagcagtagttttcagttctttcatcagaacccaaactctgatagactataacatcctcatcagacagaatgtatttataagggggtttctgtgccattaaaattattctgccattttggaagttataatttccccagtttaaaattcggcccatgcttaactaaatgcattctaacttctttttatgattatatatatgttcatctcttctaagaaactattagattaaaccccagcagttccacacagccatacacactgctttgcaattggg

SEQ ID NO: 32778 - DNA, 749 bp, Bovine  19866881365145
  misc_feature (1)..(1): n is a, c, g, or t
naccctgattttatccctgctagaatgtattctaggtattccctgctgctttacatttctggctcccaagccaaactccactgcaggtgcttctgattagagcttagctttatgcaggcatcatagcttcaaaggtctgagcaagcaggtatctgatgtctatggtgggggaaaaaatgtcaaacagctattgcatttgtcaaggtccctattacagaatgactccctaaattgaatgcatcattccatatggcttatgcagtattcagtatgcagcacaattaaccctcttcatctggacagaatacataattatgttaaagcatatactaagattatatgaacatttttaagatccacatcaaagggctggtttataattaagcttgcagttagctataatcctaaaacattcaccttttattgctgtttagccatgtgttctccatcctgtatttgtacaattgtgttttgatttttaaatccaaatacagaactttatatttagccctgttaaatatcactttgtttgctttggcccatatttccaactttttgcaatgccttggaatacggtttctgtcattcaatacagtaactccacagtttttgtgtcatacacagattggataaacatgcttttgtttacattcacatctctgataaaatgttgaaaagagtataaactgctatgaataccacaaagtattttcatctaaggtggcatctaaccgttaattaatatgtta

SEQ ID NO: 32779 - DNA, 1393 bp, Bovine  19866881371556
  misc_feature (1)..(1): n is a, c, g, or t
ncacttgatttttttgtttgcttctcctcattcttattttgttaactttgatacagtactgcttttactgctttgctcaacatgctgcagagtggtcattaagaagttatgtagaaactatgtgcagtggtgggagagcaagtacttaagtctcgttccaagcattctggaggttaggaaacttgccttacaggtagatctgaggactagcagatctatatggactaacatgtccacttaatccatgtgcagagtttcagataaagtggaaaatgaaatccagtggcaaaagcattgacttagaaataaggatgcctgagccatatagacttggatattactgctgtgtggtcttgaaaaagtcttatattttctggcctcactttcatcctctgtaaaatggaaaggcttagttaaatggtttcattagggtcccttccattgtaaaatgtattctgttattttagaatacaaccttagtcagagagttgaacatctgttcactaacctatttggtggattaggaacttacttaaatcagtttataaaatgtgcattaatagtgtcagacaggactccctaaggatatctgttttattaatttttaagaatactggaattgccatgcagtgtgagtaccaaaaattccaggactcattaatagaatgtatattttgaaacaccactgcgaatagtgtgtaactattctcagtatctataagaatcaaactttcctgaagccatttaaactcggtttcttgttctgaatttcgcagaagataaggagagttacatgtcaatttctcttatataacaaccatctgttattattgatagcctcctcacattatttgaattcacaccgctggctctctcttctctataataaataatcttttaaaattttacttgccaatttaagggattttcagtgaagctaaatgatgtaaaatgaatgttttgagtaattgttacttagtgaactttgttatatcacagggcataaaacagaaatatgatctccttaattttgattctattttctacatgttccataacttcctccatcaatacaaccaaagcagctgaaagttagaaaactgtggtacttgtcttcaaatccctttgcacttaggtagtgggtgtgaaaacagaaatgtaagaaacagaacatgtgtgatatatgaatcaaagtgtagaggctatttggtgtgaaacaatgtgatccttgtagctcctgctaatgcatcattcagcaaatgcctgaagaagacagagctttcaatggcaaaaacagtctcctggaaataaacccttcattcattccctggcatgaaacgttattggatgaaaacaaaggaatatctttatcttatggacttcatatagatgt

SEQ ID NO: 32780 - DNA, 632 bp, Bovine  19866881599483
  misc_feature (1)..(1): n is a, c, g, or t
ntaatttttcttctttttgataaccgactgtttacaatggagaatgtattttttccttttttattaaaatagttttttcattatttacatatttagacatttttgaaatgggtatgtgattgaacttgagaaaacccaaattaaattttaatagatgaataaatgaacacttagatccaactttgaaataaaaaatgatttgttgtcatctaaaaatcatactcaatactgcagaattgatttggggtcttattttgtctataagaactgtggttgatgcttcacggtcttcaaatggattttcaattgctaatgacaaccaaatatattatgctcatgatagtatgtattttcccaaggatgttgaagacattttgggaaagagggtggaatttcttgaaacaatttgccaatatgaaatactgtacatatcaaattggccctactaccatctttcccagaccatttatcatagctcacaaatcaagcccacattttctttttctgaaagacttggctaataaagaagatgtggacttcaaatctgaacttgtcagtcaatcttgggaacaaagcagtaatgattttcatctattgatattttatttcagtgaagagcaatacatacgaaa

SEQ ID NO: 32781 - DNA, 1984 bp, Bovine  19866881648501
  misc_feature (1)..(1): n is a, c, g, or t
nttgtgtgtcaagtctaagaatttattgtcaaactctgtaactttgggtttgtctctttttttctttcggctttgtttttcctgccatattttgcaactctattgtccggtacatacatatttaagattgctatgtctttgtggattggaatgtctctgtttctggtaatattttctgctctcaagtatattgatactagtgcagtcactcctgcttttctttcattaatgtttccatgatatatctctttccatctttttatcttctatctgcttatctcattatatttgaagtgattttttgttgtcagcatatagttgggtcatattttttaatccaatatgccaacctccattgtttaactggtatatttagactatattttgtttattactgataggacatggctttagcttgccattttgtttttgtttgcttcttctgttcttttgtttctctgttttcttcccaagtcctcctgtgggttacttgaatacattttagaattcaatttggatatacctatagtattttgagtacgcctgtttgtacacatttcctgatggctgtgtgtgtgtgtaaaatcacatagcttattgattccctcattttaccagctcaaatgaagtataaaaacattagtttttatactaaaaactactttactttccattaccctcatccacttataattctcttaaatattttctctctatatatttagaatagctttaaaatttttgctttaatcatcaaatataattttgaaaactcaaaggctattgtatttactcatattttttcttattatgttcttccttcctgatatactaagggttccttcttattttgtttcctttctgtttacagaattcctttagccattcttttggagtaggtctccttggacaaattctgttagttttccttcctcttttttccccttcattcctgaaagacatacttactagctgtagtgttgagctgacaactctttttcctattacacccaaaaatactatgctgcttcctttttcctgtctgcacagattctgataagaaacctgtcactcgaattactttttctcctatacatgagagattgtatctctatgatggctttcaacattgtctttaactttcagtagtttaattttgatgtgctttgtcattgatttctttgggacttattcagtgtcctaaatctgtaggcttctatatattgccaaatttaggaagttttcagccattattgctttgagtatttttttaagccaacatgtccttctttctctccttctaggactccaatgactagaatattagttcttttgttataatttccttggttcctaaagctctgttcatttatgtttagtttatttaatctcagaatgagtaatttcaaatgtagctgttcttttctttgcctcctctgttctgccattgagcccacccactggcctttcattttggttattgtatttttcagttctaaaattactgtttgtttcttctttatatcatctatttctttgctgagactgtccaattttttatttgcttcaagtatggttttagttgctcactagagtaatttttatgatgattcttttaagatttttgttaaataattctaacacctaagtcattttggtaattgcctcttttcgttcagtaggagattttcagtaagcagtataagtgatttttctgttgcgcaggacatttttattttatgacctgagactctggatattacttaaaccttatgctttagctagctttctctgaaactgctctggcaggggaaggggagaacagcatcattattgttagatggtggtagtacaagcctacattcccacttatcctccactgacacaagaaagaaagctcctcattactgctgagggtggggtgctttagctgttttgaaagtcttgactgttccctagggattctctgataccagcctaggga

SEQ ID NO: 32782 - DNA, 813 bp, Bovine  19866881686357
  misc_feature (1)..(1): n is a, c, g, or t
ntaagacctagtacaaaataatagtatgagattataatagtaactgaaacagtatgatattataataacagtaagataatagtagtgatcaagactcgagcatagataatactgaaagaaaaagactgttatcaacaaatgccccatgataataccacttttgtcataatgctcatatcttactacagcagattctcattcactcaatagtggatctaatagtcccaatatcttttggtgtatacatacatgtattcaattatatgtatgaagtttcaaaaacttaggacgagcaatgtacatataataactattattaaaatgtctaggttcttcacatagatgatttttaactttggccatattcttcttcctctaattgtaaattttatttttgtatttaattctaattctccatggccatacactctaataagaatagctaccaacaattaaactggtcaagtcagttaaaactaggcaactgaatcaaaacttcaagcgaagaaattaaattatatagcattatgtagaaagaacaccaactcaactgcctggacttttcatttcataagttcgtgtgtgtgtgtgtgtgaaattttctgctatataaaattatgaaggtgtaaaatacttatgttctccaagtgtgtatgatatgtgtgatttgaacactgctgtcaaaaagccaaacagtgtcttttgcagaaattgaaacaaaagaaacatctgcattatatgtaaatcagcaggtatcaaatttaatactatcaaaagataaaaaacaaacataaatagtaggaagattgtttc

SEQ ID NO: 32783 - DNA, 1581 bp, Bovine  19866881730557
  misc_feature (1)..(1): n is a, c, g, or t
ncagaaagattccctggaggagggaatggcaacccactccagtattcttgcctggagaattccatggtcagaggagcatggtgggctgcagttcagggggtcacaaagagtcagacacgactgagtgactaagcacagcacataagttttatacatttctgccattcgttaactttatataccatccaaacatatcttggaaaagatcacatatttttctcaacttcaggttcttcttatgtaaaatagactggttttgtgaactgaaacatgtttaatatttctttattactttaaaccaatgtgaataagttattaagtcaatgtttgtattaataagtttccttccacttatgtttgataaaacctcctgtctattcttacctaactctgtcatcatcctgttttggtcagctacacaataagtactttgaaaattataaggctgaacagaggaaacttctctatgtagtaattatgtaaatatagtctttattctaaagggaaatcaaaggacttttaggaaggcagaaggacatccaaataatgtccaagatatcattagtaattatcataaagctacatgagagaataactgatagaaataaattcattccatgagaagattaattaattgaagggagaaagttttttttttttttttttaaagtcactcctagctaaagagcagtatttctgttgtaaattgaaaaacaatcctgtaaattaattggtagctgctgccaccaagtggtaggaaaatatttcttcaaagataaggatccaatagcctttagggggaaaagcttccttatcacaatttagtaattaactgtggacctgaatttatttcatcccttcctattgcataataaccacccagaacctgatcttcattagatgctcatctgtctttgatttatattaccacactaccaaagtatctttctgttcaaagagaaaacttaaggcttattttgatgtctgtcccaggagctttctccaatacagaaagaaaaaagaaatataaatacaatgaacacggagagagttgggataaaatcacaatgggaaaatcctaatgtagttcagaaagatggatgcttgaactttgccacttaccagatacaggatgtgaaaaaaattggtcataggatttgttttcttaattgactatgaggattcaattacatgatatatatgtaaaatgtttagcctagagcctgatatcctccagtgctcaataaatgataaccagttctttttattactatgactgttatactacattatcagatcagttgctcagtcatgtccgactctttgcgaccccatgaattgcagcatgccaggccgcacataaatgttgtatatagtcatacaattatgactatatacaacatttatgggcttccctggcagttcagatggtaaagaattttcctgcaatgcaggagtcctgactttgaccccttggttgggaagatcccctggagaagggaatggcaacccactccagttattgttgcctgaaaaattccatggacagaaaagcctggggggctactctccatgggatcc

SEQ ID NO: 32784 - DNA, 1214 bp, Bovine  19866881865683
  misc_feature (1)..(1): n is a, c, g, or t
naagtagaagataaacctgtttccatttttaattcttactgaagcagaaaatcacttttatcttttttaaaaaagagagaaaacaatattttttattgaaggtattttagttttaattggtaggattctattttttcttttctactgaagtatagttgatttacaattattcaaggtattctaaagcttatacacattccaattgttggtgtttttggaaaagacaagaatcgtgcctattgtaattatgagtatttcagtctcagacattcagcagaatctctgttcccaattgtagccagcattactctgattctagatcctttgccagttgcataaaggtcatgtggaggtgagcagagtatgaggtatctggctctaattccacttgaaacattaaagtgactccagattgataaaatagagagcgggaagagcgtgttggactacaaagaccgcaaacccgagtgagccaattggtacattcttgactaacagtggctgacaatgaaagggagaagagacctgaggaatgaataaaagcttcattttagtttaagatgtagctaagacttacgcgagaatttggtagaaacatgactgaaggcacgagagtaaacagttggcaagaaagacaaaaaagctgttcatgtttcctgcaaggatatgaaaactcatccttttcagggtcaaatactggaacttggtgagatagaggtaaaaaaggaaattaagaaagttaaaaacaaactctatggctgtcttcagaaggcacaggagaggacattctactggaggtctatttctaagagtggcaagagaaagatcatataataaagttaagaaaggtgaaaatgaattaaagcttgagaggattattaccaattaattctggtcaaacttaccattgcttaggccccatgcaagtattttacatgaaccatgaatacaggattatttctgtctaataaatgaggaagctgaagtttagagaggttaacaactagcctggagttcgaacaaggctgagtcaggacccaaatccagctttgcccagttccacagcccgtgtggtaaataactactaggctgaaaggccatcgattctcaaagtgttccttttctcctgttgtgatcaatcaacttattctctggcttgaacatgcaaattgtttgcaaatagctcatgagagcaaattgctgaatatatttgt

SEQ ID NO: 32785 - DNA, 1573 bp, Bovine  19866880489560
  misc_feature (1)..(1): n is a, c, g, or t
natgagaaagtgatgtatccttaatggacagaggccttcagacagtttcttaaatgctaaaggatgtggaaactctttgagacagttccataaaacagtaataacttggcataatcccatattgagagattttcgtctcactcaagtttctccctctggaacagtgcagctgccagtgatattatccacttagagtggaggttactttgcttttcttactgggttcttgtctcataaagaaatggtaggaaacattgagctctttcaccttcagagtgagagaataagcctcatgataactacagctgaattcctccagtcagtcattcaacaaacactgctcagcaccttcttgcgtcaggctctgggccaggtgctgggtttagagcagtgagaaggcctggcatcataagattttaagactgggagtgacttatcgtatcagcatatctgaaagatcatcctgctgtccccatgacaggcagcagagctggcgtagactgacgaagacgtggcgcggtaggtaacttgcaccagcatggtggctgtggcagtggagagaaatgagcagattcaagaggtattccagggcgggtccaaaaggcgatggtggctgattggacatcacggatcagagaaagagaggagctggggagaacgctaggtttttggcttcgggagtcccacggaaggtgatcccaggtcctcggagctcacacagcacacacggctgggggtgcagtaataaaccatctaggaaatactgccgtctgtggctagtgtgcgtgttcctcctcacagggacaagtggtgccttattcttctggcatgaggccaagcatgtcaaaggcatttgatccatgttgacaaaaagacaagttgagaatttgcagcataaggacataagggtggttgacctatggtgtagagtgctcccctctgcccatttaaaatttcattttaaggaaatgattttgaaactggactccattattaccctaccactataaagacctacaagcaaaggcaacagaagccatacccttctgcctcagggacataagaatgtgcttcgtgacaggcagagctgagaccaggtgagcagaaggagtgtgtgtgtgtgagtgtgagtgtgagtgtgtgtgtgtgtgtgtgtgtgtgttagtcactcggtcgtgtccaactctgcgaccccatggactgtagcctgcctggctcctctgtccatgggattctccaggcaagaatgctgtagtgagttgccatttcctacttcagatagtcccttcccagcagttgaacccctgtctcctgaattgcaggcagactctaccatctgagccaccagggaagcccatagagggaaattaaagccactccaggtcatatattaaagccaatcaatagccataaactattaaaagaaatatatatatatatatttacatgtatatatgtatttatagccatatatcagtgcaagctcagccagtcagtcgtgtctgactcttagcgaccctatggacagtagcctgccaggctcctctgtccaggtattttccaggcaagaata

SEQ ID NO: 32786 - DNA, 1281 bp, Bovine  19866880564128
  misc_feature (1)..(1): n is a, c, g, or t
ntcccagaagtgataaacagtggcaacgtaagggcaggatggatgtggggagtggagaggtgctttcatgggaacataggtgggtaggcatactctacagcagaatatttcctttaaggatttatcacacggttgtttgttatggggccatgccatgaggcatgtgggatcttagccccctgaccaggaatcaaacctgcagcccctgcagtgggagcttggagtcttaatcactaggccccaccgggacgtcctcctttctttctatcaaagaaagaaaaagtgaaagtgttagtcgttcagttgtgtccgactctgtgaccccattgactgtggctccccaggctctctgtccatgggattctccaggcaaaaatactggcgtgaggagccattcccttctccaggggatcttcccgacccagggatcgaacctgggtctcctgcactgtgggcagattctttcccgtctgagccatcagggaagccctcctatcacagagtttctccaaataagcacatttatagagtcccgtcacaggctgattgcagcttccacccagcactgacagtgcctgagggcagaagttcttgtagagtaaataggacgccagcctcacagaaagaagtcacctctatcctagaccaacggtatgaccttggttagtgtcctggatgaatccgcacttacaaccccacctccacaaaatgtagggagatggtggcttcctgcccagctggcaagatccctgcttacaaagaacgctgtgctggggaaacgaaggtcctcacactattaccagcactatttaaatatgcttggccgagagccttgcccgttataggatttctgccttgatgcccaaggcattctctgcccaaagactgtggtaccgacagtacattttgctgttggcagaggtggaagaagctaagcaggctctctttggccccaaagacctaccagacagccctgggtatcctgcagatgctcactctacagaagcacctcatccagagtcagctttcagatggccaccagctgggccagtgtgatcagaaatggagggacagtcgaccttggatgtacttcctacagccccactatgagtttctgggtccacagggacccggggtggcctgctgtgggcagattcctcctggctgggccactggatacgagtcttctaacagtcagtggctgagctcatgaaaggaagcaagcgacggggtttgtcatcagcttctccttccagtgcagagaagtctcaggtcaggccc

SEQ ID NO: 32787 - DNA, 1050 bp, Bovine  19866880582632
  misc_feature (1)..(1): n is a, c, g, or t
nataaatcgtatcactcaggcattgctggttggaatgtaaaatggtgcaaccactctggaaaagagtctggctatttgctttaaaactaaaatcagtggaggaggaaatggcaacccactctagtattcttgcctgggaaatcccatggacagaggagccaggagggtgtcagtccatggagtcacaaagagtcagacacgactgatcacccatgcacacacaaagccaacttaatcttggggcggagccccccttgcctgctggcttgcatctctcacaatcatcctatattaataaatctgcatcttgcctatcaaagaaaaaactaacctaaaatcagacttatcatacaacccagtaccttcaccttgggcatttatcctaaagaagtgaaaacttatattcacacagaagtttacacaaaccaagtcacacaggaccagccctcaacagccccaccctgagatatcaagagtggagagtaccatgacacatatctagtttgtttgttgaatgagggaacaagatggacctgactgggctaaggatacactcaaatcttttgacaactcaaggcaggtgaaaaacttcaaactggaaatattgaattttctgctcttcagtgatgaattagaaaaataaaaaccatatgaccaaatgtatatcttgagttatgaaacagctccatactggactaaacagaaatagaaatgcagagaaaagaatttgtttctagtacagtatttttctttttttagaactatttccatttttttagaacagttaatgttttattatacagctatttgtttgctactaaataacagcttttaaaaggctttgctgctttctgtagtcaagttgattctatcttggaaggacaatgtagatgtaataatagaaaatttgtcattcactgactagggcatctaataagggatcctgatgctgctgataggtactgataataacagtgttattttacaggcatatatgatgattacgacttacaaagtcttgatttgtgattctctcctgttaggattttt

SEQ ID NO: 32788 - DNA, 3513 bp, Bovine  19866880624068
  misc_feature (1)..(1): n is a, c, g, or t
nttgtatgtttggggctgtccttagtgccaggcacaagaggactattgcctagcctcgtcctagtcagctcatgactctgacacaaggacctttcacttgtccttgccttttagaagtggtctctgttctgtttcctgtccaggacacagcatgatggacacattggctgtcgccctacgggtggctgaagaggccatcgaggaagccatctccaaagcagaagcctatggggacagtctggtatgccccccaccccccacaatgtctgtctggaaggtggtgcgggtggggtcctggctgccaagagaaagcacagcttgtggggacaccatcatcatataaccatccttgaactgagcccgtcctccccctgcatttgtggtcaggactcccaagaaatcgattgccaagtcccccaaacacacccacagctcacacccttcccttcttccctctgcaggacaagcagaatgaggccagttacctgcgggaccacaaggaggagctgaccgaggagctggccacaaccatcctgcagaaggtaggcgcgccctggcaaccacacggctgcagtgggccacctggtccagaccagggccttcggtgagcggaagagccgccgagggtaccgctgttgtcttgggcatcgtttgccttgttccttctcacttttgcccttgtactccggggctaaggcagaggggttgcattgcactgcgacaaataagcagtgtgaacgtgcttgcccttagggattgagctagtgggtgaggagccaggaccttggcccagagacctctgtacaaatggacttattaaatctaagtgaccatgcccaacatagcaagcggtgcagacaagctgaagccttccttcgtgacacttggtatctgccccctccttagggctttcagacccttcctaaagtcagggtgtacagccggagactctgggtttgagatccagctccactgttgatgagctgtgtgtccttaactgatgacctctgagattaactctgcatctgtaaaatagggggagttatagtaggtagctcttagagttattctgagaattcaatgacgtaaagcatatatggtgtcaagcacagggcatacatgatgtcaagcgaccccagggactgcagccggccagtctcctccgtccatggaactctctaggcaagaacattggagtggctttctattttcctctccagcggatcttcccgacccagggattgaacctgccctcctgcactgcaggcaaattctttaccatctgagccaccagggaagcccttgtactacatggtgtcaagcacagagactggcacacagtaggcccttaatagaaaaggctgtcagcatcataagaggactacttttaaactgtaaagtgctgtagaatgttcaaagctttggttgtgctgttttatcacaaggcgggtctgaaactggctggtattccgttgaagctaagctcttccgtggctaaaaatttcccaaagatgatccccatgacaccacatagcgctggaagtctctccaataatgtgtgccctttgtcacctgcctcctccccagatcataaggaaacagaagagcaaaagtgagcagcgcgcggaagacgagccggagtggccgcagccccagagctgcggtgcagaggcagctgatgcggggaccacagccgccccgggaggcccccaggcttccacgaccttctgggtgagcccctatgccgccccggcccacccctacaggggccctgctgcgtgcagctcagaaccgttctccccatagaaatggggctgccatgcctaacatctgtagtcagcacatgtgcccgccagacagtgtggattgggggccaggaggcctgttctgttacacgtggaggtgggtttttacacagagaccaatttaggaaaaataacactgtcaataagctttttacaattcattctgaaaagagctgcactgagtcccgtggggagaatggctttctcagggccgtgtgtgttctcacaacctgagcacttgctgtacggaaaccgaggactgtgagagagtgaccgctgccttctgaggccgcggcggcccgtgggtggggcatcaggatgtgggcagacctttttgttccttctccccagtcacgaagcacagcgtccatccagtgacccaagggtctgggcccgtttcggctggggagggtccccaagcccgtaaagtccttcggtgtgtgttcctccttccccagcgagggcgcgtgtggggcagaggatagaggctgggtcctgggggtggagattcagcaagaaaagaagcagggctggccggcagggcttgtgctccgtcagctgcagggacccaagtcatagcatgggggagaggatggggcaacacacaggggcaatttaaaactggaaaggcaggatagaggagaatgaaatcatgccatctgcagcagtggggatggtggggtggggggcggtgggcacaggctgggggctgaagggtgaccctttcgtggcatcttgaggagggaccctgagctgcagaccctggagggccctgagccactggcctcccggcagtgctcccacctgagccactggcctcccggcagtgctccctcctgagccacgagcctcccggcagtgctccctcctgtgtcctcagttctccacggatgtggatgctgtggctccaggggtaactgcagaacccccataacactgtaggactcggtccttgggcttaactgcaaaacccaaacttaatccatccccagtgacaggatttctcatctgttctcttgaaagaaaattcagtgtgatcgtccctctttttaatttcctctctgattgtgtggctctccgccaggaagggggtcagtgcagtcttgattttcaaagccttaagatgcaatatcctaacaggcaccagggcgggggttatcattcatttagtgccggtctccttgggcacctgtatgtaaaaagtcatctctgtattcatatggtggtcctagtgataacaatgatgagagcagaggctgggcatgcagcatgcccagcgactgagctgtgtctctgtctaactttctctgtctcttctccatccttttctattttcttcagccatttctctttgtgtttgtcattttcctccctcacattttgctctctcctttaatgactatagggcagacctgaagtatttttcatgactgttataattattggattgaatttaatggctgtgcctgaccccagaaatacaaagcaatgtctcagctgttattcattcgaatattgttgacccctttgcccacaaacccttgctactaaaaactttcactctgttcacccctgatgtgggctccttgagagcagagactattttgaagccccagggagtctgccctgttggtgatgatgataatcattgcagtcatagcaaccatataccatcgcaagagatacagggagggcaggatgctgctgc

SEQ ID NO: 32789 - DNA, 1315 bp, Bovine  19866880712840
  misc_feature (1)..(1): n is a, c, g, or t
naaaaaaaaaaaaaaagaatctcaaggaaacagaccaacctatgcattgctgtatcctgctctcctgttgagaatttatcatctcatatgttcccagattaggaaagtcttgctgctgctgctgctgctgctaagttacttcagtcgtgtctgactctgtgtgaccccatagacggcagcccaccaggctcccccgtccctgggattctccaggcaagaacactggagtgggttgccatttcctcctccaatgcatcaaagtgaaaagtgaaagtgaagtcgctcagtcgtgtccgacccttagcgactccatggactgcagcccaccaggctcctccgtccatggggttttccaggcaagagtactggagtggggtgccataagtcttagcctatggcaaatggtccagaagcactctgggcctgaccaggaaaggctgtgctgggatcccagacatatgctcatttttgtattggctttggtgggaaatagggcaatgcttattaattctaccactgggaagaaactgattagctttctcagttccaatgaaaaattaactataaataaatagataaatgatcagatgctagtgctggaatcagcaattgtgactagggagtggagctgtggtgggatcttggatggcaacaccttggcagtgatggaggagcagttcccagaaacagggacgtgttctcagaatgggcatgctctaaagaccaggtggtaagtttccactgtggcaaagttcactgtccctttttattgggaaattaattctggcttttgaatacagagctattttaggcataactgatatggaaaaaaaccttgaactttttttccaattcaacagaaataggcaaaactttccaagaatcagtacaaatttaaaattatttagaattacactgggaaatatttggaatcatcctgtatagcacacaaaaaggtaaaataccatcaaatatcactgattccagcaaacctcaaaaatcagtctttcatctggcaaaaacgaaaccttgtacaattcctggtgaaagacacacttcctctgaccccatttaatatcttgtttccaaaccccttacattctccactttgatatctgaggactagcggcagctagaactgaaggtcagttttaattgccccatctatagaaagaagggtgatctctagagaggcacagggcttgaatgtatctgaatttagcacctttaaattatcagggcccaacaggcagatcccgcatctggcaggggaaagattttcaaatagaaatgagttcttacagtctttaagaac

SEQ ID NO: 32790 - DNA, 707 bp, Bovine  19866880843412
  misc_feature (1)..(1): n is a, c, g, or t
nctgcaggatgccttttcggaggcccttggtaaaacactagtaacgggctggtggccaccagggcagtcagccacaccaccagactcagggctgtgcccatgctgattgtcctcactttcaaggcatatacggcatggacaaccgccaggtaccggtccatactcatgagggttataaagaacatgctgctgaagaagccgatgtaataaaagccagagaccaccttgcacattacggtcccgaatacccactggtccagttgatagtgggtctgaaaggggaaggagaagacaaaaagcaggtcagacagggccaggttcaagaggtatacatccgtgacactcctcagtttcttgcaggcgacaaggactaggatgaccaggctgttgcccagaagaccaaatacaaacaggatgcagtagaagacagcaagaagcagcttgctctctctcccctccccatcgcaggggctcgagtagatgtcaggatagtagaagtcagttgctgttgtcaaattgggctcaggtgtgtaatccatcaaggcaggaggaagccagccacagaggcacctaagagacattcatttcttagtgatattttttatttaaaaatacggactgaattgtgccccaccgctccccaccaagttcatatgttgaagccctaaagccctgttatggactaaatgtgtccttccaaactttgt

SEQ ID NO: 32791 - DNA, 1285 bp, Bovine  19866880851455
  misc_feature (1)..(1): n is a, c, g, or t
nagaagcccacaacagagatctattcaccagatgtgcacggatgaaaatacaggtacaaatgaatctcccactctcttttggatcagcaactaaattatggtataatgattactagtattcagaatgtcaaagtggaatgtagaatcagcgacagatggagcaatcaaactttcagtaagagttacgcactttagaaaatgatcccaggtgtcttacagtattctaggcttggggaatagagacatgatacacttccctgtatcaggcagaggcactgcgacccacaccaccacttgttcacgtctgacaaacccacgtaccacagagcacagtgaagttcatcccctacagcctcggactctcctcaggagcttctgtccatctcattgtcttaactgaatccagccagtcttctgagaacaatgcctcgtctgtcagcctgtcgagtgaggaccattttacactccgagaagctccagatttgagagcaaggcagcatcctccccatgccacattcagaccgcggctccttcactccctcgtcatttctccgtaacctgaagctgtgctgcatcccctgcgtcagtcttcatctgacttcccggtcactccttgtcattcactgatagttttgttaccagattccgtgctcccccactccctctccgtttcagttgcacccacctagacgacgttagtgtctgtgtgaataaactcttcaccgctccagggaattatgcgctctgccgcatccacccgctgccatgctggaacttagcaatactcgaaactctcctctctgaatcaaatcgcgcaaacatctagctagcacctgattcacaaccttcctttctttcaactttgttaagtgccccactacaaccattctttcaccaggtgcttcggattgacttgccccttcatctccccatccatctatgaatccatttacttatcccttcatcaatgcattcacccatccattcaacaatcactcctttcggcctttctttctattatgaatagactctagggtttatcacttcaattcttctgcacattctctagcaaaccccaaccctggatgcacctatgcgtcttctctgtgtctccacccgggctgctgcgaacatttggagaaaaacaccaggcggcttggtatcactgcaaattaatgggtcagtgacctcgactgggccaccagtgtaacttgtttcaaccactaccgtggagacggttcctgttaaattcaccaaatatctccctatcccttaagcgaatgta

SEQ ID NO: 32792 - DNA, 1306 bp, Bovine  19866880933254
  misc_feature (1)..(1): n is a, c, g, or t
ncatcctttgtttgggaaatattaccaaactggattcttcagatatgcagataaaaatcatccttttttttttttccccagagaaaactttgaagtcatcataaatctgagtatggggcaattgattaacttgattacaatctctttggttaagtgaatatattatggctttaacagaactgttccctggattaggtagatactttcaagtttggggttctgctcgtggtgttatttaatgttgaggaactaagctttggagaaaatgtatattaccgatttacctattagggccctttatctgggccaccaaagtcaccctggagtttgaggaagtatttcgacttaaaggattacgtgtttccatggtgaacattttcctgtatcttccaatcctgtaaatttattgtgggctgaacactgtagtagcatgatattaggtggcagaggttctggattaagctaaattactggaggatcaccttggtcctgtccaggtttggttttaggccttgttagggcttgtttgtctttgccgtttctcctaggcatgctcccctgccctagggtgagatctttctggggcttcaactgaaagtctagggtgttcaccagggtcttgcaattgccccagtaatgtgcaagccctgatgtttctacttagtcatcaacctctttgtgactggtgggtttcttccccctgggcttcccacagtttcaccctgcaaacgcacaactttggaactggccaaggatctgagaaaagttattgtatcttcttagcaggtccctactatctgttgcttgcatctcaaaccccttctgggtccctgcagtcttagcgacccctggctctgatctctgactcttcttctccacgctcaggctcttttcccctgtaggacagtttgaaaactatcttcaggcagaaaaccaggggaaatcttctcttgcttcctttctctcaaggatcaaagccctgcaatatttgctccccagtgcctgcaaacaattcttttgcatgttttgttcagcttttgtggttgtgtaagttcaatacttacagtgggagtgtaagttcaatacttgttagtagatcatgattaattttttaagtaagaaaacttgtagagtcatatgatttcaattattctgtcaagtagttgggagaagaggaacattctagtgatcttcatctgatctgacagaaaaatcttacaaagatttatacagttagacagaagttgccaattacatcattatcactagaaaaagtatcaactaagacaaccagttagaattacag

SEQ ID NO: 32793 - DNA, 952 bp, Bovine  19866881216445
  misc_feature (1)..(1): n is a, c, g, or t
nctacagtctatggggctgtagagtcagatgtgactgagtgactgagcatgcataatttagaacaacactgaggatggtgttagagtgatttccacttttcacattaatcaactgagggctggtgatgaccaggccagaacctgccctcagctctgtgactcacattcttaaaattgaggccccatttgcctcgtcttgtacacaagttgaccaggcctgactttaccaaacgtttcactgtagatgaaccccagcattgtaaaaatctgtccgatgggctgcattaaatcagttctaaattcttgcatgctagctgttaggaagaagtattagagattacaaagctaatttagcttcattaatcaagataacactaattgctccagtcttcttaatgaaggacagttaatgcatgcaaaaacacttcatcgaagacagcttccaggtacctcctccagggcctgtgctcagagaccaaactcttctgcataaatgttctctcctgaatggactcagcaacctgtactgctcgcctcggcagccagaatgtcccttggaaagtaaaactcctgttccaggtaatccctggggcaagcttcaggtgtctcaggaatcgatgactttggcctgtgtggcactcaggatggtctccaggttgatttaaatcctttgcaaatatcaggaggtacagccaaagagaaccataagtaaaatgattacaaattcagttttctccagcactttttgttgccataaaggtgaatttcacaacctcaagaattcaagtgactgcactttcaacttgaatcaatttctagggactttcctgttggcctgggaacagtggctaagactctaagctcccaatacagggggcccgaactcaatccctggtcagggaactagatcccacatgccgcaactaagagtttgcatgctgcaagtaaagct

SEQ ID NO: 32794 - DNA, 992 bp, Bovine  19866881225609
  misc_feature (1)..(1): n is a, c, g, or t
nctccagtgttcttgcctggagaatcccaaggaagggggagcctagtgggctgccgtctatggggtcgcacagagttggacacgactgaagcgacttagcagcagcagcagcagcaaaccactctgaatcacaaaaaagtgatgacttccaaactttctgaaaccattatcgctcagatacaacaacctcacaaagagcacatgcaagaaggaaggaaagaaggaagaaaggtgggagggagggaagaagggaaaaccaatctcacttacagtggcaaaatattacaggcaggaaaaatataggaatccttattatcactgtagttatacaacaaatacatgtaatataactaatacccaatacaattagacaagagaaagaacaagagatataaataccaggatatcaaaaaggcataggcaaaaatttactatgtgtcaatgatataatctaatttctgaaagtttaagagaatccattgtattttacaatgcaataataatatttttttccttgaaggcatttttttttctaatctagatttcttttcactttccttcatttaagctttacagtcacagtggctttatattgttgcatccggatcttctgagctagacggtgaaaaaaaccagtgagttctcagatgaatgctgcatggcaggagcactggtgaatgttctcagaggtgggttcctggggcctgaggttaactgagccacccttcccttttcaaactacttctgtgattgatggatattttagatttatctgcatattagtaaaatacagcgttgccatctgtgtccctttctataaccagggcaagcaatacatctcctctgttatgagggggaaaaaaagagagagaaacatataatagcttccttttctatgatttgggtggtaatgtcaactccctaatacattaaactgtaaagattttgaaggcaatatgcatctcagctgggaaatctaaagtaggaataaa

SEQ ID NO: 32795 - DNA, 1129 bp, Bovine  19866881305264
  misc_feature (1)..(1): n is a, c, g, or t
nttaaacaaccaatttcatccatcatcgttcgagtctgtggagctgctctccaacttcatcttctgagtcatctaataattgtgaaatgttgttctctcagttttttttcctttgccattatgaaaaatttgaattcccacctgtatacagtgagctaaaagcagactcaaaatgacgatgatttatttccatgttgaatcatccttctaagtaattccatttttctcttttgttattctagtctcttttttagcataattggaagtatttgatgagtaatgatgaaagataattcccaggataataaaacagcaaaatatttccaaagataaggaaaatgagatcatgaaaatcttgtcatgtgtcttagatttataaaaggatccaatgaacccagataataattgcaagatggaaggagttttatttacagaattagtacattttctctttgttcttcgggagttcttcaataaagaataaaagtcatgaaagaccaagccttttaaacagatagaacaactcaaagaggaaattcaaaagctaatattgtgtgcagtggaccctgatggtactctgggggttatcttgttaaaattccatacacatctgtccaacatgaggtgaagaatagagtgagacttaacgatttccatgtcttcctggagtttcccaggcccggtcagggctctactcatagagggagctctaggagacggtaggagccagagatgtaattgtgtgactatcaagggaaggtggcataatattccttaactgtgcacaagaacctcacaccatctcaaaatctttgtgatctgcccagaatacggttctttcctctctcccttttagctgggtaactgctgcactttgaatctcaactcaaacaccacttccacaagccagctttccctaactcccagccctcccatcaggcgccccttagcagggctgtcagagcctccatccccacccctgcttctctgcacttagcagggttttagtgtctcctccactgggagctggtggaggtttgctcagacttgcatcctcagtaccagcacagtgatgcccctagtagccactggataagtattctgcaaataaaaacacgaattcactttt

SEQ ID NO: 32796 - DNA, 2770 bp, Bovine  19866880272274
  misc_feature (1)..(1): n is a, c, g, or t
nccagggcttactttgcttgaataattagaaaaatatgggaaaagaaatattaaatacttagggaataaattaatgaaggatcatggtgaaatgacgtccagtccttaaatatgaaagcatatcttgtccttgtttatcatttgtcattctaaaattgagctgtaatatatataaagtgcaccaatcttaaatccaaaattcgttaaaatttatatttttatatagccatattcataaccacttccctgatggaaagagcaaatttctggacatcaggggaaagagttacagaattaaccaaacgttggcaatgtcctctacaggtacttgtcatgctttgtggccaacttaacttctactgatggagaaggcagtggcaccccactccagtactctcgcctggacaatcccatggacggaggagcctggtaggctgcggtgcatggggtcgctaagagtcagacacgactgagcatcttcactttcacttttcactttcatgcattggagaaggaaatgacaacccactccagtgttcttgactggagaatcccagggacgggggagcctggtgggctgccgtctatggggtggcacagagtaggacacgactgaagcgacttagcagcagcagcagcagcagcaggaacttctgaaaacctgctgatctttgggaccttcccacatcctgattctcatctacccaagggataagccacaattcactctctcagttttctttgcagcagtcatgtgaccttggcttcgccaattaaatgcatcttagtgaaagcttgcatcagaataaagtaacatgaggaagcaggtgctcaaagtaggtttcattttctggtgtgaaaagcagtggagttgctttgttttctcagcaatcggtaggtaagattcccatgcccacagcagtatctgtgcttagtgtggtctgaagccgtgacgtcatcagtactcttgcacgtgtgatttggtgttgcccccggctcatagactccaagtctctagccctttcaagattccataaactgattaatgctctttaataaataatttttctgcttacactaagtacagtggatttttaaaatttgcacaactagaggaagggatgccctggacaaagtatccttcactattttctaggtggaaatgcagacattgaatttacagagtctgatgctatgtaaacatttagctgtaactcccttgcttatgagacagcttcatgattatcttctgtgtctactgggggaaaatgcaatgaacatgctgatgtgttctaagcactaaaatcattacacttctcatttttaattcataaattataattatggtttttggacaagtcttatgtgggtttgatttagaatgaattagacataagagataaatttattctctgtatgctgacaaaatcaaattgccaaacttaaaagctaggatcacaaactgaatctagttacatattttttgagttagctgacctcttgtaaagacacaagcagcccctttcttgtgaccctttgatattgccacaagattttccttttcttatttatagttattcataaaggttcaagaatgacttatgttaccatttttggacatattaaacatgttaatacaatatacttttaaaaaagagcaactcacctgtaacagaattttctaaatcatgtgttaaaattttaggttaaaccaagtagctgctcctcttcataagctcattcaatctgaataagaaattaagaatcaatttattggaattaaatttaagttttcagttttacatgtaaagtggaaaagaggagcaatggaaagaaatcgattgaaacatggaataatctccagataatagaaaagatattcactcaacagaattcttcttataggaataattcccctttggcattaaaataaagcctattgagtgttataggactctttgtacctgatctatattttctcatttggtaaatgtatcacagtttcttccatattctttcaagtaattgaatcaatttaaaaaatcggcttggtgaccaagaaataagaagctgcttgttgagaaacagtaatttagatttgatgattgtgattcagtctgaaaaggttcttctatgaaaaacataaagtgaaagtgttgaaggacacttcagggaattaacagtaacatagggtgtagaaagtgccagactaaaaaattcccaaaagtcattcattaataggaagtgttgtatgcaactccagctattagagagtggatggtaggtagtattatggcaaactcatcctaagctaatcattgcaatcaggacatttcagtgaattggttttaatttaaatttgatggaatgaaatcaattgataggataattttggaacatatgaataaatacatatatttgaacagctgttagagaagatgtggagtaactgaaactcttacattgttgacaagagtgaacaacctcaagtatatttggaatagagtttggcaggatctaccaaaattaacatatacctaacccatgactcagcaatgctacagttatagatatgctcaagagaatgaatgcatgtgcccacaaaaacacatgtgcaacagtatttatagcagctttattcataataacctcactggaaacagtaagaaaattctccatcaataggaatggaaataaattgtggaatattcatataatggaacattaaatagaataaaaaaaaaacaagaagaagaagaaattccagata

SEQ ID NO: 32797 - DNA, 1472 bp, Bovine  19866880460115
  misc_feature (1)..(1): n is a, c, g, or t
nactttttgataactttgcttgatatcaaattccatacaggttaagatatatgcctcccagtcatttttttccacagtacatttaagaaggaaattttattgaaatgattttaagttaaggcatactattgaaatacttgtgattcccctggtagcttggctggtaaagaatctgcctgcaacgcaggagaccccagttcggattcttggatcgggaggatccactggagaagggataggctacccactccaggatacttgggcttccctagtgactcaactggtagagaatctgcctgcaatacttaaaatctgtaaagaaaggtatatttttgatcctgtctgtgttttgcgcatagacttttttccctttctttcaaaacgtatataatacattcttatttgttttagtgtctaatatatagtttaactatactgaatacctaataaagataaaattttgcctatcttggtatcagatctaaataacctttagagtaagggcctgaagcatagaattatcacacagtggttttatttacaaggtaatttgataggtttgaaatagtgatgtgcttttgactctttggataaaccattggcattttatgttccaaatagctacatcccttgtatgagtcatgcagatagatagatcttttaaattgcttttaagcaattttgataatttgcctttcactgtcaaaataatgactgacgttaataattctgagtgattcagttaaaggaaaagagaacagaaaagtgtgtgccaaataattttgtgctatgatttttggctgtaactctgaagatgcttcatttcatcaaagatgaatgtaccagcattttcagtgagaggaaaatgagggaaagaaaaggagtgtaagattaaatcagatgtcatgagatccttttttgaaaaagatttatgagctactggatacatcgggcagattttcttccttttttaatcctagaatgtattcttggagttggtatagttcatttttctactgagccctttctagtacagggccacttaatcttctggtgtaacaatttatgtgaataggtagtaaaaattttgatttcatttattctcctatttgtgggaggagaacattggagaaaaaccagtgaagtggtaaatgtgtttgaagttatttatgaagctgattagagtttccttttgcttctttctctttcatccctgcaaaatgtaatgtcttatcccctatacatgcatgcatggaggggatttatgggaaaattagttgttattaaaaggaggtaaacaaacccatgcttcggtttattcaattaattttataactatgcaagattttttcacaaaaataaatcaaaataaatgagtagagcttgatgaaagagttattaccattgaaaatatacctgaaaaacaagctcaaagggggacaaagtaatttgagaattgagtgagatttatt

SEQ ID NO: 32798 - DNA, 1298 bp, Bovine  19866880461142
  misc_feature (1)..(1): n is a, c, g, or t
nttagtaatttagtccatgtcaaatgcatgctctgtgtgtgtgtgtgtgtgtgtgtgtgtgtatgtgcgctctagtcacttagtcatatctgacactttgagaccccatggactgtagcctgccaggctcctgtatccatgatattttccaggcaagaatactggagtgggctgtgtttcctactccaggggatcttcatgacccagggattgaacccacatctgcattgcaggcagattctttaccactgtgccacctggaaagtcccatgtcaaataagtatacgtttatatggatgggaaagaacaaagaatctgagagtattccttgcagtacagagaaccaacgtggccctgggctttctgtcttgtgtactgttttctcctttgctagactacaatttgtgctggcttctgtgaagtcggtacaggatatatgttatatatatacatatatatataggtgaattatgaggatgtgtgtgcctcattacttagctaaaatcatataatatccagaatacatcatcaccaactgtttaatagcagcaaattgcagcttttttagtgacaggaattaatgaataacattgccaaaattgattttaatgtattgggggaatgatttacttattgcttattctcaacagaaaattaaaaattataagctgattgctgaaaatatttaatgatgagtcttgattgccatgtgttctcatgaccttgtgtgctattccaaaaatacatagaactactgaaagtgttgtcatttaatggcatcaatttacatctgctctaatttgattgtagatagttgtctccttccattttaatgagataagtgtaatttttttcaacctcatagacaacatctgggggaagatgtacgggacttcacaaaggtgctgaagaataagttcagatcgaagaaatactttgccaagcatcctcggcttggctacctgcctgtcccagacagttcttgaaggtgacaacttagagacgtaagtttaattttactattaaacttgtatctgtatgtgctcttatacctgatacttttatattagtgacaaaagataaatctgatacccaaaaagaagttgtgttttggtaaaatgtttcatctacaagaagggcaaataaacttggactcagtcttggcaacatgaattttgactgtttttgacagcacaggtttaattttgcatgttttcctaaacttttgaaatatgtaataatgtgtccacctttgcactggtcatctcttttcctcttaaaaatactttaagtaaatt

SEQ ID NO: 32799 - DNA, 1765 bp, Bovine  19866880517598
  misc_feature (1)..(1): n is a, c, g, or t
nttgcttggagaattccatggacatatacagatagaaacctaacatagtaaaaacatgtgtgtttcttcaagagtcaagcatttctaaaacacaaatatgaaatttaattatttgtacatgtgaaatatttagtcaacattgttttatctctcagaatatcaatatttcaaatatggatttttatgcagctttttagttcaagaaagttacaaattttttataacacctttaaatctaaatctacagcttagaaatgccacagaagccacggaagatatacccatatccaagaacctgatgaaggtggcattgctagccccaaaaaaaaaacagaggaacaaacaaaaatctcaagtactagaagtggtctattgaggctttttgctggatttgatagaatgttttgtgcaaagatcacattcttgaggttgtggtcgtgctgaaggggtaagaacagaggacgaggaaagagtctgaacaaaggaagatttaagttgactggcagggcgaaaaatccccacagaggagtctgtaaattcaaaagcagtggtgggagttcccgctggaatactcggagatgaactgcataaaataatagaggcccttctgtgggaaagcagcccaagctggcagttgctcagacgagtccacccaccaggaccagagtcgatgatggctctagggctctctcagtttctgtggaagagttccctgtctccagcctctcaggaaaatggcctgcaggcctttaagtcccggctaaagtgattcccaccatgctggattgcacctggaactgaagaagcaggaggattgttgaaaaacatcttatgagctcattgactttatccatatgaatatctttatttttctctacaaaaacaaaagtaacatttctggcatgttccctggtggtccactctgaacttccaatgcaggggtcatggctgtgatccctgattgggaaaccaagatcccacatgccatgtggccaaaaaaaaagtagcattcactttcatgatcaaatatctaggtattttctcaaggttttatccattgttcagaaaacagtattgctagactgcatgttgtgcccctccccacatgtattcttcacgtcattggttgtaattgaagctgtgttcgagggcacacagagctgccttgaataaagaccatattgtccagttttcttttaactgcaagctgcaatgtgaataattggccagtgacttataaatggtactggaaagcttccaggaaaacatacttaaaagattgtgtcagtgtgccctttgtctgctcctgggaacaccaatttcatgactgatacttcagccattgtattggaccataacgatggaggtcacagcccagaattgggagagaagtgagttggtttttttcctgatgccttagtcaagtctctatcccaactctggactaccaaccttcagactttcatgaagactgaaataagctgttacttggagaagatttctttcatctgcagccaatgctagacctacctgatattagtacaaattagtttaactattagtataagaaatacaagaaagaagtcactaaccatctccccagaatactctagctttttctttttttttatcatgtcctctcaatccttctctgaaataatgctatagaatctaaaaaaaaaaattgttaaattttcaatttctgtacctgaatattgacttagagaaatactcacatacttaaatttttttttgcttctggcct

SEQ ID NO: 32800 - DNA, 1030 bp, Bovine  19866880568537
  misc_feature (1)..(1): n is a, c, g, or t
ntcaaggctatggtttttccagtggtcatgtatggatgtgagagttggactgtgaagaaagctgagcaccaaagaattgatgtttttgaaccgtggtgttggagaagactcctgagagtcccttggactgcaaggagatccaaccagtccatcctaaaggagatcagccctggatgttctttggaaggaatgatgctaaagctgagactccaggactttgacgacctcaggaagagttgactcattggaaaagactgtgatgctgggagggattgggggcaggaggaaaagggaatgacagaggatgagatggctggatggcatcactgactcgatggtcgtgagtctgagtgaactctgggagttggtgatggacaaagaggcctggtgtgctgcaattcatggggtcgcaaagagtcggacatgactgagcgactgaactgaactgaactggtacactgaggaactaaaaggaggctgaatagttagtaaacaagccagtctctagaatctaccccacaaacaattcccagataaaattcgagacacccagttaaactagaatttcagataaacaacaaataattcttagaattttccaaatattgcaagggacacattgatactaaaaaaatatatattcataacttacctgaaattcagacttatttgggcattttacatttttatttgctaaacattacaaccctactgccatggaaactgatagaaagtgaaatcattcccaattcatacaaagttttggtaatatttattctcagataaggattcctgcagtagagtacccacagatttctaatggaagcattttcttcttttaaactaatagacattctttcgaatttataatttctccaaaaataggaagcaaacagatgtttgtatgttggttagattctcgaaaccagtcagaagatatcagtgccggatggctccctagagagaatgcattccttggagggaacttttttaatctactgctttcttttaacagataagttagaacaga

SEQ ID NO: 32801 - DNA, 1211 bp, Bovine  19866880568742
  misc_feature (1)..(1): n is a, c, g, or t
nggtgtaagtcttaaagaaaaacctttcagcattaacagcttatttaagccttttaacagcaggctactggagagattacttaatggtttccatagcagtgcagggaaacttttaaaaaattaaagcaagttttaaaatttctgtttactggtacttgaatttctccacaaaataatgttgatttttaaaaaagttttttatttactgctgttcattgtggggatattctaagagatgtgtattgctattattgatgtctatacaggcagtccctattcaacagagaacaagtcagctcggttctggaattagatcaccaccccttcccacagattatctggttgaaattaacaaagttttactttccatggatgatgttgaattatcacttaatgctccagagctaagctctgttgtctatgaagaattctcgtttcaggaagattctctgaaggtaaatatccagggagtacatttgaatacctgcagttaacatagaaataaagcaaggaatttgtcactgtgcctacttaaatggtctttagccttttacatttgtgccaaggaatcaataatatgtatgaaaaacaaacttttcctatactgccaatgaaatgctgtcaaaaattttaatttattaatagttggtatcgatttttacatttacacagtttttttggcaacatcagagatattttaaaatcaaacacatgtacaaattatattcctgtactggaaacttgattgtcatttgatgtaaaatgtcagcatttatcttaccacctagaacgaacaatttgattgtctagtggttggaaatggaatgtcatgttgattgtaagttaattaggggtctgaaagttttcaggtaatttgcaaaaactatttgatatcatcaagactcatgtattttgattgcatttttgtatcatgtcataataaacgctgatagagttgataggtttatctggtaactcagttttgtcatttaaattagcattattagatgtttgaaagtatatgtaatttctagctttaaaacacttcattacctttacagaatattattaaagctttttatgtcctgtacaaatgccactttgaacatcacaagatgtttttccctgctgttagaatattatgtagcatacctcatgcattggcctgtactggatattattttttttttaaagtttcccgttttgatgag

SEQ ID NO: 32802 - DNA, 1653 bp, Bovine  19866880619725
  misc_feature (1)..(1): n is a, c, g, or t
nacttttattgcatttttttagaaagtgtatgttacttttaaagaaatagattcaagaatattcttctcactattggttaacaaatggggaaaaataaaatttcatatttttagtgtttttagaggtatagaaaaatcagtttccttctgaaaaaaacagaaaaagttttatttttaaagctaaaagtgaaatcactcctttttttacaaacaatatgtcactggcaagaaacaaaaagaacaaaggaaaaaaactaggcatagttgttttgtcgacccctccctactcctgccaacatcaatgtattcataggactataaacatcaaatatagaacatgcagattcattcttgggaaagctctccactgagttagtgtagtttgtttctggcagtcttacttcttcggatgagacttgggacgttgccaatatgctaaaaacgcagcatcattgctatttctctgacctcagcatcctaagtggttttttagttcttgcccagtctacattgttatcccagtaagttgagtgcatttagattggcgttgttcacttttaaggtgacatttgaacaaaatctattgtttggatgactcatttaccctacttattcttgaccccttgatgatttttttaatgctaatattttggtttcatgtttttccattagaactgagaaatgctctgaagcttgtcttactaatttcatcctacctatagaattcagtgtctgaattcttgttgaatatcattgttgaaatcactgaaacttaaagcaaaactgagaggttgtttttcattttttaaaaaactattagaatgtctttaagattagccctatgataatgcaatgtactttttacactttgcatctgtcatttgagactattgactatatatttaagaagtaaatgttgctaatgagaatcttgttcaacagtggtttttgtacttgtgcgtggcctaaatagtattatttaattattctagtcatgtgccaaagatcatgttgtttcttacgtaaccttgattttcctccttgttctagcctgttttcctctgcctataacttatgcatatatgtagttaagttaaaaatatgatgttgggagtatttggtaaagaattagataatactgctatcccaagttatgaattgaccaaagaaatttttagaagatttaaaatgaatatagttttgttttttgaaatagaattcaagagttaaaaatgatctcatgccagcttacacaggagttttgggggttttggtagagagttactgcaggctgccttttataattcagcaacacattttaaataattgatttgtactagttggtagggaccaagtcaagaactaattacttgttattatccaaataagttttcattattatctcactgctacttagtagcagcatagtagtgaaagaaaacataagtacccacttgtctatgtaggttcaattttaaaatgtttttcacagtgactcaccttcgttagatttccaaaaatgacagtttgaatgaaagtccttgtttgaataagtgagttctcacataattgttacaaatcaatccagaaggattcaggggagatggtggtagcagtgctcagagtttttcagcctattgcctctgccatttt

SEQ ID NO: 32803 - DNA, 1032 bp, Bovine  19866880646453
  misc_feature (1)..(1): n is a, c, g, or t
ntaaatctcactttataatacaaacatgcagctcaaccccaatggcggagttttaactataatcttgcattacgttgacatgaagcaatgaagccaatagcataatatcttaagacagcaaagagcaaaaacatacatagtcagtaggaaaagaaaggacagtgaacccagaaagaggaaaacatcggaggcagagaaatatggaactttaatcctttagacataaactttaatcctagaaaaatacagaaagtgagacatgaaggaagattttaatacatagatttacataatataaaagaaacattttaaagacagcatgtacttattccaaagctaggaaggtatagtatatatatatacataaggacaacaccagcttaatcccctaaaacaaacctcgaaatcatcataaagcacttagaattttctcagagaatcaatttaacttgcaatttaaggtaaagtttagaactgaaaaaaagctgacaaccaaaattctttctgcctgttggtatcagatttcatatctttctaatagaagaccatctggcttgctttctttatgtatgctgtcttttcagatgtggcattatttgcttctgcttaattttgtaatattctcttttcttcctttacagctttcttctcaagcatgccttagagaacaacagtctctagaatactgctgaattgcatgacttctgagattcttggggaaacatttcattctttatgctatgagaaaactctttgaggaaagttattagtatagtacattaaaaataataaatatttattagcccaagtgagtaggaagttggtctagatttttttccccttccaattttattgagttatagttgacatacagaattgtgtgagtttaagatacagcataatgatgtgacttacatacattatgaagtgattaccacacaagtttagtgaatacccatcatctcatgtagatacaacattaaagaaacagaaaaaaattttttccacttgatgaaaactcttaggattact

SEQ ID NO: 32804 - DNA, 1935 bp, Bovine  19866880680281
  misc_feature (1)..(1): n is a, c, g, or t
ntaacattttcagaaacttggagtagacgtatatgaaactccatcacatatagtcgagaactcaaggtagacttttttgaaggcctataaaatatttgtccaaaggaactcagcagctatccccactcaattctcataaccactgaacagctgacgggcctccccgacacactcctacctgtcttacctggatcaaaaccactgaagctgaagctgcggtacttcacttgctaatccctgaaccaggcagccctccctcactgtaaaaaagagatctttttctggcttcccgcaggctcgaggggaaaagagttcatttagatttagataaggctgagaatccatctgagccccaaagccacaggaggctctccccagctgagggctcaggcgcctacatctctgccccagagaaaagcagccatggctccagctgagcggggaatattgctcctcttcatccctccctcctccagggccttgtcatgcctgccacacactttttcaatatagattaaacacttgtaattccatttttagttaaactgtattttgtcagctcccaggtgtttcctcagacaccagtgtagagatgagcttgtgatttatcttctgagttctgcacaggataacaggaaaaaagagctcagtgtgttgagggattttggggggagaaatgcatgatcatttaatataaaggaaatggcccctggccttggcttctttatcctcaggctgcgcaaaaatccacctccacaggaatatgatacctgcgttgtgtgaagcccaacacatgttccaaagggtcaagaacgacacccttgtagttcaggtgctctaaacaggtaggaagaaagaaaaaatggtgaaataaaggaagagaaaaaaagggagggaaggagagaaaaatggaggaaagaaggaatcaaagaggattaagaagagattcacattttcatgcagttcgtttatctgacatttatcaaccttactgagcgctgtgataggaccaagccaacttgctgctacctctccagccgattggaagggaaggaagctggtgcacactccgtgcttgctgtgtgctgggtgcctcacatattctgtaataaaaataagagcttatatttattcaactccgtgtcaggcattcgtgggacacaatttatgtactttgttttaatgtttacaaccttaaacaggtactgttattatccctgtttaaaaagaggaaaatggatgatgccctaggacttaactaagtgccggaacaaaacttcaaacacaggacactacaaagtcaatcagctttatttttaaaaacttctgactgccttaaaaatgttttagtcctgttttaaaatagaaataaacaagaaaactgagtatggacctaagttatcgaactcatcgaaaatcaagcttccattgagtgggaacagcatctgaacccagttctatgatgcccaaagcctaaattccatctgtggcaccatcttaacttcttgatttctgactgaaatccctgtgtttataatctaaaaagtgctgggtgatggagactttgaattacagtgttctcaccccacccctcctgccttctcccatatacaagtcttctaagaagttgaacttgaagttcacctccatggcctcctcattgccacaactcacctcgcctgtattctggctctcagcctcaagaccgtgaagtccaggatccaaggaaagagggttccaatagtcattcagcagttttgtcctacagtagatccagacatgcagcactcctgacattctcaagcatccattccacaaacatttactgattatcccagtatgaactatgataagtcttcaagctacagaaatgtttgtagtgcagtgagaactcctgcccccaagaaaagccaatgtccagtatagaaacagacg

SEQ ID NO: 32805 - DNA, 1316 bp, Bovine  19866880712900
  misc_feature (1)..(1): n is a, c, g, or t
ntgagatggctggatggcatcactgactcgatggacgtgagtctgagtgaactccaggagttggtgatggacagggaggcctggcttgctgcgattcatggggtcacaaagagtcggacatgactgagcgactgaactgaactgaactgaggctcctcagtccttgggattctccaggcaagaatactggagcaggttgccaagctttcctccaggggatcttcccaacccagggactgaacttgcatctctgatgtctcctgccttgtcaggtgtttgtttaccactggcaccacctaggagagctctaaattctcaagttcttgaccactgggaagaatgcacatccacaaatcccatgcctggatttgtcctctttgggcttcatccaccagcctgaacacctatctggagatggctgacagcaggaattcccttgggcagccttatctgactgccagcttgtacagctagacgtctgcagctaacagaacacctatcactgcccatcgaactccagaaccttccacctcctaagcagatactaatcagacaatatgtgagattacagaacagttaagtattgatgaaacattttctgagaaagtacaaaataagatttttttaatttattttcagtttcctggcgttgaataaaatcatttggaaagaatttatcatactgcagggaagataaagaatgaaaattatcctaacagatcactaaaaatatccagtcaatctcacaaacagaactcaagagaatatttgtgtattatagcacattaaatggtaggtgtttctttttgatgattattccggtgactatctcaaagaaaatgtgcgttcactgagaaaatgtcctcactgcaaaacaacagataattcaataccacagttctgaaaaataatgtatttctgttttcaaaatgagaagtaggagattatatttcaagtttcttaactccttaaaaactatattatctgactgagtaggtgaaagaattataaatctacactcccaattcattctcttaaatgcctctttgcaaataagcaatgaagtattggcaaagtactaaattatgccatttattaattgcctaaaagcatactgaaagaaaggtaaaagtttaaaatggtgtatactcttacacagcatctcaaacatttgtgaaagctaatcattggtaggttctcattattaccacagaatgaaaataaacatgtaagtctagatattagcagccatttgagaagtgagtttcccgtggttcaatactgaaaacaaaattttataaaactgtatatctctg

SEQ ID NO: 32806 - DNA, 1386 bp, Bovine  19866880738659
  misc_feature (1)..(1): n is a, c, g, or t
ntctcctgcttgcagcaattctttacggtctgagccccagggaagcccagttggagcatacgccaactttatttccactaaaaatgtctcactcacttcaagcacatgtgtctggatacttagattttttggttgttttgtgttacattaacagattttaatgtgaattacaaatttttaatttactttttgtgtcctaactgtaagactgttggcgatgtctgtattccctagacatgcagcttctttattgaaatatatgtttcttcagttctaaaaaacattttgctcctatatttgctttgaatgaattgcttgttatttaactactcacaattcacttaggaaaacttttactttttccctaaagataattgcaataaatattcacttgtagattaaagttgtttttccttttttactgacctggtgtctttttctaggcattcaagttctattttgtctttaaggcgtgaagtactctaggttttctattcactgccaatttatgatgatgtttcttaggaacaaagtggttgacttgtttatttttcaaatgcattttgaactgtgtaagaaatacatacatactgctcattgaagacattgagtaatagagacggagaatgagcattgagaagttcccgttctttcccaatgagcttccctggtggctcaaatggtaaagaatctgcctgcaatgcaggagatccaggttcaacccctgggttgggatctcctgcagaaggaattggcaacccacttcaggactcttgtgtgaagaattccgtggacagaaaagcctggcaggctacagttcatgggtttgcaaagagttggatgtgactgagtgaccagctttcacttttcttccccaataccatttcctttcctgggagcagtgaacagtaacagcgatccttgctggagataaacatactcaaagtaagaaagaaaagttcatgaatatgactaattctaatcattttcccccttactaacagaaccaagtgatactgggactccatgagggactgcattgatactcccagtattacttgtatctcagtatcacgtctatttaaatagatggtatacaaatgcatgaatatggattagagtatcaatttcactactcaaaatagtaatgctttttattgacacagcacatttaaactttgagagtattttcaaagctgtgtacttatagtttccctaccatcccttcaatacttgtaaggtgatccttggtatctttttatgtgccaattttagttttctgttatttgttggcaaatagtgtttttcttacatgcctgcctttcacatatctacatggctggtttattttatataggatagtggtggggccagcattgttattca

SEQ ID NO: 32807 - DNA, 782 bp, Bovine  19866880762965
  misc_feature (1)..(1): n is a, c, g, or t
ntgaaaaacgatgtcatgaatcctagggtgcactttataccctaggtcttttcagtttcatccatttgtagtatctgcattgtcctgagacacataagacgcattctgattctcatcccatttctttactgggagtagatctggtgtcacagtcctcacaattgtggaccattaagactagattgtcttcgagattatttacctgataaatggcttatatcatactccagcaatatagccaagcctttatataattgcctcgttacaaagggagcaatttaaagtctttgccagcataggggatcatttggttcaatgactaaatttattctattaacaaggcatagagtgatgcttagaaatgtcatctggtgttaaaccttagaagatatgtttatatctgattaatttgatgtggtgctttgccacacacccaaaagataatagagaagtatcatgttatttacctttttcttgcaaattgctcttgagacaatgctactccccagagccaactcaccaaacacttgtttctcagaacttgcttatataacattcaagccagtttaataagcattcttagagaatctactatagcatgcacaaggtattgggctaggtactaggaacccagcaatttacaaaatgcacctactttctaccttcaagaagcttggcaggaaagaagggaagtcggtcggtggaactgctatctacgtgggtggcaaaatagtctccacttgtatcccaacccctcagatactatctggattttcccagtc

SEQ ID NO: 32808 - DNA, 760 bp, Bovine  19866880783294
  misc_feature (1)..(1): n is a, c, g, or t
ncatgaaatatctgtcctctgtttatgttgtctttgatttctttctcagtgtcttatagtcttctgtatacagttcttttgtctccttaggtaggtttatttctaaatatttttttgttgcaattatgaatgggattgattccttaacttctctttctgatttttcattgttttagcatatagaagtgggagtgattcctctgtattgattttgtatcctacagctttgctaaattcactgattagctctagtaattttctaatagtatatttagggttttctatgtattgtatcatgtcatctgcaaacagtgagagtttcatgttgatgtttggcagaaaccaacacaattctgtaaagcaattatctttcaattaaaaataaattaattaaaaataagaactctggataaataattatggctagaatggtcttatttttaacaaatgagaagaaacaagtaaactctaaccaaatctaagtgaacaaatgataaaaattaaatttattttaattaaatttgctttccctatgtatgcttttaattaaagtcatatttcattataattagtgtcaatatcactgagcttggtttatttgcttgaaaatttactgttgacagtgttaaatctagccttattctctttaaaaaggaggggagggcagaggaatgatacattttgatctgatactaatttatcaggtgtaatttgaaaatgggttttaggatccaaaaaatatttactctcctttcttcta

SEQ ID NO: 32809 - DNA, 1297 bp, Bovine  19866880796923
  misc_feature (1)..(1): n is a, c, g, or t
ntggtcctctttgatcttatctttttccttaggtcagctgcttatttcctatattcagagcttacagaaaagtggatcaaagtctgctttatttgaagtctgcatggttacttttttctccccccacagcattgatatttaggcattaacaatttattaagatttgcttttcttcaatgagcagctcatagatcataacgatgtaccttcccaggcttttatgatggaactgacggctcaccagagcagcgtggggaacgtcttgcaggcaggaaaccaactgataacacaaggaactctgacagatgaagaggagtttgagattcaggaacaaatgtccctgctgaatgccagatgggaggcgctcagggtcgaaagtatggacagacagtcccggtgagtggaggcccgggagtgaacactgctgcaagatggggcctagttgttttctttaaaaaaatttttttaaaatctttattgagtttgttacaatattgcttctgctggtttatgttctgtttttctgtccacaaggcttgtgggatcttagttccctgagcagggattgaacccttaccttctgcattagaaggtgaagtcttaaccactgaaagtcccagttgcccactttaacacaactaaaagtccgcatgtctgtgggaacttgccttgtcaaattttgactcttttctgtatgtagcattgctggaatttttatgatctttatttcccctttgatatgttaaccaaatgaaaaggtaaaagtggccatacagaaatcagcaaaaaaagggcaaagacattgtatgtggactttgcagtattaaagctggctaaccaccaactctgacatgaagatagggctatgttttatttatctagaactcccttttgtaaccttttttaagagtacagttcattttatttcgtgtattgtatgttaaggagcaaactattccactgcaatttccacctatttaataggcaggaattcctgattaaagaaacaatgattctgatacaaatagagggtgctgttatttgcatttttggagtgcatttaattgactgcatttaggaagaaaataagttttttgctggtttctatatttaaagactaaatgttgctttaaaaggttagacaagagtgtgttccctgccccgtttccttgatgcctggagtgtgtgtttgcctttgcaaagggaagaaggagtagggataacgctctgctccccttggacaggttgcacgatgtcctcatggaactccagaggaaacagctacagcagctgtccg

SEQ ID NO: 32810 - DNA, 1588 bp, Bovine  19866880800337
  misc_feature (1)..(1): n is a, c, g, or t
ntcagtgaactaaaatagatgggaataggtgaatttaaaagcaaatggccattatatctactactgtgggcaagaattccttagaagaaatggagtagacactactatgaaagtatttttaacatgtgatgagcatttaaattaatgtactttgggtaaatcagattattctccataacacaggtgggcctcatgcagtaagctgaaaacctaagagaaaagactgaggtctcctaataaggaaggaagtctacctttagattcccctaccatctcaagattgcagaggaatcttctcttgttctccaatctgctaggctgctctccaaatttcagacttaccataccctacagtcaataacactctttaaaataaatctgtctctttctctgtgtgtctctgtctttctctcttcatatatacgtatggtcttgtttctctagaaaaccctgagtaatatatccatgggcactgtattctttggctttgcatttgctttggtcaacaggaggcatagacaaggagattagagggaaaggggagagtgaggtgtttcttggctcccttcttgtaggacccttggttagcaatgactgtgtcccagttatggctgtggcacctgcgcagtggctctttcccattttaatgttctatgtctctctttttctgagttatgataaccactctgtcatctcacctcttcaggctaggtgcagctatagtgtatcatcactgttcacttgggatattcaccacagcttttcaggtgtccttcaatcccatttatatctatgtaaatagttatttcagctaaattctcctaaatgtgtacatttgagtgtgccagttatttcctattgagactgtgactctgattcacaaacattcaacaaaatctcttctcatactttaataaaaaatagttttgtaatatagagtatattgggatccaatgagtggatcattatttcacagtgtctattaattttttataggtaaattctcttcagtgtcagcctatttacaagcagaggattttgctcaaaaagttttagaacaagaaggaaattgattaattgtccagttcagcagtgatccagcacaattttcacactgaggaaattaaatatggagagctgaaaagaccacataggattacacagttgccattgggactgattctaaaaactgtgttaaactttaaattgttaaggaaatttttaagtcttaaaatctacgatttcaaaaatatctcagatgacaagatatgtgctaaacagactgcagaagaactgctataaagtcattctacagataaaaggcgatctaaccagtgaattcctgctcactgggtgagccgatagtgtgttttattctcagtttgctccggttacaagcttttcatcccaaagtattgacacttcaccctcttagcctaagtatatttttgcacaaagaactgtaactgctcatacagagacctcctcccaccatgataaagtacaattaacagataatgtcattgatgccttgggtggtgatcaagggtttggtgaattattaataataaaattgtgcaactggttt

SEQ ID NO: 32811 - DNA, 1272 bp, Bovine  19866880852341
  misc_feature (1)..(1): n is a, c, g, or t
ncttgtgacctggcattctcttcccatggaagaggtgggaagaaaattgtctgtataccccagttgctttcctgggtaacgaatcagaacagcttctgactattaaatcacatttgacttatgtcactttatacagtgctgtactagataaaatgatctctgactttgtgtatttaaatttggaacttttttgatttaatgattctatattcttaattcctactgtatgcactaaacttgattatgtgacaccctttctcttattctttcagccaaaacttggaataaaaataataaaagtgatgacatcacatttgcagtctgttatgacattgcattttcaaattgctttggttcataatgaaatgtaaagatatataatgggtttgtttccttaggagaacacttaggctaatggttggaaatttaaaacaggatgcctcattaagtgtccttaattactattgacaactgggtagattttaaatatgtaaatgggaaagagtagacataatggtttatctgaattttttctctagagtttgcagaatgatcttgaggctgaacaagtgaaagtgaattccctgactcacatggtggtgattgttgatgaaaacagtggcgagagtgctacagctattttggaagatcaattacaggtaaggacttataaagtaggatagtgctaaggcacctggggtctgagcctcagtcacacattgttcctattcttcatgttcagtctgtttatttaggttagtaaaaccatcttctttaggttgtacttcccagctggggttccacagcatgggggtttataggagaaccaaggtatcattcatttacttcagcctttgggtgtatgaacaagattttgaagctcaagaactgatcccaacaaatgatccacagccttcttgcccagaatcacttgatgaatttgttaaaatgcatatttctgggcctcactgggagtggggccagtgaatatgtaaaaaaatgtcaagtttgagaatttcagtcatgtaggatttaatatccctgtttctttagtagatcaatatgtaaatgtcagcatcagttttgggaaccccaacaacttgcttctttttgctcagtgactatagtgtatgcttacaagtctttataaagagagtttttggtacagttgactcttaaacacatgggggtttggggcactgacctctcaagcagtcagaaatcctagtataatttttacttccccaaaacttaactaacaatagcctgttg

SEQ ID NO: 32812 - DNA, 2427 bp, Bovine  19866880876498
  misc_feature (1)..(1): n is a, c, g, or t
natgactttattgcttacattttcccaagtcttacctaattttgtctttctgtaccattttacatggaaatattctccaagtgttctcatctcttggcatatcacatactcttacttttattgctgtagttggctatctcttccatttattctttgttggctttctctcctttgttcaatacttagctaattttccagaattttgtcctgaaacagattttattttcacttagtgcactcttctctggcctctttctctatttgctgatgactttcaaatctttatctctagaccttgactttcttgagctctaaattcttctgtctaactgcttactagatatttcagttggtgaattcacagatcttttaaaacccaaatccatgtctctcactgtattcccttttcccccttaatcttgctcagttacccaagacagaagtttaggcatcctccttgaagattttctctccatcatttgtcacatccaggcaatctaataccaagtcctattgcttcttactttctttcttgtcttactgcttttactgccattatttcttgaatcacaaaaccatgtaaacagagaaggtaaggtaataggttgtattaggggtgtctgcaggaagctgcaatgggagttgctaggtagagggaggaggcacttaaccaagccttgagatgtcaaagtctagaagttgccatctgcagatagaagaatgtattagcattatcctggccaaagggacatgaggccttatcaggggaatgagagagaggatatattcccaggaaaggctccagcatgtgccagaaactaggcaggtaacattaagacaaaactttaaaaatctaacattaaaaaggagtttaggaaaaatggtttggcaaagaaacttctaggctaaggaaaaaaaaaaaaaggagagaaactaaaagagtcatgatcattacattaaatagaggaaggatcatcttttgaaaatgggagtttgttctgtgatatcagcaggaggggaaggtagggcaatagcacaagggtaccatttccccctgctttaatagaaagaagaaagtttaggatctgctgcattgagaggcaatctttactgttccagatgttcatatagaaactggaaaatacttatcaagtatattgtagatggaatcatcatactgattgttacaatgttcatactgctaataatacaattatgggaaatcattatattaactgaatcattatataaaggtagcttagagggtcctctaaagtccacttcaaacatcctttgctatgatactaaagaacttcagacacttaatagtttactgttaaacttgaaagcgtttgcaagaataaactacttaatagacaaagtctgaactttcttttgtatctattttctgatcaggtatcataaacaaaatgtatatatttattctcaactaagattattagtttataatttcctgagaaattgccagaaaagaaatattttactttatttctgtattctttaaagagcatcttgcaacatctagatttgaggtggggagacatagaatcatgaaacagtttatatttatttgttcaaagctctggtctcatgaaaattgctatatgtataaggttgtttcaacaactgttattattaggggtttgtatgaaagtctgccaacatggtctcaatatttatattatagatcaaaatgttttgaaagagctgcttctcaactgtgatctttgttgtttttgaaatccaaaatgtactggagttgttttcatttcatatagttgaaatagtttgtcttgccagtctttttttcccctcttttatttaaagaccagaagttcttggacaaagaatttctatctcagactgataagaaaaatgagagaattttttctggaacagagaagggtgagaattaataaaaattacacccttaaatgttagtatcctagtgatcctaacacattctcatcaatgataataactcattattgaaattattctttggtcctaaggtagtcatgagttctggatatcattaagcaatgtatattaagcaatataacaaaatactaattttagagtttcagcttgccttgccttcagtaaattcagttgagcaggactcagttcctaaggaaaaaatacttgagacctgaataatatttccatgaataaggtaattaatttgtgattggttcatttgatgcttttaggttcacagaaatcttagtgctcagaaatcttgacacaggcaatgcaggtgtttacatgaatataaaattagcaactatatttagctgtaattaaaatctagtgtggtatgtaaaatctgtttgtctttgactataacttattccaagttaatgagatcttaacaaggcatagagtgtatgtcctttttgcaaa

SEQ ID NO: 32813 - DNA, 981 bp, Bovine  19866880930952
  misc_feature (1)..(1): n is a, c, g, or t
nctctgtctttgaaagaatattcttttatttgaagactatttgaatatttgaatattaatctgggattagtaaagcagaatctgttaaactcatacatgcttttctactgagtagaacagagaagcatttgacttttattctatttcagttgactctcctccatttctctaattcattatcttcatactggtattgctgtggtccatcttgattcccttgccactctgcttctattgttaccatctgcaaagattagaagtcaaggaatacattatgcatgaaaaagttattctttcatcctgatctctgagcttggtaaccactagagctcagatgttgctgctgctgcttctgctaagtcacttcagtcatgtccgactctgtgcgaccccatagacagcagcccaccaggctcctccatccctgggattctccaggcaagaatactggagtgggttgccatttccttctccaatgcatgcatgcacgctaagttgcttcagttgtgtccaactctgtgtgaccccatggacagcagcccaccaggcttctctgtccacaggattctctaggcaagaatactggagtgggttgctcagatggtagttgctgattaaatatgaggagctcaatttatgctggctgacagtggtgttaaatttcaagagtagcatcttgtgttctctggaatgtaaaagtgtggcatttgaatgcttttggtcacaacaaaccaagtacctgctaatgtaattttgatagctaaccaggaagaaaaggaggtacccagtgagccagagacacgcgttccatttaaaggcagctgaaaataagattggcaatctaagtggaacacctcactagcactgctagacgaagaccaggaagaggaaatggaaattcagtaggctgtgtgcaattgttattgatttgcagttaatttctcagggtaccaaatctgcattttcaaatgtagacagcta

SEQ ID NO: 32814 - DNA, 1145 bp, Bovine  19866880958505
  misc_feature (1)..(1): n is a, c, g, or t
nctagctggatactattcaaagttcctgggccttggtttcatcatgtacattatgggataatatctctattcagaactaaataagacagggtacataaaagtgcttgaaaatagagacagaaaggagggagggaaggagggaagatggaaagaagggagaaaggaagaaagagagaataccaactgtattccaaagaaagagccaggctttttaaatttaaatttaaggtaagagtgtacttgagaagtgttttgttgtaacactgacttcagtccaccactttttgaactaagtgcactgagtgctgtgactttgttgagctgcttgttttcttgtattattactcgaatgacatattaacccatcatacatttcacctttgaaacagttgaattgcatttcagtgcctgaccatgagttactgtggctcagaatacttaagaaagttgactacatgcataaaatttgtgagtagcagagtgagaacatggcagaatcccataaatcacttttattgagagttgagtcactctttgctatgaaaataatttatagggcaatgttccatttcagggaaaatgaaaattaatggcatttgtcaagataatgatgaataaagtttccacaccagtggaaaagaaccagtttcacagaaaatgtaaactttccactatattatttatcattataaatatttcaggctctttggtaaaatgttaggaagtttggctgaattggatattgttcacagtgctagctagtctctgtgtgttctcccagatccattttcagcccttctatctgctgctctgagccccaagagttcctaaggcagaatgataattggcagaatatttcctcttcactcccttccaggcttgacacccgaggtccttggcagtagctgtgtccctgattacagcagctgccatgcagctctggtctgcttataaatctggggaaggaaagccttctgctggcacttgttctggatcattccagaacatactatatcatatgaaacatatggtttcatatggaacattcataccgtatgaaacctgcctcaggttttctttcttggttcctttcacctgtcctcacctgtgtaaacttaattagtgctaagtcacttcagttgtat

SEQ ID NO: 32815 - DNA, 1055 bp, Bovine  19866880963899
  misc_feature (1)..(1): n is a, c, g, or t
ncaacacacacatacacacacacacaaacctcttattttctatcagatatgaattcagtaaaggaataggaattagcctgcagtttttcaattatgagattttttttttaatgtaacaaatttggaacacttactagtacagaactgccctccacaccacaaaaaattaagccaacaaccttggcccaagtcagtgtttcaaggagacagaaatttgctagcaaaattggtagcatgacaactaaaatcctaaatcatgttactacgatcaattttttggatcatatatatagaaatttataccaaatttcaaatctcaaatttgttcaactctccattacaagtcaagtagttattttaatgtttccaaaataaagatatgtaagcagataatacaaatttacagataactggattatttatatgtgtattaagtgagtataattaacatgctaaatatattctttcaggtttccaaacaagtgttttctttatatttgaattttagagaaaacatctaacttttgaaagccttttttggcttagtaaatcttacccattaacgacctttctccattagggggacaaacacgtgactgaattaggagaagaaaaatgtgttaaatcccttaaggctgattttccaaattcttcctctaaatattttgctcttcttaaaatgcttttgacaagctcacacagatccaagggccgctgcccagcctggaattttatttttgtgatgggtaagagaagtgaagcaagaaacatcaacaaaaccatctgataaatcttccaggaaactagctaaaatttttgttcacttcaccagctcaagggcacatcaaaaattcttttagcagaacctagacacaaatctcaatttaaatcttaatcaataatgtttctgtaaaaaaaaaataataatccaacactacaaccataaaacaaaattctgtatttccataggtctatctatatgtatataatataaacataaacttaggataattgctgtacaatattctcccttcagctcgctgtccacaagtctc

SEQ ID NO: 32816 - DNA, 1924 bp, Bovine  19866880994664
  misc_feature (1)..(1): n is a, c, g, or t
ntttaaaaatctttgggggaaaaagtcatcaataaatactgaagatcattaccaattggtttcagcataaaatatataggaaatggatgtcttaaactgatttgggttttaaaaattgatgctagtgataatttacatgcatgaaatcatgcccacatacctaaactgcaggaagagaaagaaatgggtgactaaggtaatctcaacacaagatggtaaagcagttagtttgctcaaataaaaaaaaaacacactaacactggccatgtaggtgagttacatgagagtataaatatgggaaagcatacatgtattaagctctcagttgctaacttttaaacaagtgagcctattttaaaaataggagggagacaggaatttggaacaagggccaggagttacttgtttgggaaagttacttgtttgaacttgcctggggtcctctggggaccatttctctactggggtatcatcactggcaaacactgaaataatatcttttccagaagatccagaataatcatatgcactatttcttaattcgtcattatgaatatcaggatttttttcctttccccaaataaatagagcaaacagaattcaaatacttttaacaacctctcatcactgcccaattgtaatgactgaagacacattgagtctttaattattagcaatctggctagcaattcataacaaagtctacttgctaattgagatgaaatgcattttgtcatctacaaattgagacaatattgctatgcatgctacaatatttgtttctctcttttccgatcctaatatgaaaagatcattagtttagcaccatttggtcatcataccctctttgagtttcagagcaattccaaagaattcaaagttattttgatacaatgcactcaatctgctgagctccactcattaactttggaaattaaatgggtgtgcttaataatatgagctttcaccactctccaagccttcaaattggaactgaaaaaaaaaaaaaaaggcattacataaatccgtattgggaaaatatgaataatgccagtgttcttttttggtaggggagggattcttcaaggacaaaccaaattgtttctgttctatatgcataggttggagagaagcagcttatcaaaaagacaggaaataaaagagcagggtaactattatagaacttcaatttagaatttttgatttctttgtgttcagcctatagctcatggtggtgcatctgaaagtcacaaaaatcaatgagagggtgtttgaagacacacagcatgaaggcccaatctgacgccttaatgcctgactcctcagagctgagaaggaggttaatcaatacttatatattttagatttagatgtatttcaggttggaatatcttctttgaaggatgtggatatgactagattattggcctcaaagtctcttcttggccacagtaagtctgttttctctttcagttggtgagtctagaaaaaacagcagaggaatgccctcagttttgtctcagcattcacgtgtgctgacgcagcatgagagaggaatgcgccaggaaagatgagaaaaaggcagtggtgaaaaagtttccaatgaattgtgaactctttctttctctccttatgtaatcatttgtggtgtaatccacagcattgaaagttaggcttttcagtttctggcactttctgcaagaagagttcactggccttacctggggaaagaattatgccaacaggcagtagccagcagtgacctgaacaatttcatcttccgcactctctgtcatcttgtgtcccaaccattcatctcagcgtcatcctagtccttaaagaaatgagactgccatcttctggtggtcttctgtgtgctctcattaacatagtcattttctttgctatacagatgactctattt

SEQ ID NO: 32817 - DNA, 1004 bp, Bovine  19866881068363
  misc_feature (1)..(1): n is a, c, g, or t
ntgggttattttgacttggattcgctagaggcacagataaggatttggatacagatagtttcttggcagggggattctaggaaatactgacaaagaagtggagaaaaaggcactgggataaaagggaagccactgcggatacgcagtgagaagagtctgctctgggcacttagggctccatgtctcaggtggcctctaagccactttgtaaagcagagctctgggttctcccatccagaaggggaggaaactggggtatttatccgccaacatctactccataattggttgacggctgctgccaagcacattagcaccaaggaattcgagcctgggttttgtacagacagagcacagagaaaaccttgagcagaaagttagaaggtggcagtcagaagctgtgggtgtccctgagaacagggggtgcttgggggagagatggacagaacagctgcagcctctgctgtagtgttcccgagccacctcctgtgtgaggagaatcactaaccaaacaccgcaggtaatgaagggtgagaatttggtcataggattctgggacctgggtgattgtttctcctcttgtcttctgtctcccctcagagacagaatttacatgcaattctccaaggtttttccatttcatttggagaactgcatgtaaataagaggaacacaaaagcaatctccccatatattctatagacaactttcagttctaccactttactaaacagtctggccctccctcataacaataataatttatcggttctgtcttgttagttcccaaagtgttctcactcttattaactcatttgaccttgtggagacaggccattctcatctacattttcacaagaagctaaaagcacatagttattaaatgaattgctcaatagagccggggataaaacctccgtctcaataaatacatattgaacatctatactccagaaactgtactcagtttaggggctataaagattaattagacatgtccctca

SEQ ID NO: 32818 - DNA, 1292 bp, Bovine  19866881081923
  misc_feature (1)..(1): n is a, c, g, or t
nctgctcctgaaaagtgtcctcggcagaaagcaccaggtcgcacttcctccagtgctatctgataggtgtctagatccatatcaacctccgtgacagtgctgggggtttcagctcggggactctcttgctcctcctctggtgccgagctctatgaaaacaaatccaagaaaatccacaagcatcgtgaagaccagaaggtgttcaacaaaggcacactggatggagacccaaggtaaaacaccactgtgtcttaaggcatctgttggactctcaggagctgggtgagcaatgctgtgaactagtcagaaagcatttattcatgccaggatggcaaagagtacaaaagctgtatcactcatggattccatactcagacatactctaatatagctgttattattcagtcgctcagtcctgtccaactttttgcaaccccatggactgcagcacaccaagcttccctgtccttcactatctcccagagtatatagttgggaaaagacaaataacccacatgaatcacttctaaacaaaaataaaaaggctcttaacaaagttataaattccatgggtctaacaagggatgttatttgaattcatcaagggatagatcaggacgtttcacagaggatctggaacatggtggaccttgaaagggtagatgtcatttaaagagagcaattagaacccttgttaaattgcttttactgaatagcatcttagcattgcatttcagacactaaaagacagccatacatatacaggctactgtactgatgatatttttctgaggcagtagccctccagtttactagctgtttttttttgtttgtttgtttgtttgtttttaagagcctgtggaataagttattccaagctccttctaagcaatggagtattttcttatatacttcagaattgtataaccaaactaaccacctatctcattcactagttcccttccagagcaaagttctttaaaatttgcttatagcctgtctctaccttttcacctctcatccacaactttcatgtatctgaaacatacaaacatgtatagaaaacaacataagaaaaggtcatgtatttcgcaactgcttttgttaacactccctttcatgctgatcaggtcttggtccctaccacacacctggaaagtattttgccactgctaccaataaccttctcaatgacaaatacattcttctagcatcatcttcaggatgatcatgtaatgaacacaaaaccagaacattttttataaccaaagtgctagaacaacatacataag

SEQ ID NO: 32819 - DNA, 2384 bp, Bovine  19866881118862
  misc_feature (1)..(1): n is a, c, g, or t
nttatgggtttgggggacataaaaaattgagtctatagcatactttgatgtccttttactgctttgcttcttctaggcccgagtagagaattgggctaaatgtactctgaagtaatgggagttttagcacagaaatcagagatataaatattcccaccctatttgggacctatagatagatctcgggcctcaatcatgagagttccttaaaactgcaacacacaagtagtcttttaaacagaagttattctgggacattccagtctgaagccaaaaatgatctcccacccaagaaaggaactcaaaagaaaaacaccagtgacaataaatcacgacaattaggaaaacaagacaaggaaaaaataaatcacacaaataaactcagagaaataatctgtccatttaggaaaatgctgaaatctgtttgtggggaaatctttaggataaagacagggcactaaaggagtagaaacagaccaaaatcctttaatgaatcatggaatctgtaaactggtatcagatgttctccatcagtcatagagccacagggagccttagcaacatttcagattcttccaaataaggtaaccccagtcaaaagctatgctcttaaagacaacaatttcctcttacctgctcatctacttggtttagaatgaaccaattgttttcagaactaaagtgcctttatacatgtaagattagaagaattgtaaagaagatttctttacacacacacaccccccaccccccacatttttactgagtcagactttccaatgtcagttggagagaaggatttataatctgagaagagaagctgtctgtggtttcacttggtggttagggagcgaggacgatgtgttttcccattgtaacatagcaacttgatttcattgccgttcctctgtcatatgtacaaagggagatgtcaaatatcccaaaagagaatattccagaaggtgcagaggtggtctttagttagcctatgagtttgcagacctagagacaaaaggtaactacttcatgttttatgggagttgtatctaaaacttgattagatttaggttaaacaattttagcaagaatacttcatgacaccacgtgttttatttgcatcccatcaggagacagtgtatcaccagagatggagagggcccccagtgctcactggagttttcattcattgctattctctgcaacagcattggagagctgacaaagtagaaaaatcattttatttgatgggttactagtaacataaactgtattaatttatgtgaactgtttactattctttcctaatcagagaacagattatgaaaatgtgaagtaaaattcgctcagtcgagtccaactctttgccaccccacggactataaccctccaggctcctctgtccatgggattctccaggcaagaatactggagtgggttgccatttcctcctccaggggatcttcccaacccagggatcaaaactgagtctcctgcattgcaggcagacgctttactgttgaggcaccagggaaacccctattaatgattacatatttcattaactcctgagcctaaatcattttgtgacatgttctatttactcagactggaaaaccttacacatgtaatcttcatagattgctgttgggccaaataaacaaacaaatgcatattttttaaaaagaggaataaagcgagaatctatttatttaggatttactaagaaatgtgtctatttgataaggaaaatgaatgcaggtgggaaatctttgcatctttttatcccatccttattattcaatatatttagaggaagactctcatttattatctaattgtttattgctcctcggagtgtccctcccctccatctactgctccttataataccaataagaaaaattcagatagttcccttgggctatcatcttgattttcttctatagtaatgtaaacattagtaatttcactgctatttgattcttatgttacctttttattgtcctgggttattttccctgatcataagaaagtagaagcgttatctgttttcacatcaagcaatcttaatgtttatatgattataaacatcatagagtgaattcaatagatgatgttttctgaactttggtcatttgaatatggtctttactggttttgtgccagtaccatactatcttgaggactatagctttgtagtgtagtctaaagtcatgaagtgactctcctcctttcttccacctgctgctccatcacttctcagtttttatactttaatttgttcgctattgaaaaggcaaaatgtattctattatttgctctatgtataattctattttctttcatctgggggtagatatgaatgtttgggggaagcttttcat

SEQ ID NO: 32820 - DNA, 2129 bp, Bovine  19866881174779
  misc_feature (1)..(1): n is a, c, g, or t
ntaagtggaccttgcctagaatagctttttcgtccctttgcccccaaggaatcttcacatgcattatctcatttgcttctcaaagcaattccttgagatgaataaagttaagtaaaactctcccattttatagatgatgaaatggaggcagagagccagtgagtgaattctagaaggtcacataggtgtcaagtaacagtaattagactgaaactcaaatttactaactgctggtccaaaatttcctctaaatcactgtgcctccttacaccatgattaccttacacattttcctgagcttggcctgcatggtgatcctcaggggaaaagtccttctgacaaaactgtacaagattatttgactcatttagaagtctcctctcaacacacaaagatagaaagggaaagcaaggagaaaaatgagagatggagggaaaaaaaggagagaaaaagaacagaaggaagggaaggagggaaagaaaggaaggttggtgagagagggaaggaggaaaagaagaaactttgcattggggtctaatcggggtgtcaggatagcatcactgactcaatggacatgaacttgagcaaactctgggagatagtggaggacagaggaggctggcatgctgcagttcctggggttgcaaagagtcagagatgactgacattgcacacatgcaatgtgatacagataagtagatgttatctacttatctgcaacatttcttcgtcattcatccttgccagtgaatcacaaacttggaaatataaaatcagaagtaatgatatcaacacaaagcaggaagcgcaaagctatagctgtctaagcttctagccctccttgggcaaaatatacttgcccaaggagatcagcagctactaacaaagcccacacaaactgcatcaaaagaatgaaatttggcctcagagcctctttttatctttcaagggaaaaataactaggaaaaaaaacacaaaagagagtgcaaagacgacacagatcacaatcgaagcagtttctgcaggtattggctgagctcctaaaccagaatccaacactgaacttgcaacagcagggaacagtcattcacacacaagttctttcaatcacagttacatccaggagaagggcgagctcagcttttggcagcagaatcttaaatacttaaaaccatgaagtgagctttgccataactcaagttaattcttcagcagagccaagacattcccaagctaccaactccagtgtccagatcctccatccctctctcgatgtactacaagtagaactatccaccctcctatttgcatcctaaagattttttaaagatttaagttcttccgatcacaagtcctgcacacacaacatctccaaacattacccaatgccttcaaagtcatgcaaagttatctctattaaacagtgcaaagtaacctactttcacatggcatttggcacacctgcctatagtcacccccctactcattggtgccctctgcctggaaattctcctccagcccagtacccccatcagtgttcatatcagctggtaatctgtctttcaagaagcctttgacagattttctccctctatccagctctatactccacccccaccttttgttttttgagtttttgtggggtttttttctttttggttgtgctgtgtcttcgttgctgcacatgggctttctctagttgtggagagagggggctactctctagttttgatgcacagacttctcgttgcagtgacttctctcgttgcggaacacaggatctagccacgcagacttcagtagttgcagcacatgggcctcactgctcctcggcaggtggaatcctcctaccagggatcgaacccatgtcccctgcacccaccaagtggatttccatccactgtaccgccagggaagtcccactcccaccttttgaattcacattgtattttattcattacttataacaaaacaattgggggattttgaaaattagtaatattatgaaagtgttagtcactcagccgtgcctgactctttgtgaccccatggactgcagcccaccaatttcctctgtgcaggaattctccaggcaaaaatacggagtcagttgccattcccttctccag

SEQ ID NO: 32821 - DNA, 812 bp, Bovine  19866881184044
  misc_feature (1)..(1): n is a, c, g, or t
natgagccatacaaaaactgacagtggaaacatgaaaagtttagacataataataggatgacttactatgtatcggttatgttctaagagatcaatacagatttaaatgcagtctttgtttctttaaatagaactataaggtaagaaaactgagacacagacgtgacacggcaggtgagaggcagaaccagacaatgataccacaggtctgactccaaacccaggttctcaaagtccacactgaattgcaaataaaattacgagagcacggggtcctgacatatagggaagaacagttaatcagaggtgaggtgggaggagaaaaggatggggtatattaatttaatgacttcccaaagacagcaaacaagatacatgccacaagtaaatgaactaagaatgaaaattctgtttcaagttcatggctttaaagcacctctggtactttcaaatcacaggctctaaacatgggatccaccctcggaaacagctggaaatgtcagaagtcattgctgaataaaaataaaagttgattcagcccgacagttaaactcttgtttagatttttaattctctgccgaggcttatctgcagaagcttctctgacagagagaatacagtttaataattcaattggacaaatatttggtgaataactcctttgtgcctggccctgcagaaatgccaaactcaagtcaccctccccatttacaagtgagggtttccatagtttttcaataaacacaaaatagtacaaatgaataatcctgaattgaaagacaaataagacttgagcagcatttagcattttt

SEQ ID NO: 32822 - DNA, 742 bp, Bovine  19866881236951
  misc_feature (1)..(1): n is a, c, g, or t
ntgccctcctcgctgttcgaactccacataagtcatgctttttgaaaactggctccttacccaggattttttttttttttttcctttttcttcctgaaaccagtgtgaatggaggaagttggtaatgcttggctctttatttttattctttttttttttctttctttctttttttggccttctctcatgcaagtttccaggatataacttctttttttgctgtgcgtaattgagaccaaactctaagtttggggcccaggagagaacagttgtgggctgcaggtcattagtgaggtgaacagaagggactcctaagcttcccagagaaaaaggagaccatgccagcctcgtggaacgcagctagcagagaacataccgacaggtcttttccttatgaactccgaagtccatgaagtcccggagcctcagtgaagtggctaaaatgtcccaatgcaagctgctgctgctcatggaccatagctcaagggcaaagcttgtaaaggattttacaaaggattttaaagtatagcctgaaaagatacggtttttagaaattaaatgctgttgtctgaaggaagtttgccggaaagatgtaggcttcaagggctactggacaatgattggtctgaacttcagcttacgggaattgctgacaaaatttgaaaaggtatgcagaaagcagacttcacaaatgtactttttttttcctctctcttcttcctttcctgtcttcttctttcta

SEQ ID NO: 32823 - DNA, 796 bp, Bovine  19866881257788
  misc_feature (1)..(1): n is a, c, g, or t
ngttaagaatctgcctgtaataaaggagatgcgggagacacgggtttgatccctgttttgggaagattccctggagtaggaaatggcaactctctccagtattcttgtctggaaaattccatggatagaggagcctgatgggctgcagtacacagggtcacaaagagttggacacgatggaacgactaagcagcagcagaaacagtaggttgcgaatgaatgaccaccgcaagtcaactaaattgcaccacacaaggccagtgagaaaaatgaaaaaaaaaaaaaaattgtactttcctttctacaattctaggagattggagaaataaataaactagaacataggatagacttttgaccttttaagtccaacaccatagggattgaactgtgagtatcatagatttaaatggtttaaataatttaaataatctgatagatttaaataatctgaatcatttcttcacccaactatattaaataccagtatgagtatataaaattcagtcttgccatacttgtcaattagagtcacacatgagcaaattttttgtgtttgggattaaatgggaaatgcagtctgtataatgtgaaagaaaattaaatacaatggctgtctaactctgataaaaaaataccctaacatttgctgatctcttcatttttgttgttcttggttgttgttggagaatgagctctggatcagcataaaacagtaatatttgtgccagaaaattcagtctggatttttcagccaggaatgatcatatcataatcctacttgagatctaactga

SEQ ID NO: 32824 - DNA, 1132 bp, Bovine  19866881272482
  misc_feature (1)..(1): n is a, c, g, or t
ntgacttttgatcctttgtgaataaacattagcatggtcacaagcgaatttcccctcctggcactcttggaattaaaatgaaactgtattcttaaatcctaattgtatgaattgtctagttaaacatgacttttttttcttgctgtgtttgtatattgttgcacataacactttaagaattcctctatcttggattaatgtcccagttggtcctgatagcatccttgaattatggccttttaaagttttcttttaattatgcatgttgagtttcagagcagagacgcaagcatttccatctcttcctgacaaggagttaatgaagggaatgtaatcatgttgcctattaactgatatactaaaatttccattgactgccgtaactaattttttcagtgtaacatcattttgttgttgtttttttcttttatgtcatccaaatatacaagatgctagtagtaagatgaatattattttcactaatagactaacaaatgctttttaattattatttttatctgcaggcatattcttactgtgaattgcctatatttattgagcttgattgacattcatcaaaacttcaagacctactaaaatacaatgatttcctgatttctttaaaatatgtattttatgatttgttcaagagggtacttgtagcctttatttaataaaaggctacagggttaaaatgttgatttgcagcaaaacagatttgatttctgtttggattcggctgtttgttactgagaagagaagcttacctctgcctatggtatacttcatgctcatgcaactaaggtttccctcaagagggtgtagttctgtgcaagggtaattcccctgtgtaaggaagtccactcttttttccctgatataacttacacaattggtaggacttgattattccccccaatactactggggtgcacactttccctccagggcatcataagaagcttccacttcttgctctttttctcatgaagcacctactgtgtggtcacaggttttttgtttttttgtttgtttcccttcaaaaagggggaaacaaaaaaatagaatgatgaaagtagtcacatgctgttgattagggacgatctttaagacccagaacagatgctactat

SEQ ID NO: 32825 - DNA, 724 bp, Bovine  19866881322397
  misc_feature (1)..(1): n is a, c, g, or t
nctgggattctgtgagccacaattttgttgtattttctctgctttatagataatcatatatctaaatcatatctaaatattaacatgtttatttatttccccccgaaatgcagaaagaaaataaagagaatgacttgttaactactatgaaactggaacactgtggtcgtctcagctttgataaatgaaagatcaccttggaatataattcatttttaattgcctcttccatctaatctaactactgctgtaggctgtcttaaaatatttacaaagtaaaagcaaaaaaaaagaactggagttgctaaataaagcaggccacacattccaaagtgatcaatttttccggtattgtttacaatataaacaaagtcataattcttacagatggaatatttggaaacacgggcgaagtacgctgaaggatgatctctctcagtgctacgtttggggtttctatctgagatacaattgatgtatgcaactatattcgcttaccatgatctgatacatgtatatattgcaaaatgatttgcatagcaggtttagttaacattcatggccacacatggttacagatttttcttgtgatgggaacttttaagacttagtaactttcaagtacacatacagtactgttaaccataattaccatgctttacattacatccccagaatgtaagtttgtactttaaagatgcttttaattccccttctttcccac

SEQ ID NO: 32826 - DNA, 905 bp, Bovine  19866881347409
  misc_feature (1)..(1): n is a, c, g, or t
ncccatctagctgtctctctgtctctctcttttttgttttgtattagcaactacatctgtgcatgtataaactgcttatgatttgaaattgtgttttgtgtaggatgacatcacaaaatcaatatagcaaagagatcacttattttatttcccaatattagatactgttttataaatagtactgaataaaatgaagttcatctatggtctctgattttgtcacatttcaggtcaatgagttataatcagaatttatttccattaagttctaataaacaaataccctcaaaatatcaataaaatgttaagacatagaaaaaggtcacaaaatacattccatgtttaactttccaagaaagagtcactgctgtatgaacttaaatatcattaaaacaggtatacaccttaaatattactctttttagcaactcagaaaggcaaacatttacaaagaaaagggagatccaaaattagactagacagctgtctgaaaccctaaaattatttctcctgtttcatttctaaatatcttagataccaaaaaacttacttaacctgcatttatactaatgaaatctgaaaatgaaaatttatcactttatacctggtattaaattcagttgttagatataaaagattgaaggtttaaaaaaacactgcacacactaaagttaaaggattctgagattcgataccaaaaacaggtgacgcaattaatagaatattgattcatttctaagtaattttctacaagtagttgacaggttatttcttgccaaagtgatgataagggaaaagttattcagtcataatgaaagaagaatgggaacagatctggaattgaagtttaacaatgatattgcaggggaagttctattatcaatgccctgccgagcaactgatat

SEQ ID NO: 32827 - DNA, 1522 bp, Bovine  19866881400236
  misc_feature (1)..(1): n is a, c, g, or t
natacacaaatgagagagacagaggggcagtgcacctgccctgctcacctgggcacccaggtcattgtagagaaccttcagagaagtcagctgctcatccatccccttagggttgtcggtttgctgcttctggacaatgtgccttcctgttttgattacagtctccacttcaagcttgacttcactcaaaattttatagagtttcttaaaaatagagccagacaaattatacatattagtgaaaatgtggtaactggaaccatttcagaacatggatgacaaagattgacagctaaaaactaaccatggagatcaaagggctttatctctctcagatctggttcaaagaatgagtaagatgaaatcaaggttgaaataattttttaaattcagataagaaaatacactcatagagattgcctttttttaaaataagactagtataatctcatagagattatactagtcttatttgaaaaaaggctcaaacctgtatcttaaaggcttaggaaagtacttgataatatgaacatttttcctacaaaaaatgggaaaacatgaagactaaaaattgaaagtctaacatttttttaaattacatttttcaaaatcctaaatgccattactagaaaaaagctaatgctggctatttctggctgtgggaatttggaaatattaagattcaattttttcttacagttctctgaagtacaaagtctaccacaatgagcacattagttatataatgaaaagacatataaaacttccatacatcaatatgtatatgaccatagaaagttgaagttatacaggtcaaattcagagatgccctcatcctcgttgctttgaaactgaaaagcgttatcctgggcaagttatcttatctctgttcatcgtagtgttgacctgaaacacccatgtggcatggccatggactagatgacacaaggtcaagggcagtgcttgctttggtgatctctgtgttcagtaaatatgcatgtacattcatacatgcacatgcacacatattatgtataaaaattcatcctattttttcatccttccattcattccagtttttaagtaatcaaacaaccttcagtatgcaatagacatgtggagatcgcagttttgaaaagcacaaagaactcttcccagacttttcttaacatgtgtcatcttcagttttctcatgattcttctcaagcagaatactaattctaagactgtgaatactcaggcacgtgatctttaaatttctgtgcaactgaattttaaagttcaaaattaaaagagtaataaagtcttttaaatatttttttcttttacatcttaagtttagatttgatttaaaattttattttcctagagaatgatttttatgctaccatattactgacatccattctaagtataatttcttctttcacactttaggcttaaactttataaattaatatttaaaattttactttctttgagaatgaatttgctgtacattgcaatattcctgacattcatt

SEQ ID NO: 32828 - DNA, 1419 bp, Bovine  19866881404486
  misc_feature (1)..(1): n is a, c, g, or t
naaaattagaggcccggagtctgtatgcacactacaggacataggctaagttacttttactaccatttgtacactgttctcagaaggaaaccacctaattttaccacctctgctatttactagatatatgctttggggtaaaccactcaatctccaattttctatggagcttgggctagttgagtaaagggctcatgtcagaatcagaatctctagcggtcctttgaaaactgcagaggccaccagagattataaaacccactgcaagagtttatccattcgcactccatccctagtctcaaattcagcttcatgaagaatcactgcatgtaaataaaatgttactgatgggaatggatatgtggtgcagacagcaaagaggtcaggaagcactaatgtgcaagattcagtcctaacatcacatccagcactgaatttacactaggccacgattctcaatgcagagctcctatctggcactcctggttgctacatctcaagaaagatcagaacagagctggaggaagttctgagaaatgtaaatgagagggtatagcagaaggaacactggcaatgaatcggaaatagttttaagttcaggaaattgtggctactagataaagatacagaagttttttttttttttttttaatctttcaaaatcccccaaatcataaagcataaagataggctgaaaatctaaaatacacaagttttgatgtttagaaggataattttagcagaaataaaaagtttttgttcacacagaagtaacagattatagaattctttagaggaagaaatggtacagaacaaaagtataataacttaccataaaagatttatggaatgcatgggtgaccaatttataaggttcatattaaaaggaactgggatttttaaaatgcaaatgcttattttttaaagaaaagtctgttatacaagcaactagctgatatgctacaaaatagcttacagtcattttgcagcattacaaaacatggtcacccacataactgacttttttaaaagtgtgattttaaagtgttaaagtaatacctcattttttaatctataagatataatattgtttaatatgcacgtgcttatcattagtctaaagaatgtctgaacgtaaataggtgaatcttttgtttttttaaagacttcaatggaaaagaatgtcttagcaaatctagagatgtgtcttgctaaattttggtatactttaaaggcgacctttacagtcacatgagatttaaatacatttttctcttctacagtggaaagtagtagcatcagtagtttgagtggcatgtataaaacttgcaatgaaacaattccttaagctttccaatgagtaccttcacaaggtaatttgtcctttggtgtataaaatatcatttaactaggaaatat

SEQ ID NO: 32829 - DNA, 870 bp, Bovine  19866881408285
  misc_feature (1)..(1): n is a, c, g, or t
ncattgatgcaactctgaaacaaaagtgagaacaatccttgttgcctctttttccatgtgaagatagcaactgagccattcccattactctaaaaagtcagaatttacaatattacccaacaagttatgcaacagcacgaaatgtcgtatatctttgaatagagaaataagtgaaacaattggatatacaaaatggggaacactttactaagcaactttgtactttctaaattaccttgatactgtatccactagaaagaaaaaaagtatataaactaattgaaaacattcaattagctcaagaaagataaatgaaaattaccaatcctaaaacttcttcctactaaaaataatcaaattattgagttttacaaagaacttgagtgagatacacaaatagtgtctggtatccacaaactcagaaggagtaaccagcaaacttactctgacagatggtttcatagtcagcaaaagtcacagaatagttagaactcagaggaggctgagagacctacaagagcccttaactctggcaattctctgcactcagggaaaccacagtggaaatgaggaggctagacaaacccacatgaaatattaaccaaaacccttccttgcttgttctctgaacactgaatgagtaacaggcaggcatataggaatttagagcaaggggtaaacacgtggactggattatctcagaaggctttatgtcagtttcatataatggaaaactataaatatcgagatttcctggtaaatctaaagaaacgctgaatgaaacattttgttcatgcgtggagaaaacatttcaaaacttcaagtgttagatatttgagcattttataatttcaaacttaagtgagtttg

SEQ ID NO: 32830 - DNA, 1367 bp, Bovine  19866881480834
  misc_feature (1)..(1): n is a, c, g, or t
nttcactttcactttctttctttaaatacagaactggacatagagccctttcatgtgctggatggctgtgtctttacctgataggagtccttcaagcttggcaaggactcctggggagattctgaagaggcagtgtgttttacccactcttcttttgtctttatggtcttttcgagctcatcaagatgcttgaaataagcattaatatcttcctgcagctgtatttttcttgcctgatcttccaaacgctgtgatatattcttccattccaataataccttctctaaaatattttttacttcttcagtaggaagaccttctatgtagacataaaaaataagcagacactttaggtattattacaaaatttgttttcaatttgctgtaaacattttaacacattgaaaataatgaggcagtatcgtatttactgatcactctcttaagttcctttttacacaacaaacattaaaatgatgctctcaaaaataattatgcttaattccctgataaaaacaggagagggggagcttatactagcagttcaggagtggggtgaccatcacaaaaagcataacagtggagtgtcagccactgccttctctataggatgtgtgtttctgtccttagcaacctactgctctactagtttttagtctgagtctgagaaataaaatgaagggtttggatttgtctggggctctgacatcagaaggtaggccctctgtcaccaggaaaaagagagaaaaaggaggagacagtttgagactttggtgaccaaacccacacgtcataggaattgcaaaatgaatgtctagagcccctagtgctgggagcaacctggtaagtgcaggaataggaagccagcaggcaggattcagcaaaaggcattagcaaacctattggaatgttacacacagaccagcaaatccagtgctgagattatctactttagaaacatatcaggaaaaaaaaaaaaacattatgtttattgttgacatctcataattttgtttgtctcatatttttgagaggtagagaatgtacataaaaataagttatatataataacaggctttatcatagtctttcccttaatataaaataccatcaagtcataaaattactatgaaaattatgggaaatctgcaaaagaaatgttatctcctgagaagggcatgcatgttgaaaagatgggcttaacatctttattatttaagcaggagggcaataaaactttgtaaatatatgccatcaaaatccagggtaatgagagctctaagggggaaaaaatggcatgtaagacaaaagatcacttaggcatccagagatgatgcaattttaaaatttttctaacacaccacatc

SEQ ID NO: 32831 - DNA, 658 bp, Bovine  19866881555479
  misc_feature (1)..(1): n is a, c, g, or t
nagaaaatgccccacatgtgggactgtaccaatgaaacacaattagacagaacaccattacactgtatttaagtcttgcatagtaaacactgtctagattacaaaattagtacttatccaatgacaaaagaactgtgattcattgaatgaccttttgcaagtaagacataaacaaaaataacaataatttccttcctttaaggatttgttttgttccaggctccagagttgcaaacagcgacgccagtgcaaatcatgcctgtgccccaatttgatccttccacatacaacaaggtcactcaagaggggaggtggagtgagataccctgatgccaacggcctaaggaaatgtccttgggtttcagctactcagatttcccaggactatcctctttttgagacaggcccagttcattctttgaaatgaaagaaaattaagtcatatctgacttgcaatcccaagaaccatagcccgccaggttcctctgtccatgggattctccaggcaagaatcctgggagtgggttgccatttccttctccaggggaacttcccaacccaggaattgaacccagggctcccacattgcaggcagatgctttaccaactgagctactcaggaagccctgaaagaaaattagtatctttaaaatgaatg

SEQ ID NO: 32832 - DNA, 2467 bp, Bovine  19866881579353
  misc_feature (1)..(1): n is a, c, g, or t
ntaactctctccttagattgactcagacactgaaagaaaaataccatgacagaatgagggctagggcataggtgttattcctgaggctggtcagctacttccatccttgttccaggttttgggtgggaatccgttttccaaagctctttcaaattctggatagctcttctaagtttatttctaagtattggtgtcctttcttattgcttccagattatctcatacacaacctttatttctctttaagctatcatcagagttcattttaaaccaagtcttctttttcttattaatttttttcattgtaaagttgataatcttattagtgttaagagatttgtgaaacaaagttggattactatgagggacatctgaagccagattcctgaagtcaggagttgctgaactacagccagctggccaagtggccctgcagcctcattttgtaaatatgtttttattggaacatggtcacatccatccatttacgtatattctctattgctgccttcttgctacaagagtggagttaactaactggaacagagattgtatggcctgcaaaactgaaagtatttactatctggtccttaacagaaaaatgtactgtttccatgccttatggagtcagatcactataagaaaaaatggtcaactctgagaaaaattagttggctaccatcatgataattaagtagccagttctgtctaaaattgtccaggattgcaatgtgtcttaatgagatctgacacttgaaaacattttctattttgatggttcaaaaggggacccaaattaccatcttccaatggaaattaccgaggttcttctatatgaagattctctcctgaaagctacctccagctaattagagttgaaaactgaaaaagcctcattgcaggtcgttttggtgagaaaagaaaaggaaatgacagtcaaaagtctagattacatttagtgactggggggtgggggtggagaatacctccaaatttgaaaatctttgaaagaaaatttgaagaacagtttactaaaaataagtaaagttcctgtctcttttctcttcacaagaagccaactgtatatcacaggggtatcaacaccagactcagtattctgagtcaaatcttaaaacaaataacgagcacttattattaatttgcattaataaaagaaatatattcttgatgggttgttccattcgctgagtaagagacaaagtttaggaaagtgtgaccaaaagaaggaagaccagaggagctacttctggctctttatgcaaagacatgcttataaattctaaaataagtaaggtatacttcagttaaagcaccagagaggatcatgttctattaaaaatgaatctttctaacatatctttatttatttggtcacatgtcccatgcagttctccttttagtgggttgtgtacatctgggtcatatacattctgaaggatgtttagctttcactgactttccttaattcaatcacccatgaaatttgcctcccagttaaaaccgtcacatctcttgtggaaagcaatttgaggaaaacattttaggagacacagagtgttcacagcctttgacctagttatcccactgctgggaatttatcttaaggaaataattccaaagaaggaaaaaaaacttcttattaactaaagaattatttataatagcaaaaaaaaccctttacatccaaaaataagagaataatgaagtgaattatgatacatcaactagaagaactgttagttatacagtcattaaaatgattatggaaactatgtaataatactgaaagtattcatggaataatgttaaggaaggaaagcagaatgtaaaattgtatctgcattgtgattacaatatgaaaaacaatgtctgcatgagaacaaggaccggaaggaacacaaaaatgattttttttgatgaactgaagtacagggattacttagggtggtagaatgaaggctatatttctttctttaataaatgttgtttataagcttaaaaacagagaacatctcacttttctccttccctttaatatttaaaataatttaagaactgtatcagtcatggtccagttacaaagaaaagaaaccattccaactagattaagccggatggcatttattcctggactgaggcaatggttgaggaaacagactctgaactgactttccagagatgtcttgaggctgtcacgcagaactggacaccccaaaatgctgcttctcctgccatgaccagtaagcagcttgcaaaactagaaaaggaacactgcctctatatgcactgcaccaaggagatggagcttcatgcttttttctcttactgtgtaactcagttttgaatataagtttgaaaaagagcatcagattgacagtacctaggtcacaagcaaaaggctttacagcttccctggtataacctcagatatgcagagacaccacgc

SEQ ID NO: 32833 - DNA, 1400 bp, Bovine  19866881647703
  misc_feature (1)..(1): n is a, c, g, or t
nagagcatgaaactttctttaaactgttatagtcaataagaactttccgtcccccttactctccctcagcttggctctgctttagttctggcaagatttaaaatagcttggtctgtggggaaagggagaagaaaacaactagaaatgtatctccccaagtggtgggcagctcagctataactagtcctagctcaaggagaagaagaagataagcttcatctttcaatgagagttgaattgtgattggtattgtactggccaattttgattattggaatgtttgcgaattaaagaagctgtagaatcattcactacctaagaggggccaggctcttctagaggcagagaacattctaccccatccccttacccgacaggtttaaaggacagtggggacaatatgtaaatttcctttatgaattcatcccatctttccacacgttaaatgtctagtaggcttgctcattcttcactaccactgagatttttagtcccttaacttttcctcttttcttccctgttcattctcatgatttatcattctaatctattcagaacagaccccacaatttgttgcttcaaccaaattcttttctgagtgtttcaatgattatccttgtttttccatcatgaaatcttgtaataaatctaacctttagagaacatcacacacctgagttctcagtatcagggtttttttatggtctccagtctcagatgacccatttacatggctcatcaagatttctgtctgcctctggtcagtttcctctccctgtccccatgtttatcacagattttaactcctctgttcaagctcctttttctgcacttgccctttcctcttctggttggtaaagctgctgtctgcatcccaaagataattgaagttgaagtgggataaactatgctcagtcacatcttcacttctttccctccagccttagggaaagacacttctatttgtagctgatcttaagctcattcatcttctctcctgtcttctatatttacccttcttctgtatttttaaacttatcctcttcactagcttctcaacacctcagaaacatgctaaagttgttctcatttagaaattaacctctgtgtaagtcccttgtattccttctcttagagccctgtatcagggcaccccttcacaaccaggcatatggaaaagtagtttctattttttatcttcactttttcaggacccattcactctgcttttagaaatgggtgtgtatatatatatatatatatatatatatatatatatatatatataaaatctcttctgtttgaccaatatgatgctattaatactttctcatttgccctgtaagatttgatagtggtgatgccccctcctcctgcagactcctcttcttccttgactt

SEQ ID NO: 32834 - DNA, 1530 bp, Bovine  19866881773182
  misc_feature (1)..(1): n is a, c, g, or t
nagtggagaatcctttgttcatgctaccactgcctaaaaagtagcaggacatcagtttagtataaggcaggtaataattttctccagtttgatggtaacttttttgcattggtagttagtttaacaaaagtaagtagtgtttcttagaatctcatgttctttcttgatctttgactataaaaatggctaagttgcagtaaagcttgtatgcatcaaaataggtgagctaaatttattgaatatttgatagtggttacctgcatagaccttaaaagtgggattcttctccaggttatttggttgaaataatatggtttacctggaagtttttatttttgcctggaacatttgattgtgctattttggacactatttgagtagttaattaatagataattatcaattggagaaatttctaatattgactgtgtacacaaaaatttgagtgtgtttgtgtgtgtccatgattttgctcagccctttcttactgattctggaagattttgtgttcttctgtctctgagatatagggacattgagaatatcaaaccatacagacataaatatgaaaattagcagccattttttaaatataaagaataaaattctttagtttggtcctgaaacatattgtcagtgtctaaagattatgtgtgaattatgcttgtggttaaaatttgcattataccctatgcttaatataaaacaaacaaatgatattgagactcattatttctttcttaaatcttaaataatttttgtttggtaatctctgtcttcatagcacattcatttgattcagacttatttttactgacttcatatacatgactagatatcctggatctaaaatactaattttaattatttcctcctgataggaactcataaatgtagagtacaactttttctcttataaaagaaatgagggttttatactgtttgtttgcatttaccgttgacatttaataacctctggcattctggagggcagcctgaaatggcatagttttatcttgtagtattttcttaggtaaactttgactgtaacccctaaagagaatatgagagggccataaaatataaaaatgtcaagaagcatcagcattacactgagaagagagtttgaactattcttatttgggactttattttcagggattagaaaaagaacagatggaaataaaaccccgactggatgaattaaaccaaactggacaaatccttttggagcaaatgggaaaaggtgagaatgttgctttttaaaaaatattttcttagatggtgacactgaatgctgtttcagtttagtcactcaggcatgtccgactctttgcaactccatggactgcagcatgccaggcttccctgtccaccaccaactcccggagattactcaaactcgtgtccattgagtcagtgatgtcatccagccaactcgtcgtctgtcatcccctatgtcccaccttcaatcttccccagcatcaggatcttttcaaatgagtcagttcttcggtcaggggcccaagt

SEQ ID NO: 32835 - DNA, 1569 bp, Bovine  19866881788873
  misc_feature (1)..(1): n is a, c, g, or t
ntttcaccctttcctttgtccataaatatgagagtaggagttgaaaagagtaggtttaagaatgagataaatatgcagatttctgtaagacattcttcatattctttctgagtcacctttcctgtgcaaaaataattaggccactgatttaacttgtcaggagcactggatgacttccacgtgctggagacttccattctggaaaatgtttttaaggactgttttttctccttttttattgctattcctatctttacagcacataacttccttttaaacaacaaagcacactccttacctggaaattggttggaggaaaaacaggtgcttgaaaataggaatgaattgtctctctctcaatgacttgggagcctgtgctcctagtctgtgggtatggtcctgtgaagtgtttctatgttactcagatcggatgagatctgattctttttctcaagaaaaagtccttgactcaaacagaattgcaagtcaaggggataccaggaaggaatacagaaatgttaacaagagaagaaataaaggttcagtaacattcataaggactgatttgcagtgttaatctatatgtgtgcagtcttcacttctttcgtaccctgcaacacaggcagcagtaccattaggaagggagcctggaagttcacatcttttctggcaggagtacagatgtcccagcaccagagaaatgtttgtctatcatcttttctttaccttcaactcagatgaaaatggtagctttgattaatgtgtgtcaagatcaaaagtaaaataacaaaggagagttaaaaataccttgtaaaacttcgtttcagcaatataactgaccaggtatcttactaccgcctcccaaatgttggtaggcaaaatttaacaagacatttttattgcatggttgagttttaaagacagaaagggaaaactcccatgagaggaaggtgaaaatcaagtagttgaactgtcttaggggcacttgctggatttagtgaccaggctttaacttccccttggagtaggagagagacttgttctctgtaagatggaacattaattaaatttaactccatataaaaccagaatcctaacagttggtgaaaagatgggctgagaaaaaaaaaatgtgccagcagagatagactatgagaaaaagtatctatatctgtggtagatagaagaaaaaaaagtcacccctgagaatttgtaagcctaggtctggcctcactttattcactgttttgaaaagatgtttgcctcttgagtacttgtgatgataatgcatactagcattgtccccaggacacactacactaatgcaaaagtgagtcatttctgtagggccatgatctctacattggaccaagagcaagtgtcaccggaagtattacaaagcaaatttaggtcctctaagaacttaacataatgagaaatcaagtttcatattactttctttaaagatgtagtataaatcattataaaaagaagaaatgaaataaaaacatgataaattaatcaatcattagaatgaagcagacaggtttaggaaagaactgaaataca

SEQ ID NO: 32836 - DNA, 1578 bp, Bovine  19866881929878
  misc_feature (1)..(1): n is a, c, g, or t
nagccccttgaccctaactgccccaggctcaccttcatttcttcccagcactctcaagttcttctggtgacttgtattcaaagtccctctccaggtagtcctcttctgcctgggtcatccattcctgcatctccgccaagtcttttttcaggttcaccactttttcctgactttccgacaacctattttttttaatagcaatctacaaaggaaaagtcattcgctcaaataaacaaatattaatatattaaatgtcaacttctagtctttaatatctaaagacagagtaataagtttccaccaagaatctcaagatttaaaagtcagatgaagcccttaatacatttggtcctgatgctgtggaatataagcaataatgaaaacaacaattataactgggattcactatcacattttggacattaatgtggaaatatctagtataattttgaaaatgcaaccgaaggactctaacttacatcaataaaagcatacatctcaaggaaatctattaactgaagcagccaaaatgtccattttctcctccttaacaggattccgcattaaaactgcatttttagaaaacagagaagagggacttcgctggtggtccagtggttaagaatgtgccggctaatgcaggggtcacaggtctgggaaaattccacatgccgcagggcaactaaccactgacggctaacatgcatgcaccataaatactaaagtccacatccctagagcccgcgctctgccacaagagaagccactgcaatgacaagcccatgcgctgcaactagagagaagtccctgctctccacaactagagaaaacccgcagccacaaagatccggcacagccaaaactaaataaatcaaaaataattcaaaaaatagagaagagaagactactactaaagatattcataaaacactgctttacaaaacttgggttttgataacctgctctactggtatatttcacggagctacaaaaaagttacattagaagatagatatgtgtctgaatctggttcaataactttgtcaactatttcagggagcctgaaagcacccttcagagagatcctacctctaaccacacactgatttctactgtgaaagaagatatcataccacgtagatcatccaggactcatttcactattcaacttcccgctcaaatgaaatctcacggtactggtcaccttgccagggcttggttggccgtgaaactgatggtgacggaagggcagtacaggaataggatggctctcacaagaataagggggaattcttactggctttcctgttccactgcccaaacagggtcatggtcataaaaatagacgggcactaaacaagggcttggatttcactgcccaacatggaactcagaaagcctactgccagcaacccacaacagccctgctgagcaacacttcaacctgatgagctttaaaaaaaaggaaatacagatttcggggacccacattccccaaattcttttcacaagtagtcagttatatacaattttcatggagtctcagagaagtaagaaagataaagacactgcagcaaa

SEQ ID NO: 32837 - DNA, 1544 bp, Bovine  19866880367778
  misc_feature (1)..(1): n is a, c, g, or t
naaaaaaaaaaaaagatgggagggaattactgggtgttcaagatcagggatgtgccgaacatcccttaagtggaagataacatggtcgtcaaatagcttactgaatacaagttgaagtgaaaaagccatttaaaagcatcccaaggtagaaacaaactccattttgtgtataaccacaaatcatacagtttacacagtttcaatatggactcacatttctatattatatatgaaatgatcatgtaaatcaaggaaacattgtattgtgtttttcctttcgcagtttcaccaataactgtgtacccattcagaaaatcgtatctctgaaaggcaactgcaacgtgtggcgttgtactggagtagccagtacaatacacctgatttgataggatttggaattcacaggaattttgtgaatagggagaggaataaaggtatttggccctcatttcacattgggtaaaatacagtatctaccccacagtgtccttgtgggtatatattatttccataccaatcaacattttcaacagtccttggcaagtaggaagacttaggcaggtgttagctgttatttatattatcatcatcactgactttgtagtcattattattctagagatccagaaggtacaggttatttttgaagtttgtggcagacactctctccaagatgagacaacttctttttctatccatttgtctctcacccctcttgaacaccaaagaggcaagcctgggtatcagctggtgcctcttacatagaaaatgtataaagaggtcaagacgatacagggggaagtgcctagaaagaagagcataaaacaggcatgaaacaggaaaagtcccctctgttcactgttgcacattccgagaagactcagattttatttatcttggaattcacagcgttctatttccttcctcaggttttcttgcatacaaattttcccatgaaaagtctgtccctgtgcaaagaatattgtactcaaacccccttgttttcctggagaacctctacccttctttcaagcccaaattgaagatgacattggttaaaagagaagagtaacaacctctgggaaattatctatttcttaaaagtaatgagaaaactggcgatagaactgcaagctttctggtgttttaacttgtcccgtttccattccgtccccagcttcatggcaactttgagaaacaacagcctgaaactgcagtgaacaccaacagcctggtagctgccagagagaacagaacaggactggaattccatcaaagacccattcccagaaaattgttattatttgacctgtctggtgattccctggaagccccggtggacaatcactcacaaggttgtctttatttggtctgactcagagctcacccgatgggaaacaaattttccccagggacaattgtccaaaactgttagaggcaatagtaccacaactgcctccagaagtagataaacaggtggagaagacagtaggataaccaaaatgttaaaaggaaaattagagaatagatatgtccatgtagag

SEQ ID NO: 32838 - DNA, 869 bp, Bovine  19866880493454
  misc_feature (1)..(1): n is a, c, g, or t
nagatgattgggtagtagattaagatctgcaaggagatccaaccgtccattctgaaggagatcagccctgggatttctttggaaggaatgatgctaaagctgaaactccagtactttggccacctcatgcgaagagttgactcattggaaaagactctgatgctgggagggattgggggtaggaggagaaggggacgccagaggatgagatggctggatggcatcactgactcgatggacgtgaatctgagtgaattccgggagttggtgatggacagggaggcctggcgtgctgcaattcatggggtcacaaggagtcggacacgactgagctactgagctgagctgaactgattaccttatagacagttgtaaagccccccatacctattttgcaccctcatggactgtagcctgtcaggctcctctgtccatggaattctccaagaatactggagtgggtagccattcccttctccagggatcttcccaacccagggatcgaacccaggtctccaacattgcaggcggattctttactgtctgagccaccaagggaaacccatacctatttttattagagactaaatttctaacttgttcaattggtttgtttatggcagcgttgcttctgctgttcctaggagaagacaattttacatttaaatggaatattctaactttgcctagtaagtaatgacctagaaattacaatgcagggaaatgggatttcagtgtttcatgaaaaaaaagttcctatcactagagcatcacatttttcattctttggctaggtaggcagatttctgcatgttctgggaaaaagtcttgctggagggaggaggaagcaaaaatgaaagacattagca

SEQ ID NO: 32839 - DNA, 1240 bp, Bovine  19866880541457
  misc_feature (1)..(1): n is a, c, g, or t
naggaagctctgcagggaaaggaagctgaacttaatctagaagcaagttagaaacaagagccttcacaaatatagcacagttgtgtcttataaaattatcataatactctctttatacttgatacgattatatcaataatatagattcacttgttattaaggtttattataaacatgcaaagttcattgcatgatgcatttgcaaaacatattaaaatccttccagcaataaagcctctctgagctgatatgcatccaggtttcctgactctgcagcgccaggcgtgtcactcgacatgacacaccaggggaccgaaactgtactgctgttcatctcagcggacggggacggggggactgggtcctggggctgcggctggagccacactgggtgagctgactgtacatcgtactctcgtggacaccgcagccggttcaataaataagtacaaaagggctggggtgcacgcttccacgccccaggcagcaggcagtgaaacggcagtgtgtgggcggggttggctaacaacactgtgagtagtggcatgatggctgatggcaccctggaccagagtcatctcccggagattatgaacgtctcacacacacacacacacacacacacacacacacactggtctgtccttgatctgatttcttgtgctcatttagcggattccttagaagatttggcctcttaaaaagaaatgcaagtagcaaaacagttatcaaccaagtcaggtacaagatgacaaacacccccacgcccatctagggttctcttcctctttttctaaaccagtgaccgcagtaggagaatcatgagcgggtacaaccgtcagcgcctgggagcagtgagcttgcaaactggactagacttctcccagcctctcgggttctggggacagtgtccatggaggcagaggacacaagcggcaggttttctgaagaccccccaacccccgagtcctgcctcgctcgcactctgggacccccattcttttattccgaagacgtggtggatggacgtgtttccggccccctagactgtgtgggttcatttgaacatctctgattgggaaatctggatggtgaaaatcaacagaggttttgggaaacacatcaaacagtacccaaaaaaaaaaaaaaaaaatggggccagagtctgtttgctttccagaaagggtcaatcccccgccagatgtcacctctacgtcaagcagatgccgacgtgacgtca

SEQ ID NO: 32840 - DNA, 1203 bp, Bovine  19866880576190
  misc_feature (1)..(1): n is a, c, g, or t
nttaatgggaagttaaaataagaccgccgggcacacagcgcctctgtgactggctaatgcttctcgaagtcatatcatggcacatgcgaagaattattcccccaacgaaaacgagaccctgactcaggacaattttgtgcccagccagcatttggagggtaggggagggagtgtgattaatgcttggcacaccccctaatatgttgatgttgatgtcaactaggtttacaatgtctgaaataaattctgggttgcacaagcccagcattaataagggacttgttaagagcaattcatgattgtctcttctctctcagctcagtcgtaagtcctttagactctttggattgcatcctaccgggctcctctgtccatgggattctccaggcaagaacactggagtgggttgccatttcctcctccagaggatcttcctgagccagggatcaaacttacatctcctgcattggcaggaggattctttaccactgagccatctgggttacttttttaacttgaaaagggctgatgatctttaaactttcaggtaactaacaactgaaggcttaggccttcactaccgctgaagtttagagatttacattgtaaattgctgaaaaccagagtcacagctttacaaattaatatttagttctgttactttagctggttttactgattaatatcatgaataaaatgaaagtactgtgcttcacttctgtcagacctttgatcttgaaaggaagcagaggacagtgtttcacagataataaacagatctccaaattattaaaaaggcattttattataaatacattttagttgtagcagtaaaatacattttgtgttaccatgaatcttttaaaacaaaagaatttcactgagacaatgatcacaatgtaggaattgtagaactctgaactgaaaccttgttctaaggaaccaatgtggccaaagtaattccaaaactaagttttaaaagaaaatgacaaaaagagaaggaaataaaaaccctagggagtggctttgggttattttatggtacaaagtcatttctacttttaaggataaactctttaggcattagaattctcagatgaggtatcattaaccacaaagaaaaaaataataattttgccataaattatgattattagacagatggctgtacagctggtactttttgaagagatggaaacggat

SEQ ID NO: 32841 - DNA, 1528 bp, Bovine  19866880620699
  misc_feature (1)..(1): n is a, c, g, or t
ntgtttgccctgtgccttgtagggtttttactccatcttgttagacgaggctgcccaggccatggagtgtgaaaccatcatgcctctggcactagcgactagacacacgcgggttgtcctggctggcgaccacatgcaggtaggtccctccaaggcagtgcatcagaaggagtttgtgttaggttttgatgtttcatatcttgtttgttttctaaagcatcctatgaaattgtgccatgcgtttcagttcaagtactttaaatgtttctgtactaatagtgaaaaatgttggtatttctgaaggaaaattgctaccctaccactttatttcctttggatagagagtagaatgaataaagttatcagtgttaccattttcatgtttgttaatttgaatttcaggtctctacagtaggaatatttgattcttttctttactgaataaatttaaatcatgcttcctatgattccccagttcctgtccccaatgtttgttttcctgaagcgttaaatttttcattacatgggaaattaaaaaatgagtcaaaatctcaaggaacttttctgatcttattaatacctatatatgaaagagaattacagtttttctaataaaatatcagttttacaaagatgcaaattaaggttctttctcttttgtcacagttaattgatcgaacgcatagagtattgtagttgtccagacctttaggaaagaattgaatgtagaggaacaaagtctgtttattgctttgccagaagtagtttagtttttgttcttagcgtctaagttatagtcgagaatggttcgttacactttacgagagaagtatggctttctgctaattattaaaaagaagttttttagtcataggctgtgtatgttgcctgcttaccatttgaaatagttgattaattttagtgaaacagtcgtttgactctaccagtgatacaatgggtcacattcctaaaattactaaggtagtagctatttattattaagtctgagaagtcctttattaacctggatacagaaactcaaggttagtgttgacatactggaaggaaaagttggaaaacttagcctcattatttatagtagtaaagtttttcctagaatatatgtttgactctgcttattgcaacattcagcatgctgagatttagtatatcagaagttccagcatggtggatttttttataagtatgttaataagaatactatttgtatatttagttaaattttctcccatgtgtttatctgttacagctcagtccttttgtttacagcgagtttgccagggagaggaaccttcacgtgtcgttacttgatcggctctatgagcactaccctgccgagtttccctgtaggatcctcctgtgcgagaactaccgttcccacgaagctatcatcaagtaggtgtgagctgctggctctggcgcgctgtctgtggcctggtgggaggtgactgagcacagcactgtcccagggacaggttattcccagcagagctacatggcatcccta

SEQ ID NO: 32842 - DNA, 809 bp, Bovine  19866880637625
  misc_feature (1)..(1): n is a, c, g, or t
ncgggaatcttttcagttcttgctctgttggtgttaacacttcctgttctgactgcatcagcattaatgtctgggatttatttgtggtcttcagggatttgatgcacaatgaaaaactccctctccgtgaatttgagcaaactctgggagatagtggaggacagggaagcctggagtgttgcagtccatgggatcgcaaagagtaggacacgacttgctgctaagctgctgctaagtcacttcagtcgtgtccgactctgtgctaccccatagacggcagcccaccaggctctgccgtccctgggattccccaggcaagaacatggagtgggttgccatttccttctccaatgcatgaaagtgaaaagtgaaagtgaagtcgctcagtcgtgtccgactcttagcgaccccatggactgcagcccactaggctcctccgtccatgggattttccaggcaagagtactggagtggggtgccattgccttctccgggacacgacttagtgagactgaacaacaacaacccctccaagaaagaagaaagagagagagaggtggggggaaagaagcacttagctttttaacagaatatcattgtgttctttgtcctggcagggagccagtgcactttatccaggctcccccaagtccctggagaatcttcttgcgcacatttctgagaacagatttgggatccgggtggtgccgtctctggaatgacataaatgaagatgccaaaatgaccagcagtgctcctttcgctccgttttaaaggatttttgtgaaatgcatctgcaaacctattgg

SEQ ID NO: 32843 - DNA, 1853 bp, Bovine  19866880676051
  misc_feature (1)..(1): n is a, c, g, or t
nccccccaccctcccatctcctctggccgggagccccccgatgctgtcaggccccccgggccgccttccacccccgcccccgctccccgcagctcccagctacaggaagaatgaaggtctccgtgggatgcgcgcaggtggaccctgccgaccgtcctgccccggggaggtaacagcgcttcaccccaagctgggtggagccccacttccagacccccggccgcgctgagagcacctaacaagctactcacactgcttgcggctccttgaacttcccgacctgctggatgtggtacatgaggtccccgccgttgacgtactccatgacgaagtacagccggtcctgagggccgaggttcgaccggtgagcgggctcctccgcgactgggggccccgctccagcccgcggtctgctttctcgttggggaaacgtgggccgcgctggcacgtctgcccggcggagcccgtcacagttttctccccccaagaaagaattagtaaaaagccccgctgtgtgaggacctcaggaaacataaagtcacgacacagccctgaaacttcagctctcggttgccctgtccactcctctggttacagatgctcccaatgatggaaacggcctcgaaccttcctcccttttctcctacacacagaattcatttctaagttggggctggcgtgaagagtccacacgggccaatcctttaaccagtggttggcagtgcagtgatggacgctgatgtgtttgcccagacgtgtctgagagcagacctcatgggtcagggggcttgtaccccgtagacctcagggtcgtctgccgtgggtggggctgcgtgtggggaggccgatcggtgctctgcatccacgttcgcccaaatgctgtttctgactttctctctggctgacacgctacgtgtcggcccgcgaagcacatgtcatagaactccgtgagtctgcgcatttataaggacattacactgggacagatgggaggtggagggggcttaggagggagataacagcgcagcacaaggtaaacgctggcctctgctctcttccagaaaacacctccatttcacagaggttattaaacattaaagtggtgcgcagggaggaaaaaaggacagaactggagccaacagccaggaaagggcgctgggagcctcaatccctcgctttcctgttatgaactttaatttcaattttatttctctgctttgtagctttccagagcttaatcagtgtaacctgggtaacaggatcccggctggggcttttccctctcctttgcctattgctagattctcatttggacgctaccgggaggggctgggagacggaccatcactcggctgcccgcgcctggctgccccctggtggccgggactggctctgcggccccccatccactccggactgcaggctgcggccccgtcactacagttacggctgccgatcaccgagccacatgttcaggacagccgttgaggtgtggagagcttgcctttgggaacgcctcactacggtgcggcgtatagtacacacacatatacatataaacatctaagtgtttgtatttcttgtaggttacctgcaagcaccatgccccagacttggctgattagtggaaattttgtcctctcttaagttaacctgtgtgacagggctctgcaaaccttttctgtaaagggccagacaggaaatattttaggctttgtgtgtgtcttgcaactactcagctgtgcctttgtagtcagaaagcccttgatgccaggttagtgaaggtgccaggctatgtcctgagaaaaccatttatggaccttgaaatcatctaatttttttgtgttacaaaa

SEQ ID NO: 32844 - DNA, 1297 bp, Bovine  19866880677012
  misc_feature (1)..(1): n is a, c, g, or t
nctggggcggggcctgccacttagcgattttccatctctggaggcagcgctgtgcctagggtaccggtgtgcatgccaaggcgcctctgtcctgtccaactctgtgtgaccccacttgactgcaagcccaccaggctcctctgtccatgggcttctccaggcaggaatactggagtgggttccatgctgtcctccaggggatcttcccaacccagggatcaaaccggtgtctcttaagtctcctgcgttggcaggcgggttctttaccactagtgccacctgtgaagcccacctagggtacagcagatacttaataaatcagaccgagtgatggagacagtgattcccaccttgactgcaggtgaatctccggagacgcagctgagcagctccgagggccccgcactccctggtttgttagtgtcccacccagagggctcaggctcccccaccggggtgcaaactgcaggctgagacccaccgcagagtgcactcggccccccattttgcaccgtgtcctggtcactctccggttagtgccggccgacgtcctgccttcactgtaaccagcaacggcaggaaccggatccggcggcccccctctccccgcccgccccagcacctgcgctcctctgctgagcatcactagcagaaactcagccctcacaggtccccgaccctcacgctacatgaaaggcagaggagggagctggcaggggaaagaaaagctcattttcttgcagaagcagaaatgagatatgctgtctctgagatccagaaaccagaagctggtccacatttgcccagaggctgcagagaactgtgggtcccagcaggtctccacgacggggtagggaggattgtcctctccatgttgacagcccctctccccacaacagaagcacacacccatggagtccagagggccagcaaagcctctgtgctgcgggcagcagggcctcgatacacaccgataaatgattcctcttttatgaagaaagaacagcccgatggaaatctctgctgcatagaacctgcaacagaaaatgtctgtcaggagtccggcttgttccctctggcctcctggatactttctgcctcaagatcaggcatcaaaatggcacaggaagggagaccctgaccgccagagaccagcactgccctacaggcagctccaaccttctgcggttttatgaccccagttccccaagggatgacacagctgataaaatcagtgaagcaggtttattacctgcctgaaaacaagcccttcttgtctggggcaggtgggacaggg

SEQ ID NO: 32845 - DNA, 1762 bp, Bovine  19866880704498
  misc_feature (1)..(1): n is a, c, g, or t
ntgtagcacaaatctctttcagttgctaagactactatttgatttcactttctccatttacctcattctatttttttagtgtaaaaaatgtgagtttcctatatgatgaatatttcaaaagcacaagaaaaatctttattttatggaagttttcctgttatgccaaatacagcttatgttcaggtaatgaacagacttactcgtggcccctggcttgacaatgctcactatccagaacacaacaccaaactcagaaatgaactctctgaactgagagtctgtgtggtttattctcaagatgcccttgagtcctcactcagaatctgtttattaaagcagaactccaactttcaaatcttatgactctgatcagctcctggcttaaacaaatcagccattaaaaaaaacacacatacacacacattttggggacaaccaggtaaatctgactatagattgggttttggatattagggaattatggtcacttttattaggttaatagtaatgctgtggttatacagttatgatcttatttattacagatgcatactgaagtatttaggaataaatatcatggtatctataattacttttaagcagttcagaaaaaaattaatcaagtaaatatggcaaaaaggtgacaacctaagtttcaagaatatgaatgcttattatattatttcccctagtttctccttgtaggtttttcataataaaaaagaatttaaattttttaactccatgacaaagactgcctggctggtttcccatccctgtgtgagaaagtgaaatcaggctcagaagcaagtggagggagagggggggagggtagctgcaatgaagcctgttgagagctgcaaggaatgcaagctgatactgacagcaagggatcctgcagtacatcaaatgcaaactaggtctggggccctgcagagggagctgctcgggcacccagcatacaaaccagtataataattaacaaaggccgagactctggtcttgttttttattactaactaactgcctaaccatggtattttatcttatataaaaataaccttgctgtatacctgaaattaaagtaatactgtaaatcaactatacttcaaaaaaaaaaaaaaaagttaccaaaagggaagaggaaaaaattatatataatataaaagcagaactctacaactagcaatatatacacataaacttttgacaatatttccaaatgtctacttcaaatgaacaactttacattaactaagcatttccatgttcttacaaggaatgcatagaatgtaatcattgaaccattattgcaagctaaccaatttcccccttttccacacagcaccacaatgaaaaccattccacagacaattttttccttcttttgaaatatttacttgggacagtctcccagaactgagattagtgggtcaaaggtacgaacatatgaccaagctgtattctgcttcataccccgcccgccgccaccacaagcacacactcacttcactacaaccttatctgagacagtggttttctccccacattgcagaagcagaatcagtacacaaaaactgcacgtaaccaatgtacagtctggtgagcttggacacacacacactttcatgctactatgctcacactccaggtaacaggcctagccttcatctccaaggtttccaggttaaatttttatattgttaattcagcagttgtaaaataatacctaactttaaatgccaagtaaaacaattaacaa

SEQ ID NO: 32846 - DNA, 1364 bp, Bovine  19866880713026
  misc_feature (1)..(1): n is a, c, g, or t
nctggtgacacggccttggctggactgcccggcccttggaaggaagcctgggtgtcctgagatgtccccagggagtctttggggagccacggtctcctcccagcttgcggtgtggtctgggggctggaggtgagccgggctcccgcctccagacccaccctcacgggcccccccgtagctccttgtgcagggcggtctccgggcattgtgccacacccaagcaccaatgtctccactcagctcctgccagcagatctgcccagtaggtgttgttaatgtacccattttacagagaaagcaactgaggctcagagagaaggcaatgactggtcgcagggctcgccgccagtgggaggcagagctgaactcaaactctgactcactctgggccccgcacctcacgtccaccagcacgtcctccaaggagccactcagctgctagaaatctcaaatctactgtgaggcaggtgtgtgcagagccctgtgtgtttcccatctatcctcctgacaaccctgagacaggcctttgcagaagcacaggaggaggccctgccgttgggtgtgttctgaggctctgtcctcgccgcgtcctctcctcctgcgggtccccagaaccagacagcaagctcccgggccgtgtggtacccactgagcccagcacaaggccaggcctcagcaggggccccctgacggcccagggtgcacgcttcactctctgaggaagcacccggccctgcattcgtggggccaggggagaacaggagcagcggctccagcctcccctgccctgcaggccagccaccgcctccctgaagcctcagagcccatctcccctgccccgccttctcccaccagtaatctggggggtggagggggcatccagtgcaaagtgaaaatgtgggttctcctcttcaaaaatgatcaagaatgttccactggtgatgacctgttactggggcctggggtctttccaggccagtcttgatgtaaaatgttctgggttgtgccccctcctactccaccatctctgcctgcccgaatctaagagtgccagcatttcaggatccaagaacacttcgtatactgcctcacgcatataaaaccacatgagaaagtctgtgctctgctattttatctagaactttggctcagaaaatacaaagatcccactgctctctgtcccgctgcagaaccggaggcggtgggtcagcagtcatggcctgacatcctgtcacagggaagcccctgccagcatccctcggtgatggatggcggatgccccgccccctggtcccgccccccctgcccggtgtcgggttagccctctgaccggcccaccagaagcctcctgtcccccaccccag

SEQ ID NO: 32847 - DNA, 1859 bp, Bovine  19866880787155
  misc_feature (1)..(1): n is a, c, g, or t
nacatgagtttgagcaactctgggagacagtgaaggccaggaaagcctggcatgctctagtccatggggtcacaaagagttggacacgacttagcaactgaacaacgacaaaactaaagtagcccaaaactgtgcagggggtgggggggaagggcagagagcgccacctcgcccaccatcctggaaacactggcatggcatccccccaacgcctggaattgcgcgcggccccgtctggcccccgcggcccccactctggccaccctgacaccagcctgcccggtgctgctccctcttgtcacaaatgctcacggctcacccccagctcagcccctcgccaccgagggagacccgcagagtgaagggggtgatgtctgggtccacagcagcactctcccctgagccatcaccgcaggccaggaggcatctgcaggcctttcggtgtcagctcaggtcccaggagaagaggcaagtgtttgtccccattctacagaggagatgaggtgggtaattaagttgttcgtgcctgagtcacacagagcatgccatcgaagcgtgtcccacttagggtgccatccgtgatacccttagctgtcccccactgtcctgaccaaggccagcctgccccacaggggccctggagaccagcaccccagctctgaaggcagcagttcaggacccaacggagggatacggccagctgtgggcacattgcctgcttgagtggtctgcctctgtgcgccgacccccttgccgagctccccgtcatgcctgggttgcccttctgctcccccgagcccagagcctgcccagagccagacacacacagcacgcaagtctgggtgaacagaggtgggggccctcgggacactcacacagttcttttcctctgctcccccagggatctataaaggacactgctttcggatcaaccacttcccagaggacaacgattacgaccatgacagctcggagtacctcctccgtgagtgtcaggaccctgcctccccctgtttgtgggacgggggacgagaggcaggcaggcgctggaggaaggataggccccgtgagggcagaggggccggtctctgggtgctcccgacactcccctctgactcaggatactgagttcagaggatggggtatggttagcctgctgtgacacgccggtcacccccatgcagttactggctgggaggacacaccagctcagggctggcaagaggggaggagggtggggcgtcccgctgcccggggctgctacaagttgctgccttcagaggagttgatcgcaacagctggttctgaggcaaggacgttagagacattggcttgcccaggcccagcatccctgaggggctgagacaccccaaggatactgcccggccagcactggacctgcccacttctccccacccccacccagcaatctattcttgacaagtcagattaaatcacacactgagacagccggtgagtgccaggcagcctgtgggaccagcctcgggtccatgggcctcaagtctctccagcaccaactggtggagcccccagctctgcccctgagccccctgcccaggtcctgagatggggctggcccccaaactggaaccagaggtcagaggacaaacccagccccacgccccaaatccagatctcatccctgggctgtggctacctccctgggaggaaggatggagcctccttcctccaggggaggaacctggaaatggaaaaccagcatggttttgaagtcgtctccccttccacatcagcccagacacatgcagagctgctcccatcccctcccccgggagctgggccggcttcatttaggagaatcgataccagcgtccaca

SEQ ID NO: 32848 - DNA, 2116 bp, Bovine  19866880802667
  misc_feature (1)..(1): n is a, c, g, or t
ncttttgtatctcttacagttgtgacctcgtacaattgtgtttctgtgtcctaacactcactcagcaagcaacaaccagtaactaataatgttagctgttatgttgatggtaacattcatacatctgaacgttcaggcataccttcatgggtattgcttcaatccttataccgactctctgcggtaggaactattattatgctcatatcaccgaagagaaaattgagggtcagagagggtaagtgtcttgcctgaagtaagacagtggtagatctggaatttcgactcaaggagactggcttcagagcctgcccgggttttttgtttgtttttgttttgtattttggccactcaggatcttagttcccctggactgaacccctgcccccaatggaagcatggaatcttaaccactggactgccagggaagtccctgcagagcctgttttaaaccttacattctactgcttctgtgattggtgtttgaggaccctgtatgagattggttagataataaaagtgatactagtttgtgataatcgttgttgtttcactcttgcattcaggacttaaaaattagtctgggagggccttttctgaactgtggagatatagcgtttaacagttctggctgtagaaggttcccctcctaccgcgtcccgcttttggatcactgtgtatttgacacctgggtgtttagggactacttgcattcctaaattaaatatatcctttgtttctccctcctcttaatgtcttttcatttctcttggttacctgcaacttcttctcatggttaatactaaaaataaagaggaggtgaaatgagagagtttacttgattgtcagtggcttggacaaaaaacctcttccaagaaataggtcatttaaaagtattggattggcatttcacttgagttatttgtggttaacatgttattagccttttcttatttgggttgtttaaggagacattaaaagatcaggtcatttaggagttaaaggacacaaacatgtagagcgtgcagatccccagcatgtattgatgctgaacaaactccttagtcatttacctcactgacaaggattattttaatgagaaaacggagtcataagagtcacatgttctaacaggttgcttttggtagctctaaccgtcttgttcctctgcactgaaaggcagcatcgaggaggtaggattgcaaggatgacatgtgaatagagaggaaaaggaggaggaagatgtttagccataggattgaacgtggaagattgggtgaaaagtgggatggtttgagaattgggagctgcatttaatgaaattgatgatagtgtccctcagcactgaattgtcagctatataatttgtcacattctgcttactgtaacagtaagaatcaggaattgtaagccgagatcaaatgaatagttcaggtcaacgtgggttcattcgacacatgctatgcgcaagttgctgcaaggtatacaatcaaacaagggtatatgtgtccaactcttttaagatctcacgggattgtagcctgccaggctcctctgtccatgggattttccagactggagtgggttgccatttgcttctccaggggactttcctgatccagggattgaacctgagtttcccgtgtttcctgcattggcaggcaaatcctttaccactgagccacctgggaagccccaatcagacaggtgttagtcactgagttgtgtccgactctttgcaaccccatggactgtagcccaccaggctcctctgtccatggaattctccaggcaagaatactggaatgggttgccatttccttctccaggggatcttcccaacccaggaatcgaacccaggtctcctgctttacagacaggttctttactgtctgagccaccagggaagccccaatcaaacaaagtctagccctaaaagaacttacaaaacactttggagacatggatattaataactatgtacaggtgtaaaggggtgcaccagtatgccttcagaaacaccactgtaagtttgggtaggtgccgagcactgagctagtggcgaacagtacagacacagccccctgctcttactgagtacattctagtgaaatta

SEQ ID NO: 32849 - DNA, 1834 bp, Bovine  19866880838979
  misc_feature (1)..(1): n is a, c, g, or t
nggaaaggggaggggccaggcccaaggcagggggacagggattccagaggccagttgggctggcgggaaagaaatggcagggggatcagggcacacaggccggctggccgcagtgcccgggacccttggcctgtcctggagtattacctactccctctgcccatctcttcctcagcctacttcttaagcttatgggtatctgctctctggagctcaacttcagggtcagttctcgttgtttctgcagcctttgaggggaacaccagccccttgatggagatcagttctgccctccccactccaccaaaactcgaggtcacagtcctggagccagcacccttctcttccttgggctccttaatgaacccaccggtcaaccccacagcacacgatggaggaagcacttccttctcgggttgttagcttccatcgctgacgtgccctcatttcatgtgggaacccactgctgggccctcccagcctcacatctggccctgggcaccctggggggcttgtgggcagtgatcctggcaccgggcaccccggggggcctgtgggcagtgatcctggcaccgggcaccccggggggcttgtgggcagtgatcctggcaccgggcaccctggggggcctgtgggcagtgatcctggcaccgggcaccccggggggcctgtgggcagtgatcctggcaccgggcaccccggggggcttgtgggcagtgagcctggccccaggcaccacgggaggcttgcaggcagtgtgagcctggccctgggcaccccgggggcttgcgggcagtgtgagcctgaggccagggagtaagtgggcagtaagtgggtggcacaggctcggtttactgctcctggtcctcagccacctttctcccttctgctctgggccttgggtggctgatagcagggaccggatcactggggtcccttcactctggctttggagacattactgccctggcttcctcctgaggacgaggacggggctgaggtggctgtgttcctttgtcaagccacagatcctgcctggcggcccgggcctcacagctcctctggtccaggagcccgtacctgcctctgtcacccgctcaggccaagggccagaggtccttctgctgctcccgcctgtgtgctcactgccccttccccatccctgcacatctctgtaatcagtccttcactaaacgcccttccttcttcctgtctgagcatctcctctgcttctggcggggaccccaggaagccacacgtctgacctctgggctgacgtgtcttggggcccatccagagatgccagccctctggggaccagggtgggggcacggcaggaggtaaagaggaagagctggcgccagttaacctcaagttcaagtgggaagtgggagggaacggatgcttctctggtgtccccttccccacagtcccaaggcccagcagtggagcagacctgccccagagccttgggagtcgtctgcctgcccggtgggttctgagtcaggcctgagcaccagtggccaccctagatggctgtgcagcccgcacaccgcacaactcatggtgttattcatgccccgctctatgccaatgccatcccctagtgtgccccgtggaaggcgtgtgctcggttcagtactggcccccagaaagcagagagagaagacaggcaggaagaagaggagaagcggaggggagggataggaggcagagccggtaacactgtttccggttctggctctggactccatggggaccacatgctgttctgtttcacgagatgactcagaaccagagtcctttctcttagaaaaaacagtccataagcagg

SEQ ID NO: 32850 - DNA, 900 bp, Bovine  19866880921034
  misc_feature (1)..(1): n is a, c, g, or t
ncagaaaaaggagtgagggaaatagaaagcagcatggagagatgctgacccggggggtgggggggtgggaccagcgccaggtgatggcggggggcctgggtggcaaaggtctgcagtacccccaggaagagggtgctccagtctgcaccgcattccacacaaaagacaatcggactgtctttcagcagaacaggcacaatcaccctattgtccagccccatgaatgacctccagagccacaaagcagggacaggaaaggcaggagcagccacactccctcattagagccctctggtctcaatgtggctgctcgtgagctccagggaaaggattagagcttgcggatgcaaattgtattggactctacagccaggattacctgatgtccctgctttacagaaacacacaggaatcagagtgcaacgcacactaaaaaatcctaaaagatgctgggggccagggagggggcgtggggggaggctggggagacggaggctacaagtgaatctgctcacaccaactgtccagtcatgcacaggatgcggtcagcaggcttgctctttgtaaagggacagacagcgaggactttcagctctgcgggcccttcacgtgtcacgatcactcagtcgactcttgctagagggccagggcagccacacacaagccacgcatggcacagctgtgtgcccgtgagacgttctgagcacaggctgggatccagcccgtccagctgtggtctgcaagccgcggtgcaggaggaggacaggagtcttcacgcaaagatgaaactctccccaagttgcttcctcaccctcactgacctcatccacctttgtcctcgtcttcagcaagctgaggctgtggttttttaaaggcatttatttacttggttgcaccgag

SEQ ID NO: 32851 - DNA, 3206 bp, Bovine  19866880998368
  misc_feature (1)..(1): n is a, c, g, or t
nccgtctctgactctttgcgaccccagggtctgtagccagccaggctcctctgtccatgggatcctccaggcaagaatactagagtgggttgccatttcctcctccagggcatctttctgacccagggatcacacccacatctcttgtgtctcctctgttggtaggcggattctttaccattagcaccacctgggatctcctgcatcagcaggcaggttcttttactgatcacgccacctgagaagcccacgatccctgtgaaaggttgttttgatcagagaaaagcgtcacctcatagcccagcatgtgatgagcatggtcaggcttcgcttcattcttcctttaaccaaaatgctagtgcagacctcacgccgagtgcagcactggggctgggtctgcagggacaggggtggaggctcgtcctgtgaaggcacagccgccccgcagagccaggcacgagcagcccaccgggtgggcatggacgaaggaggcttctgctcagagagggggcatggacgattccttgagagccttctcagccactaaagcaaacacgtcagatcccacattcccccgaagagcagagcaccgacgtcctggtggtctggtcatgcccaaaatctcccgaaagcttcttcacctcctgccatctccctgggagctgttaacttgaggggtgttaaccgagtgaccagtgggtaaaacccctctggggaactcacaggtcacgacccaggatctgtcgggcgcggagagcaccgcgggatccatgggaaaccagatgctcttacaggtcaccatttttcaggagtccaactctttacctgaaaaagaaacctctgttctccttcctgtgccttttaacacagcagtgagtcaccccacagtctgccatgaaagcgttttcctccagggaacacactctccctcttcttgcggctgcaagtttcctttctgcaaatcttagattggaaaatctacaaataagggaagaatcggtacacagttaattacgtttatttcttttattacattagatacaaagttatctaacgcagttaaagatacaaagagtttcttgtatgggtgagggcagcttctcattcctttgtaaatgtcggccttggggtgagtgcggcgatgacggtaggaatagacatctcgaggccccgcttcctttcctcacccatctcccctcccaccgcccccccagcaccggcatccagcttagtcagagtttcctgtcactttgtccctgaggaaatggctgactgttttcacagtgtgtgttattgtttagaaagccaagcttggccctgccggcaacaaagtcatcagtccctccgaggacaggagacagccttccaacaacctggacagagtgaagctcacggacttcaacttcctcatggtgctgggcaaaggcagctttgggaaggtgagcgggccacgtccgagccggggggggcttccgtggaggacgtggggccggtcggtccaagtctccccgaggactccggggcagccctctagatgccccctggttccgccacattttcaggggcttcccacttcagcgcattaaaaacgacttatccaaaagccagacagggccccctgtgccaccatttcagggttcaggatggagtcggcgccccacaatggtggctgaataattttcaaaactgaaaattaaatgttggcttgtagtaaatgaacataatagttaagagataccagaccgggtttcctccgtgtccagtctgcatatctgcgtctgcctctctgggtccaaatctcacggtggagccaggggctggcttcaatcctcctgctttcttttggatttgggtcccgacttcctggcttgtgaggagcgtgtaaaggtcagtcaggtgtctgctctgagggtgctccagagatgacggtactcctgagatgacggtgctgctgaggtgaagatgctcctgaagtacctgctgatgcagaggaggatgtcaggcatcattttcagcggccgcaatggcgccctcgtgtggttatggcccacacagcatgtacatcttggtggcctagaagctatcagtccagtccggtcactcagttgtgtccaactccttgcgaccccgtggactgcagcacgccaggcttccctgtccatcaccatctcccagagctttctcaaactgtatgctggaggagtttaatgtgcagcagtctatggcgctgcaaagatctggacacaaccgacaactaacacacacacaaaacgcagtgtttgagaacggcacctcctgaagtggagctttcttgatgtcggtgaatctgctgggacttgcctggtgctcagtggctaagacttcagcttccggtgcaggggctgcaggctcagtccttggtcggggaactaagatcccacatgcctcttggccaaaaacccaaaagcagaaaatagaagcaatattgtaacagattcaataaagactttaaaaatgagccacataaaaaaaaatcttaaaaaaaaattgacaggtctgtacacacatttcccgcacccgcccccccacccccgtgccgtgtgccccgatgttcaggttgccctccgtctgcctgcaggtgatgctggccgaccggaaggggacagaggagctgtacgccatcaagatcctgaagaaggacgtggtcatccaggacgacgacgtggagtgcaccatggtggagaagcgggtcctggcgctgctcgacaagccgccgttcctgacgcagctgcactcctgcttccagacggtggtgagggtccccggactgcccccgccccccacagggtcattgcgccgcacccccagccttcctcccgggagaagacagcagcccacatcctcctctcccaggcagactgggtaccactggggaattcagggcatcccctgcttacagacttggcattcatcccatttgattctgtgaatgcttctgtcaaaggttttcttaacacacaccgggcaatgtgttaaggcttagagatacaaaacggtagctcacagtcccggctcgttaaatcctggtacagctgccaaattggcatcagagcatcaggagacccatgtcctagaagaggatgttcttgggtaatgcacacgcaggggtggtagtctggcctgttttgtgtggatggtcccttagctctaagagaggctttataaaa

SEQ ID NO: 32852 - DNA, 1989 bp, Bovine  19866881043864
  misc_feature (1)..(1): n is a, c, g, or t
ntggcatcactgactcaatggacatgagtttgggtaaactctggggagttggtgatggacaaggaggcctggcgtgctgtgtgcggttcatggggtcgcaaagagcagacacgattgagcgactgaactgagctaaaattttcccacagttcatgtgggaggtcttgatccctgccccctgtacaatgtcatgaacctccgtccatagttcttcaaacactctgtcaggtctaatcccttgaatctgtttatcacttccactgtgataatgcccttttcatttttaaaaaaattcttttttctttttgtgtttcatcaagcattgtttctactgctaatgccttcaggttcactgtttttcttctgcaatgtctaatctgctcactccatctggtgtattttcatcttgggcgttgtagttttcatttctgaggtttagtagtaaggctatttttggcacagagttccagtggcattcttaaaagaatgttttcaaggaagaactcaaattaaggattctttcaagaggtttagaatatccagtagttagttcttatagattaaaagcctttcacatgcatgaactagtgttatttgtctattataattgtgatttttttaaccttaatatgcttcctttattatttatcatccacttatatttagtttgatatctattacttttgaaaatagaactgcattcttttcagaatatctttatttagtttagattcctttgcgtgcatgtgtgctaagttgcttcagtcatttccagctctttgcgaccccatggactgtaccccaccaggcttctctgtgcatgggattctccaggcaggaatactggagtgggttggcatgccttcctccaggggatcttagattcctttactaaataaaatagacagattatttggatttttgcttaattgcatttgtaagtggccaaagtattaagccatacataggcaggaacaccaaggccttttctaagtctagtctacaaaaatgaggctgtaaactcctagagaatgggcagttatcttttggattatctgttttaaggttatcccttactgagtttttgccttgtcaaagaaatttgctttatttataaactttctttcttgctgagaaattgcaactccaaaattttaagaacaaaaccaaagtagtaatactcaataatgggtgaaaaaatgtttaaaatatcctactttctgtctaatattgaatagtcattggaatttgtgacgtctactggagacactgtgtaacagctttaaaatatttccttaggtaaaagtgatacaaataatcctggacctgaaattaataagattcgaacaccagagaaaaaacctacagaagcaaaacaggtatgtgatttacctttggtgaatgcattgttctcatggatttaatttaattgatcatcttagaatcctggtgtgttatagaaaattatgtccccttttaggttttgttgtttgatgagggcacattgcactctctccctctgctgtttcgtcgctacattattttctttatcagagtacttttctcaaattatgttattcagtgatagactcaaatttagagacttcttatgataaagtagtaagtgaagacatagctatagttgtgtcattaaaaattatctcagattgggaagagctgttacagtgaaggaagacttaacattctcaagtcccctctcatcacgcctgctgtgtccatccttaactcttaacctgtttgttcatctgcgtctgtactcatgaaccagttagggaaaagtcaaatcatggttgaatcagtgctactggagattcgtgtctcctaatcggggcgcccgtggggcaccttcatgtgtctcttacgtgtgccaggctccctttgcccagtttactcagcagctcttttggtgactgggtaccttctgccattattctcatgatcagaagatgacctcgccttagagattaa

SEQ ID NO: 32853 - DNA, 1192 bp, Bovine  19866881079736
  misc_feature (1)..(1): n is a, c, g, or t
nctgtgaggggtcgtcccacagcttctcagtgggctctctggggtcactgaggggctctcctcccgtctggctggcagaagtgtgacccacacccagggagaggctaagagagacccgggcagaggtgactccaggccacttggcatacaggggaatgaccgcaggccagggccatcacttgctggtccagactgccccccaccagccactccctccctacctcgggtctacagggccagaggggaaccttcaaggtcagggggctcccctgtgccccacaggtgggcccgtaaggagggccagtctcacggcctctccactctgtctctgcccgccaggcatcgtgcgcgcctccagcgtcttccccatcctgagcaccatcctgctcctactcggcgggctctgcatcggcgcgggcaggttctacagccgcaagaacaacatcgtgctcagcgccggcatcctcttcgtggccgcgggtgagctgtctgctcgggtcccactgcacgcagtgctcccccgggggtggggggagcaggcaggcagacggtaaaatccctgtgggtaactcacctcagcagtccggggggcgggcagggagtgaggagcagaagcccagtgggtatcaggcctccttctggggtgataaaatgatcaggaactagatacaggtggtggctgtactaaatgacattgaagtgtgcacttttaagggttagttttatgttctatgaactccacctcaattaaaaataataatagctagtccaggtgtgcaaaataccacagaggagcgccttacaagcctgtctcaggggagcctggctcaggcgggggtcagggagggacacagaggcactctcagaagccaagccctgaaggagctgcccacgtaaagacaggtgaggggcacacggccagagagggtgcagcagcggggaagccagcatgcctagggcagggtgagcgaggaggcgaggggttagggttagggatgaagcctcccctgcccatccttactgcccgtgtctcctggccaagagacaccactcccttcccggcggctccaaaatggcttcacactcgcttgtctgagcccggctgcagacagcatactatatgccccgttgctgcggacgcggagaagacccgtccggtggagaacccggtgggcctgaggtgctggtgtgg

SEQ ID NO: 32854 - DNA, 813 bp, Bovine  19866881086697
  misc_feature (1)..(1): n is a, c, g, or t
nctgagacgggccccagtgtcagacacaacctcactgccttcaggaagcagtcatgtctcagggaggccctctgggtatgtgatccagcccatactgtgtgtggagccacccggcctcatcccacaatcactgaacacacagtcccagcctccccctccaggaagccctccttcacctgctcagcctgcagccatcgcctcctaccagttgcccctttaaccagcatttcccgactccacgtgtgctcagtcatggttgacctcggaaaccactgagacacttgacagattcacaggtgccaggatgactgtgagggggacccaggcaagggcatgaaggcaggacggtgctctgctcccaaatgtctgcaatctctccccaggggagatgctgttgagttgggatgtaaggaatggagggaggtttcctcagcagacagagcagccacacgggccggggtggggacagccttccacttcacgccgccctctgactttcaggcagacaccgtccagggcaggcgtgtttctccagactccgggggtgttgggtgccccctctactcacgcctggggtttgttctgtccccccagcctctcccccgtgcccgtgggctccccgacccccgctcgtgtccacgtggagacgatcccgctctggcgaggggcgtgctcctttcctcccctctcacataacgcctgtcaccacgttccggcagccccagttgctctctggtgaaaataatagataaataattcttcacaaaactaattagcagataagaagatgctaatgtgttttgccaactgtgt

SEQ ID NO: 32855 - DNA, 1172 bp, Bovine  19866881094548
  misc_feature (1)..(1): n is a, c, g, or t
ncatgtggcccctccctcacgttataacctcagaatcctaggcatcctacgggcggcttcacccccgagttccttccttcccttctcaaggtttcacagggactctgaacacatcttagaacctctgctcggtgaggttttgccgggagaggccgagcagggagaggagggctgggctctgcccacgcccgaggctggaggacctggccggccggccatccccagagggctctcagttcacagatgaagataatgatactcatttgagggctgccttacgccctgtgttgcatatacaaaccagccttaatgggtatttaaaaaatttcccacggggaaaataggccctgtgaaagtgccagcattcacctgtcacttcctcccgggaaagggagaaccgacaggcctgccagcggcgccagctgccgctcaggttagaagcaccaacgcttctcccacagctggcaccctcagacctgcgcccggggaggggtgctgcccgaggagtcgagggccggcgggctggggcgcggccgggacggagggagcgctgtctgtttctttgcatcaccctgtctggcatccacagcgcagccttcatcagaggcgcccggctgcagccaccttgctgagaagcacaacgtcagccattctgcaaagtcactctcccccaccctccgtcctccgaccgactcagaatacatgtcctggaaaactgccgagtctggagggccttttaaacccataaagccttcctttctcagctcccgagggaagggtgtgtgatattaggggctaattgtgctcaacgggatcagcttcactcatatggcttcccttccttgcccatttctgagggagagtctagaaataaggttctagaaataagagagaatcaagatgatggacagatggacagaaggggcgcaggggagaggcaggaagtgttcacacctgcagtttgggggtctggtctctccagccgtgacctctctcgagctcttcggtagggactcaaggaaagcggacacgcagtgtccagaaagtgagcttccctgtggcttggatggtaaagaatctatctacctgccaatgcaggagatgcaggttcgatccttgaatcacgaagatcccccagagaaggaaatggctacccactccagtattcttgc

SEQ ID NO: 32856 - DNA, 2666 bp, Bovine  19866881111002
  misc_feature (1)..(1): n is a, c, g, or t
nctccttgcagaaactgctggttgtcaaccccaatacttgaagtaacctgaggcccaaaacagctctgacacctcagtgtgttctctcgctttaacctcttcgactttactaacgggctttaccttggggggtgattgctgcggtttgttggtgtttcccgcgtgctgtgctcttagagcccggggtataaattcaggtgccagtggattcaacacgtatgtcttctttagttctaaagcctctagctgcgctttgatctgttcaaaagtgattccatgcaggctattgttttcatgacacagggcaataaaccgctcccaaaatttcctacagaaaagatttagatcagtttgcaattaaagtggacaagatcacagaaatgactgtaagcaactaaagataatttaggatcccctctcccactccaaccccaaacccttaggtccaatattcatctatgattcaggtataatcttcccgccagatcacaggactttggaagtgtggttctgaagctcagttacatctagtaccgtgggatatacaaattctcaattcattctggtggaccacacagtcagtgctcgactatgcatacaaaaaggtttgttatccacacaataggcaaggatttcagaactgataagaagtaactaattactaccatacttttcttttaattaactgatgcctgtcacagcacagcttataacattaattgactaagttaaaagagttaaattatgaaaaatacaggaagttggaatgctaattttaatgattatctcctaatcaaattaaaaaatactaatggagaaaaatacattcaaaattgttccagtcgtacactgttgtcctaaagttttgaaaactgatctccaaatagtaaaaatattacatatatattacaaaagacaacatataaaaagtttaaagattttaaatgattattataaatatgcatcagttcactccagttcagtcagtcgtgtctgactctttgcgaccccatggactgcagcacgtcaggcctccctgtccatcaataactcctggagtttacccaaactcatgcccactgagtcggtgatgctatccaaccatctcattctccgtcgtccccttctcctcctgccttcaatccttcccagcattaggatcttttcaaatgagtcagttcttcgcatcaggtggccaaagtactggagttttcagcttcaacatcagtccttccaatgaacattcaggactgatttcctttaggatggattgattgtatctcctggcaattcaagggactctgaagagtcttctccaataccacagttcacagttcaaaagcatcaattccttggcactcagttttatgtagagtccaactcttacatccatacctgactactggaaaaaccataactttgactatatggaattttgttgccaaagtaatgcatttgctttttaatatgctgtctaggttggtcatagcttttcttccaaggagcaagcatctttaatttcatggctgcagtcaccatctgcagtgatttgggagcccaagaaaattaagtctgtcactgtttccattgtttccccatctgtttgccatcaagtgatgggactggataccaggatcttagtcttctgagtgttgagtttcaagccaactttttcactctcctctttcacattcatcaagaggctctttagttcttcttcactttctgtcataagggtggtgtcatctgtatatgtgaggttactgatatttctcccagtaatcttgattcctgcttgagcttcatccagcccagcatttcacatgatgtactctgcatataagttaaataagcagggtgacagtatacagccttgacattttccaatttggaaccagtctgttgttccatatccagttctaactgttgcttcttgacctgcatacagatttctcaggaggcacgtcagatggtctagtatttccatctctttgaagattttccacagtttcttgtgatccacacagtcaaaggctttggcatagtcaataaagcagaaatagatgtttttctggaactctcttgctttttgatgatccagcggatattggcaatttgatctctggttcctatgccttttctaaacccagcttgaacatctggaagttcatggttcatgtactgttgaagtctggcttggagaattttcagcattaccttgctaacatgtgagatgaatgcaattgtatagtagtttgaacattctttggcattggaatgaaaactgaccttttccagtcctgtggtcactgctgaattttccaaatatgctggcatattgagtgcagcactttaacaatatctttttttgaatttgaaatagctcaacttgaattccatcacctccactagctttgttcttagtggtgcttcctaaggcccacttgacttcacattccaggatgtctggttctaggtgagagatcataccatcatggttatctgggtcatgaagatcttttttgtatagttcttctgtgtattgttgcctcctcttcttagtatcttctgcttctgttaggtccataccatttctgtcctttattgtgcccatctttccatgaaatgttcccttggtatctcaaatttttgaagagatctgtagt

SEQ ID NO: 32857 - DNA, 1674 bp, Bovine  19866881136279
  misc_feature (1)..(1): n is a, c, g, or t
ncaactttaacatgcatcacacaagaagaccgtttttattgttacaaacctaaaccagtaattttcttttaatatgagaatggaatataggctcaggttttcgttactttccccgcaaagctgaaagcagttcgctcgccttagaggttttcctttcactgtgttctgatgtgacgttacctttcattaatcccttccagctaagcaagatttaattaaaaccatctcacgtgatggcagccatttatgtatttaaaaaaggagctctcagaagcttggctgcctgtcttccgctctaaatgaagtcaaactattaaatttagtaggctccttttttgaattgcaggtttgttacgtaatggcttttaccccattaattttggacaacgggacttgtatgcacatgttccattttacatgactatgagctgaatttgaaatgatatggacttaagacttgagggtgaaaggaaattattgtttaagcaaaatggaaggtgatacctaagtatgtactttctcccctcagcaagcctgtgatccatgtggtgtgtgaacagggatgaccctgttttacacgtagaggtgacagccggtcccgaggatggggtggagagctgggctctgggggtgaggccctggtttccatccctggtgctgatgctgaccctttgcacagagacgtgaaggtcggaggagcccatttctaatcctctgagatcatgtgagtccttggctctgaaaactcattttttcccgcgtctcccctctaatctggcatggactttatgtagaacctaatgaaatggaagtaaatacttccttggttttgcagccaggtccactgggaacaaaaaaagccgtaaatctacgtaagcaagactccacgtctgtgcatcttatttataacgtcataaatctcactccaggttgatgcataatttaaattatatcgtggtgagcctgggatgctacagtccatggggtcgcaaagagtcagacatgacttagcgactcaacaacaacaaagtgtgtgtaacttagaacttgagattttaaccgtgtttacacgcacagctcgggggacttagtgcacacagacggtacaactgtcaccaccaagcacttccaaaaccttttatctttccaagcaaactctgtgggcttgaatggagagggtctccctgctccctcttcgtaatcagcaaccccccgcccccggggcgggggtggggggagcaggttccttttctttatctcatgtctgagtccttgaacccacctggatcactcaggggggagcagctctctgggggcttttgctgccccttcagattatattgttcagtgcgggcctgattgcaggatatgactggactggggattccaggtgtacagtctatgcagttcccgctggagagctgagcgcactggcaggcacagacaccagcctgatctgtaggggtttatcagctgtagcctggactagaggaagcgctcgaaggctggcgcgctgagcagggactcagcatgctccgtgtccgctccacatagcgtctctgtaatgaaccgtggagaggaaacgggccctgtggcccttgtcttcctcattccgcgagtggagccgagtccgtgttggggagagtggctgatgggcctggtcttgaacgtccg

SEQ ID NO: 32858 - DNA, 1357 bp, Bovine  19866881157797
  misc_feature (1)..(1): n is a, c, g, or t
ncccactctagtattcttgcctggagagtcccacggacggaggagttaaacactcaaaactagagtaccaagaaggctccaccttgaagtatcagaagagccttgtggtgcccccgggggattcttgagggttccaggggccacctgctccttctggaagcctgaggtacaggatcagcggagcaggaatgcctacatagcgtcttatgtttgagctccgtgcacaggactcttttcagggtgtctttgctgctgctgctgctaagtcgcttcagtcatgtctgactctgtgtggccccatagacggcagcccaccaggctcctccgtccctgggactctccagacaagaacactggagtgggtcgccagcgccttctcccggggtgtctttagttctccgcaataagactgacctttagtcctctccctgtcttgcccatgtaatgtcagctggtgaggaatgccttaccaagccaggcgtatatttgttttacgcagaataatatttaaatatttgaggataggtttaaaatatcaatcacaggttcttttaaaaacaacaacaaacaaaagcaatgcacgtaagcctccttggagataaagagttcgctgaggaaaagaacattttctgaatatcataaactcagccccacaaattctcaggaaggcataagaaattctttggcagaaagaatcccgattaaaatgtgtatattgcttgcctccgtgtacataaagtattaattagtccctggattttgtttgctgttaacattgtaggcacgttcgggagaccaggcgggggtggtctgcctcagttgcggctggacagacatggatggagtattttagggatgtgtcactcacaggagcctgtgctgtgagggacatctgctagcagtttctttatgtcaccgacgctcgatagcagagtatcgagttagagggtggctcagttccgcttctgttcacgcaaccaaaacacagagcgggggtggctccgggccacgcgcagcctcaccctttgccttctcgacttgcagcctgtgatatgaacgtgcacaagcagtgcgtgatcaacgtgcccagcctctgcgggatggaccacacggagaagaggggccgcatctacctgaaggccgaggtcacggatgaaaagctgcacgtcacaggtgaggcgctcccctcggtgtggctgggccgcccgcagccttcagaccaggagaggccggccccgaggccgggatggacgcggagccgctggctctcgtgcagccgtctcccgggttcacagacactcggcgtccagcgagtcatgagcgccgtgtgagaagggctctgagagcaggctgtccc

SEQ ID NO: 32859 - DNA, 1685 bp, Bovine  19866881204063
  misc_feature (1)..(1): n is a, c, g, or t
ngtatgtgtaaaaacagattctcttctgctttgaagattttgaagtatttcattgagtaatgtttaagatttgatattttcatgtactgatttcaatggtgattttaatatgaaaaaactccacttcgtggtgatgactaatctgggtgctttcctggcatgacgggtgtgcacgtgagcatggtccctgctcacgagtggtggcattgctgccactcccttgggaacactgataatgccctttgaaagtgtgtgagtgttttcagtcaacagagagctatattttaagaactataacacataacacacattgatcgaaatgttaagcttggataaattggaaagctggacctctgtctcctacagtgtttttttttccccttcattagaagattttccttagaagagactgactagaatgctctttggtgctttttcctgctttcttttggtcaggaaattgattaataagattcttgctctttgggtgctcatagactagaaatccttttcttcgagattgctgccgttttctagagtgagtctaggagtgagtgggagaagggttcagtgtgcattctcacacactcttggtgagagttttgcacagctcagtgatttggataatggagtgcttcaattatctaaatggggaaggagggctgaggtgtttaacgtaaattaaagttcttttcctgtttgttcttttgtgtcaaaactttttcaaagtactagctatttttgttgtaaaccttacagaatgtaaatcttatctacttctgtaacatattggacacattgaaccattcattgaagatacagtgacctctctgtaaaccttgcttcatagaattgtgcaccttgggagaagactggcctttgagagatactgagtgcaatctttactacctgtagatgtttaaaggttgctaacaagccctataataagtcgaataacacagaagggcccctgcccctcccccaagaggaggtcgtgacgttagtgtgctgcgtcttcttcacctttctctgtagtgagcgcaaatgctcgtaatacatgacatacgtacatgggctttttatttaaaaattaaaaaagaattatgtgatcataacaaaattgcttgctttcttagcaatatagatcatggatatcttactgagttaataatgcatcagctccagctcctataccatagtccgtggtgtagatagccaccatttattcagctgttcccatggtggtgggcgttcgggtggctctacttttctagtttgtcacaattcaccctgtaataaccatacattgtttctcactgctgcctttgtttctgtgtggtagtcttaaaagttagatacctggatgaaggagttttaaaaattgaatgtctgggttaaaatatacatataattttaatagacactttcggattagtttcaaatgcacacatttttaaatagttcagaaaaaaattagtgaagtaaatatggcaaaagatggcaacctaagttttaagaatatgaatgcttattatactatttaccctagtttctcattctaaatttttcataatttagaaaattatgaaaaattttcatatctcatttcaccatcttacatatcagcaatatgtgagaatgcctgtttcctgtgatctcagtaactggaaccctctcagtcttga

SEQ ID NO: 32860 - DNA, 2716 bp, Bovine  19866881226809
  misc_feature (1)..(1): n is a, c, g, or t
ntcttgtttagggcgttggggagggggtggggggtaccatcccatgagagtgtgatgagaccgtggttattggtgggcttgttgctgcaacatttgtcaccgttcctggcacatcgtaagcagtcaaccagcactgagtcagccagcgagcgagtgtcacagctgtagcggcccctgtagtgaagaggagacaagagggcacaagagcagcagggaagcttgacgtctagggcgtcaagccggctatccacggcagatggctgacagatatgaacgagcgcggtggaggtgctggagcagagggctgtgtctccatctcagcaccggtttgctttaactgtgttgatcagacccagaccgagcctggtgttccagcgccagcaccgctgtccagcttacctgttctcaaaatacccccttctccttagcagctgtatatgcgtccgtgtatagagacagacgtgtgcacatgtgtgcacgtcagcgtgtgagcacagtcgtcagtttgtgagatcagttaacagtaatgaggttctggtctcttctttctatgccacccagatttttccaagcatgtactggccttagttgaaaaaaagaaaaaaacaaagatgctgaatttaactgttgttgtttaatctgctacttatcaatgataagtgaaagattgctcaataaatcatttggaataaactcattagtaatttgggagaaaagtgaatttagacactcattgtataccatgcatgaaaataaacttaagagagatggaaggttaaatataataaagccgaaccaaggaaaaaccaggaaacagtagaattgaagaaggctagtgaagacctcatgcaaatttaaggactccaggagacaaattggcaaaagaattcaaaaacaaagcccacaatagagggaatataattaaaaacaaacagaaaatgttctgacaaagatagtaaagttaaaaacaggaaatgtcattactcgcatatttaattagcaaaaagctcttttaaaaaggcaacttatcagttgctggtggtgcatcagcagtatttctccatgtttaagactgcatcgtaaactcttagctagcacagggcaatatatatcaagaactctggaaatcttgtggctttactacttctagaaatctaagaccagaaatacagggtttcatatgcatgaatatgtccatgcatgaattcatgtatgcattcacttgaaatttattctaaagtcatggtaacatgtctaaattcatctaatattaaatgaaaagtaagattttaacatatgtataacttaaagagagacacattttaaactgtcaaataagaaatacactggagtgatgcatgatcgagtggtggtggttgggattcttggaaatttttttcttcattttcttactctgtaacgcagtttttaagaagcatttaaaaccagttttataaacagactctgagtccctaagagtgtgttcctgagaacaacagtccccactcttcttggcaccagggacacttgtgtggacggcagtttctcccgtggacagggttgccggggtggtttttgatgattcaagtgcattactcttactgtgcactttatttctctgatcaccacatcagctccgcctcagatcaccaggcgttagatcccggttggctgagggttttgaccattttcatgtgttcattggtcactatatggctcctggaggaacgtctgttcagagccgcagctcatgctatacttggggtgtttatcttttcattgtggagttgaaagagtacagtacttattttgttttaagcacatgtctccatgtgaatagaaaatggatgaataaatagcaaatgttttaaacaccaaagagacacaagaacagagcgattgccctgtggttctgtgtacttggagttttaggagcgtttggtggttggagaaatctgatattgattgtgtcaatatagtaaatataacatataggattctgaatccttttatagcctattaggggtaggtactgagttactgaagggaatgctgagttagtggggtaaccgatttactttgagaacattttaagatttgtgaatttttcataaaagtgttatataaatttgaaactcacacgtgcagttgagactatttcactgattctgttaagggttttgggaaactaagttatatggaagctcaagagataagtgtctcatttgtggtattgtgaatttttccaggggaagaaaacacttttttttcttacaaacagttgcaggaaattgattgtttctgtctttaagttatcataattgcgtttcttcatcacaggccttgtaaaactatagaggatgtatgaagtcatgtttattcatttggtattttgaacataagtatcctaaacttgattatgttaatttcagtagaacataaagttgagaattaggcaaatatacataagtttcaattgtgtacaagggattgcttatagtccaggataaaatcgaatcttgtccccaaatctaattagtggctgtttgttggtatatttgatgtacgcattttctcacctcagtaacagatgaaattcagccttggttcctggagttctcagccagtgtcctggaatctggtacagtctcaagagttgagtccagtggtcaggggcagaactagaggtcagctgcatagcagtctacaggagaga

SEQ ID NO: 32861 - DNA, 1305 bp, Bovine  19866881238279
  misc_feature (1)..(1): n is a, c, g, or t
ntaaacggattttgaaagctaccatcctcttttcccaagtctttggcaccaagataaaaaggctttcgatcctacatacaggctgtatgtgtgactgtatccaacacagggggaaaactaacagttcttttgccacctgccaagtcttcacagtgccataaagaagaaagcccacgctcaacctgcctggaaggggagaagccaaggaggggtgtgcagaggtctcccaaagtgccgtcttcccctttgtatccagaaagaccttaaaagagccccagccaaagagactggagctgagtatgttctagttaacatcatggataatgcattattcatggatgataaaattctcatcattgggataagaatgggcacccacatgaggcagttctgatcttccttcgactacatacagactatgtaagtgaaggattactgaatttttttctccacaggcacgtgtaatcctagttgccgcaccagggattgaacccataccccctgcattggaagcagagtcttaaccactggactaacagggaacccccgaggactactgatttgattagaagaaatattggaaaatatgtctgaatattaaggcactaagtgcttctctggggagaaaatatattaaatgtcaggaaatgcaatgggaataaaaacacaagtagaaaattgaacggattcatgtcgtgggtctccaggaatttagaaatctggctacacattgagattttttttgctccattgcttctggctgcattcagaggcgtgctgacaggccgtgacttaataattcctgagaatcttcctttgaaggttttcaaatcgcatttaaaacaaagcatgccattaaaaaagactcactgatcactgatcaataaaatatattcctttccacagagagcctttttatagctccaatgtgaaaagcattgctttcctgctacccccttggggatcaaaggcagactgatgtcaagcgctcagaacacaaagggaaaaaaagtctccgataactttgtgctttatgtacagccagaggtggatcattctggtataaaaggatttttttttttttttaatgaatccattgactctgtaatgcaggaaaaaagagggtcttccctttctcagaattctcctgatcccatatttaatgtcaaaactagaaagtattcctaataaggaggaaagactgacttcactcttagctctaaaacacgtactgaatccacaaaacttgagacaaggatgcagagaaggctccacgagtctggcacggcaacttgagatgatgtt

SEQ ID NO: 32862 - DNA, 1379 bp, Bovine  19866881288992
  misc_feature (1)..(1): n is a, c, g, or t
ntaaaataagacaattataagtgttttagacttttaaaatgaaaacataaaataagatgattttcgttttaagattcttggccttgttcttctctcttattaccttaattgaattagcagctttacatctgataatcatacacaaatatatgtaaagttttatttttgatatttataatcctgttctgtataaggttacaaatattatttgactctcattttgttaccatacttttggaataagtgacttaagttttgtttataatttctgtgtaaccagagtagtagtatttttggttagtgaactggtactaataaaaaaaaatccatctagaaaaagctaacagtgttactcttatttataattacacttgatatacttaaaaatagcaacaatttgttatttaaagattgggctgagctgatatttaacctgtaagtgctagtggattagaataaagacattaaactaaagactgactaatgaaaacagagagacaatacatattcttcagagaaatttcaataccaaatcaatatttgattataagattataagaattctagcaatgtgaaatgtgtctgctttccctgaaggtctcagtaaagaccttcttgatgttgcctttctgtcttggggtctgagcatataaaaagggtgttttcaaaagtacaatacgttggaacctaaaagccacagtggccgattttcttattcttaccggctcttctgatgagggtgggcagttcaccggcacccctccccgctccccgctccaggctgagagcaacagtgtcagcacaggcatctcctgccgctgcaggctgttgcagacgcagactcacagatatacgcgtgtctttccctttcagcagttacagatgctttaagctttatctcatcactcaaacatcttcctccagtttttcttgcgtatttggtaaatttattttgataaattttttttagaggagatactttcaattcatacttgaagtgagtttttagctcttttataaattctgtgtaattggaatcatattttaagggctagtatgggactgtaccatttaggtcttgcttatagaatgttaaaggatcatttaatacatctttttggtgggtatagagtctttataatgtgaataattatgtcctgatttatttgctagcttctacatagtcttaaacttggtccttgttttacgaaaaaaattgagttgtcttcaaaaactatttagtaagtagtttgagaatcagaaagctttttcctggtttagttccagcccagcctcaaaagggtccaatttaatcagtaacatgtaaattacggtgatattgcttcagttatatccaattagcatttatgacattcttt

SEQ ID NO: 32863 - DNA, 814 bp, Bovine  19866881471965
  misc_feature (1)..(1): n is a, c, g, or t
ncatcttctgtgactactggatacaaatgcttcagaactgatatgtcagcaatcctgttttctactctgtattaaaagattccttctctctctttcagaaattataaagagctctgatgggctatttgggtaatacccagtgcagtgaactgcaggtgagtaaggcttgggagaaccttgtttagaaagaaagaacttgatggtgcgtgagaagagtcttaaactagaggagtgtctgctcaggaggaatgaggtgggacagcgtggagagagcagggctctggcgcagcagttggacctggagcttcgggtactgatgggatgatggtgaacagaccacctgactcttcgtcagtgtgtttgaagagaagtgaggataggttaatcttacacttctgttttgaatgagtaaccgcacaggagttcaacctatctgcataagattggatcttaagagtgcttcaggtttcatgtcaacattcttgagtggtagtcaccctgtgctctgatgagctggttaagtattaaattgtttgtttttcctgttatctgctgtgtgcgtgcgtgttgtcatggatgactgtacatgtctgcatttttgaggatctaggtactgagaacagatcagtggaacgaaggttcaactttttttctaatggttgtgttcactccacacaatggtggttttagtctttcagattacttattttttgctgaaatgccctaagaaagacaatttagtcttgagtattatttcacagtaattagtattcttagtctgttatagtatctggccattcagtagtaaacttag

SEQ ID NO: 32864 - DNA, 1147 bp, Bovine  19866880066246
  misc_feature (1)..(1): n is a, c, g, or t
naagatcatggcatccggtcccatcacttcatgggaaatagatggggaaacagtggaaacagtgtcagactttgttttggagggggctccaaaatcactgcagatggtgactgcagccatgaaattaaaagacacttactccttggaaggaaaattatgaccaacctagacagcatattcaaaagtagagacattactttgccaacaaaggttcatctagtcaaggctatggtttttcctgtggtcatgtgtggatgtgagagttggactgtgaagaaggctgagtgccgaagaattgatgcttttgaactgtgatattggagaagactcttgagagtcccttggactgcaaggagatccaaccagtccattctgaaggagatcagccctgggatttctttggaaggaatgatgctgaagctgaaactccagtacttggccacctcatgcgaagagttgactcattggaaaagactctgatgctgggagggattgggggcaggaagagaaggggacaacagaggatgagatggctggatggcatcactgactctatggacgtgagtctgggtgaactccgggagttggtgatggacagggaggcctggtgtgctgcgattcatggggtcgcaaagagtcagacacgactgagcgactgatctgatctgataaatataaatgatatgtaactatgtgagtgtgaatcgacttgtggttcatgtgttgacatagctatatgttctagacatttaattaaaaattcattaattttgattttgcaattttctttgtatgtattgtggccaatattcttttcccccaccttggggttcaaatgtttacaaaaggccctgaagagcttacacgtttttccatcatgtgccatgcctaaagtgctgaaaagatacaaagatgatgagtctaggaaggactcaggactccgcttttttaacaagaatgccagggtgaccctagaggtggtcctcagaccacaccttgaccactggccttcagaggagggagggtgatccccagtgcgattctgcattaccactagttgggaagggaaggccatctgggctggtggggaggaggaatgaaaagagctttgctgcccctggggaatatccccagactccagagaagc

SEQ ID NO: 32865 - DNA, 3713 bp, Bovine  19866880195227
  misc_feature (1)..(1): n is a, c, g, or t
ntcgcttcagtcatgtccgactctgctcgaccccatagacggcagcccaccaggctcccccgtccctgggattctccaggcaagaacactggagtgggttgccatttccttctccaatgcatgaaagtgaaaagtgaaagtgaagtcgctcagtcatgtccgactcttagcgaccccgtggactgcagcccaccaggctcctccatccatgggattctccaggcaagagtactggagtggggtgccattgccttctccccaagatgatgatgataatgacaacaatattaaacagtcaccaccacaacgtctggccctctgcgtggccctgcaataagccaatgccaagatgctgtaaaaagcatgtctgggttgaagtcccagctgcagcactggctggccacgagaccttggctgctttactaacagttcaaccctcagctttctcacctgtgaaatgggaataaccatgatgccatcctcaaacatttactgtgacaattatatcaaaagcacctgtcatagtaaatggcacttggaaggtccacagagtatgtgttatcaccatcagagtgagatttaaaatactccatatctgagataatatggcagtagccaatcacctcagaggccagccatgagcaactggtttgatcctaacaggacataccagctatcagtcctgaacattagcattatttccacccaccaggtactaaggtgagcactgggcatgcactatctcatttaattttcacagcgcgttggctttattatgttatctattgaaatacatgcaattgcatatttgcaaataagactgtgcctataaaatcagttctaggtaaaagacttaacatataccttcctactgccctaatgactcttggcatgtgaatttcaggttgctttgtctgggggttttttgccttcattatatagttctttcttttacttaatgattctctcaatagtctttggaaagcaaggataatggtcaatgatctcagtttcttcatccatcagataggtaggcacaaacactatcctctctttctgagtctccatcactccaccctaaccaaccctgggaaaaccaaaggcttctcaagccaagactaagtcacacaaattggacgtcagacacttctgctaatccccagccagcacttcaaggtctcaggtctcaggtccccatttgccttgctcttgagcagatttcaaattcagcctccaatgatattggcttgaagcagtttgtccaacatccccttgcaaacctcgcttgccctgttctctcctctcctccctcaagagctgtgctgcattgctgcctcctggagtttatttgactttctatcacccacgtgatgaggtttccagtgttattaataagtgactgcttattaattagtattattagacatgcgttatgcagcacagacagtaacacagcgtatccaagaagagaagttatacagaaagaggtgaacctgcagcccagcaagaggacacagggccagcacggagtccagtggagtcaagaggaacccttcccaaatcggaaagccgagcacctggggtggagaaccgcttgtcatgggagggagggagagcacgtgaatgtgaggttcacagcgtgtgaggacacaagcccaacgggcagcctgagcattcaggccctgagggggccagttcctatggaaccttcctaactccaggcatcccttccacccggggtatcagccattgccacccctgccagcccagccccgacaaggctgctggaaaggccagctcccagaagggcaaaaagtctctaacttccagctccagtctactctcattttcttttctggcttattccatgggaaataaaatattctcaggcacctgcagcagtggaagcctctcagccatttccccgaattcagcagcccaccactagctgagaggaaccctcccctcgggacagggctgccagcaccagcctggggagatcccaagctgggatgcggaatggcacacctgggctgtgtccttctttcccctgagcaccccggagccagcaacctggctagatccacggcaatagaacatctcaaccaaaaacttcacaagagaaaaactagaaggaaactctttcctcccacactgatcattttcagagcagttctagaatttcctgcttggggatcacattttaacatgggccgggtatatttggagtgtttaatggggttgaatgtttgagtggcagggagttacctattaatacttgatggctgctttgaaaaaatcatcatttgctccatttatgatggaagttcttgtgtgttttaaacttcattcctcccaccagatagatatgagcagacagctggcacagccacttttagatgaagtgtcgagagggcaggacccacaattcagcgtggtgtagtggcaaagggtgtgaactccagctgcacacgacacaggctggaatcccactctaccgcctgcaagccacaggaccgtgggtaagatgcttgacccttctgcacctctgtttccctttctatgtaatagcaacaagatagacctgcctcatggagtctgcaggagggttaaatgagctaatatttttaaagtactcaaacagtggtagtcatggtgtagaggttatataaaagttaatcaagtaaaaaataaaacaacttcccatgggcgctgcttcccaggttgtgcttcagtcactaaatcgtgtccgactcttgcaaccctatggacagtagcccacccggctcctctgtccatgggattttccaggtaagaatactggagctaccaagggacaaatgtgtgtgcgcttagtcattcagttgtgtccgattcttttcgaccccatggagcttccaccaggctcctctgtccatggaagtttccaggcaagaatactggggtaggttgccatttcctactccaggggatctcccccacccagggatcgaacctgcatctcctgaattggcaggtggattctttaccactagtgccacctggggagccctaacttcccaggaggcccttgataaaagcttcacaacaatggcagtggtgatgtgctgcttctggaatatctcaggatcgtgggcaggaaagatatcccttctgctatcattcctggagggtcagtcggtcccagttctgatgcctgttgccccatgtccttccccagcccctgcttcccatcctatctccctctccctctgctgggacagtgttcatatcatccctgcccccttcaactgtgcagcggctcagcctaagagcaggcaggggcggcagcgccaacactgaggattttgtggaatccaaagcacgccccatccccatcttcatccccggcaaccattctctctgacccacgcactagaactatttttaaacaatatacttttgcccggttgtggaggggaaaaaaaaaaaagaaaagaaagaaagaaacaccctccccaggattcaagctgaagatggaatgattgccaaatgctaacagcttttcaaacaggacgcagttaaaaatacgtctgaaatggttttaactcaaattcaaaaaatagcttaaccgactggggagctgtaggcagtgggggctggggaagctgaagaggcaacgggattcccttcggaggggcctaaggcaaaccttgccacagggacacagggcg

SEQ ID NO: 32866 - DNA, 3455 bp, Bovine  19866880415065
  misc_feature (1)..(1): n is a, c, g, or t
nccagggggccaagccacccccaggaaggttggcacctccaggggagggatggctcaaagaaagaaaactctttctccagcagttcagggaccaagcccctctgcagcaaaaccaaacgtctggcgagttagatgtgccctcggtgggctaagtagtccatcttgaccacaagaaaggtgaacagaagcaggtggggcaggtatccaacccaaaggcacagacggagagcgggaaagcagaccgtggtgccttccccctgggaacggctggaaaccctcccgggacgtggcctgaggccctgagacacaggcttcacaggagaggacttccagaggtggagcatgacagtgccatagacagggatcgcggggctccacggggcagaaacggggcaagcgggtggagacacgacggaagaatgaggggtgaagagacccctcagccgcggcaggggccaccgccgggcagggggcagcgcgtccactcagtgtgaagcaggcagcagccagcagagcagagcccagacccagccagtgagcctcagccccttcaggtgcagaacgagctcctgaaggttgatcttccataagctgacggcctccctcagagagatccgggcccttctgaagagtgaacgggtcttctgcttcttgtgcctacaggaggggcgcgaaggaagagagaagagacgcagagttgagacgagcagcgtcacttggaaaaacggaaggtggtggctctgccaagtcaccactccgcctcccccaggagacaacggctcctggtcacgcgatcagaccactgcccaatccgggaccagaggaactcagctggtctacaggcgttttccaggtaagtggggtaagtaaaagcagatgttgcacacctcatcaaaggcctggaggacccgctgggtatcatgttccaaagtttctctttttccaaaagtagagtttatattcatcaagtcagaatcccccagactcaaatgaaagagctctccctaattttctgaggctacgaatcacctggaaacctagtcaaggtggtcctgggaggctggggccatgatggattccacccagctcaaggccttctgcaccaacaaaaggacatgatggaaactggtgtttatgaggatcacctactcaagacttttgtttgcttttttttttttagccataccacacagcttgcaggaccttagttccccaaccagggactgaatctaggccccagcagtgaaagcaccgagacctaaccactgagctgccagagacctcccaagacttcgtttccggaacctcagaggaagaatgaatcgtgttcagcccttccctaggcagtgtattttgctgtaactcagtatttgatagcgggtgcatgatgcatgtggtcaacactgccgtcacctgtttaccagaatgacccacttgctgcctaggatggaaggatggcttgaagctgaccaggccaggcctcccctcttgggtgcgaacactcagccagagcatgggccttcccatgtatatgctaccatccagtagaagagcctgggatccctattcctctactactgcctccctggggaagcacccttcccttcctcatcaacacctccaggatgctgaggcatctgaaaagacctgagatcctgagagagccagctagtgacacgtttcctgagtcacagccacactcacagggaaaagaacactggcctcgctgcctggcgggtgctggggacacagtcacaggaccaggcacggatgagatatgagccagggcatactgatcccaagtctggggactctcgggtgggactgagactatcagaaaatgctgcagactttattgagcgtacgcgtcacgaggaaagcttgcccaggaaggtgaggtcccagaacccacaattttaaccagcagaggtggctctcctggaccaccttaaacatagcccccaagtgtcagccagttccctggagctggtttctgcccctaacttcctgcagggagagctggagactggggagctcaggccgggccctgggggctggaggagaaaggggaggcgtgcagacccctggggtggatcagggagctggggtggggtggcagggggaggccggagcccacactcacgcggccagtgctttgatgcagcatcgcgacatgttgaggaaagagctggcgctggcgcgggtgcccagggcggcctcgatgccccgcagcaggtcgttggtcttgaagatgagcagcatctggcgtggcacacggttgaggagctggctgatctgggggaggtagttggccgcgtggttgcggatctctgagtcctgaacagaaagaggcagcctgagtggggcggggggcctggggcggcagcaggcatccgggctgccagcgatcggaaggggctgtggggagggtccgggagggagggtctagcacagcggcctcagcagcactaggaaccttcccgggggagaagctcagcccaagtggtgttgtagccagacgaacctggtcaggacgtctcccccaacttccagcccagcaccggacaccacaccggagcctcatttctactgcctctgccgtcctagctccttgcagctgaggtcaccaatacccatcccccaagcccccaggccagtaccgatggggcagggagtctacctcccctcctcaccaactatctgatgggtcccgcctctcagcccaggggtccacctttgtgttattctccaaggctctgtgctggccaccaattttcaggccaggtcaggaatgactcttgggagctggtactggctgaatcaccagtactggctgaggcccccatccctccagccaaacccaggctggtgcagtcgagacctctgagatcctgaccccaaacccaaatccaaaatcctgccccacaccctgcctgacccgagccccaccagatctgtttgcacagccatagcccatcactgtcctccaggcttgacccagcatcagcccgcccatgcctaaggtcctcaggacctcggggcaggattcagggctagcccttgcccatcctggtgggtaagtttcagggtcagtttcccagccttccccatccctgtcatggttctgagaagataactgcctccagccagagtcctgagtatagagcgaggctctgatcccgtctcagtctccagggaagcaatgatggcgatggtgatgacaagagtccatgtgtactgagcatcactaaggaacccgggcactctgacatgcttgcgtgcgttagctcatctcatcttcacaacaaccctattaggtgagcgtatatccccattcgagaggaggaagctgaggcactgagaagtaaaataacctccccaaggtccacagctagtgaggcaggagtcaaacccggtcattcagctcccaagcctgcaccctcaccagcaggcta

SEQ ID NO: 32867 - DNA, 1318 bp, Bovine  19866880482963
  misc_feature (1)..(1): n is a, c, g, or t
ncatctcctcctcaggagatgttcctgacccagcactagagaaccctggaggggcccctgctccagagacaaccccccaccaagcccctccttcccgtatacagactcgctcccatcccttgcagtcccaaaccctgtgtttttaaggcgtctgcctctatcttggcccagctgtccccaaggtcagtcgcagacctcactgcctgtcctgtcgcctcccacacactctgatgccagatccacaaacgccctggtcttgaccgttcagcctggctgccccctcaccttggcccagtctccctgacgtgcatttgcattcggtgctcgtctgaggtgcggcgatttatagcacagggctgaggttattaaacccactggaagaggcctcacccaccaagaggtaaactctgcactgaggcttaattacgcacagatgttgtgatggggtgccagtgtgcaaagcaatctatctcctgtttgaagagctgaactgggtgcgcggcgcaaaatttgcttcccacttgttatgtgtttaggcaaaattaattactcgggagccttaattccaccattctcttaggaacggggtgcaggcttgagaagcagcaggtcaaatcgttacattaattattcacccatttggcatcctcgtttcaaaaatttgtgttattattacatgtcttggtctgacagatgctagttggccccagccaggggacaattttgctgtttccatgggaacagtggaggagatggttctgtttgtctggctcacagtactggcgccgaggaccacccctgctgggtaagaggcaacacaatgtccttagacgagcaccagagttgaagtcagaaaatgctgtttgtaccccagctcttctcctctaagactgccatctgtaaaatgggatgatggtttttggaaggaccttgtgtccctgtgtctgcctagtactcagagccacagaagaaacattcagtaacttctgcctatccccttgcacaatcaacacttcttggaagcccccactgagctccttatctgggcagaattagatacttcctcttgggcacccacagaaacagagatcagtctctgccatagtgccaacaatctgaactacagaacccactgtgtgtgtgtcccccaccaaatgcgaagtcttctcaggcaggagccaaccatctctggcttaatctacacacccccagatcctagcacaaccacaggctcaggaagtgctcgataaatgtggaataacggaatgaaacaaaaggaataggtaagcggaagagtcatttagacccgacaacaacg

SEQ ID NO: 32868 - DNA, 834 bp, Bovine  19866880591417
  misc_feature (1)..(1): n is a, c, g, or t
nagggaaaggaacccctttcatattggttccacgctgttcacaggaggtctcactgagtcctccccacacctcagggaggtaagcaccacgatcaccacgttcacaaactaaggttcagagagatgcaaagtttgtctagggtcacacagcatttagtcctagagcccgtatctcctgactgcagatgtcatgagctttctactacctcaatgatttgattttgttaaagttcattcgacaaatatttactgagcgactccagggtacatgccaggtgctgtgtttatctttgggatatagcagggaagtcaggacccggcactgaaggggctctgagctctggctcaggagaggcccagccccagcccctgtccaccgtccatgctgggagatgcgctcctctatgcctggagagggaaggcgtgaagcctcctccattctcctcccttctccctcttcccttcctctcatccagaaacaggcatgcccttctccctgaaaaactgctagaattcagctccagacgcactggctcggaactggcatgctgacccggtgcaaatgaagtcactgtagcccagacccccgctgggcgtggcagaactggccgcgagcaaagagacgataaagaaatctctaacatgtgccaagggagggattatcacatgggctcttgctttttatgaaataggaaaagtggatttttctagttgactgcatttgatcgtttttcctccatttgttttaaagttgaacatctgatctggcagagacttctcacattcagctgcaaaaaaagatgtcttttgagctactctcccagcctcccatca

SEQ ID NO: 32869 - DNA, 2398 bp, Bovine  19866880595276
  misc_feature (1)..(1): n is a, c, g, or t
ntcagatccctttccaattagccagtagaagtgagaaatagattcaatggattagatctgatagacagagtgcctgaagaactatggatggagatccatgacattgtacaggaggcagggatcaagaccatccccaagaaaaagaaatgcaaaaaggcacaatggttgtctgaggaagccttacaaatagctgagaaaagaagagaagcaaaaggagaaaaggaaaaatatatccacctgaatgcagagttccaaagaatagcaaagagagataagaaagccttcctcagtgatcaatgcaaagaaatagaggaaaacaatagaatgggaaagactagagatctcttcaagaaaattagagatgccaagggaacatttcatgcaaagatgggcacaataaaggacagaaatggtctggacctaacagaagcagaagatattaagaagaggtggcaagaatacacagaagaactgtacaaaaagaatcttcatggcccagataaccacaatggtgtgcaacgagtacacacaattaatgactatgcagatgatttatttaggctttgttattaaactcagtgatataagaagcatctttgggaagatgcttcttcaccaaaaacaccatatttggtgctgtttttgatttactgtgaaaaatgccctctaaactactgttctacctgtgatgtccaataaaagtactcttcattttaaaaaaaaaaaaaaaagtgaggctgctacttgtccaccataagctccaagcttatgggagaaaattccctgccttgctttgtagtgagtggttcatgttccttaaaaatagaagcagaagttttatgtttaaaagagtgcccctctcctgcaaatcactcacctttaaaatccatacacttaacccaatgatttctcgtggcttaacgcatttgcagaactctgcctttggatataatgttaagtcagattgatccacccaaggaaaccaaatttattactttatagtcagaggagttggtcggttctcctaaaacatattagccagtttttataatggagttacctaggcttggttctaaatgacatctggctgtttccaaaaataaaattcatcctttttaagaaaaatatttggaccactgagaatgttcaaagcaatgtgccacaacatatttttaagcagcctaaatgacagtctaaagcttattgcctcaattcaatgaataaacatgtatatgtcagtgtgtgtgtacatccgtgtaggcagatgcataaacaattaccaggaagatatacattagttttgacaggggtcttcttagggtgctaagattatggatgagctactttttaaattgtgttttcctgtactttccaaactttctgcaacaaatctatatcacttttgtaatcagggggaaaaagcacaataaatacttcataaatatagttttaatgtgccaccgatcctgaaggcaacttcagatcagaagttataacaatgcttggctcaggaaagcgtcaatggattaaatgccttgccttccacgctacaacttttgaagggcacaaccctcatttagatgtacaacttctattatgtctgctgttgtttctttaaattactctccattaacttagggccacactgtataatgtcattccatctgtgccagtggcaagctaagcacagtaattcagaccttacaatacgtgcagtcactaaccccccacggacaggcccacgacaaagcctgaattgtgcccaacgtcattctgctacatggggtcatggtccagagcaaggccccagtgaatttcctttgaaagcccctgcaccccactcaagaaacatttctaaaggagaagaagaaaaggcatgaccccatctgaaatgtaatctccagtgttctgtaacacaagatatccaagggcactggcaagaggcaacagtaacggtagctgtaagggcaaggtggtccaggcgtttcaaagattgtaagcgaatggaactgctgcctcttgtcggggaaccacggcttggagatccaaaatgctctatgatgtcacccttgattccgaccaccaaatgggatgacagaggaaaggcagcgaggtagggcctgacttgaccacactggcaagagagaggtaaggttcttgcaataaacaaattggagcacttggatgcctaagatgagctcttcaaatttccagcaaatcaccttttcttacaggaatcaaaatttctctctcttgttaccttgcatttactcaattcgttaaatcatctcctccaatcattctaatgtggaatcacaaggaacactcagtaataacaagaaaaagtcttaaatactcctgaggaaaaaaggggaatggagcaaagaaaaggagcgta

SEQ ID NO: 32870 - DNA, 1154 bp, Bovine  19866880631085
  misc_feature (1)..(1): n is a, c, g, or t
ntgccttgcaaatctatgtggatgggtgtcagagactatacaccaggctgttgggtgttaatattctctgctattcccaacgtgatttgtaagttttcggccactaaaacgccaagccacgggccatccttgtggcaataattctgcttctgtccaggaagggacttcttcctggggacctgttatcccttaagcataaatctgccttctttggtacctctccccctccctcctctctgagtaagcaagggacaggccaccagggtattctcccctcagatccaagatgtggaaggggacccgagagcgggctctcagttctggagtgggcctcctgggggcatatttccaggacaagaatcctagctccatagaaactcggaaagggctgtctgccgtgggacctaatccttgctttgcaaaaagaagatgtgccatgttggctgatagtctgcggacttaggcaacgagaccaggaattctgatcagctaagctgagaaatcctttctctttcagaaatctcttcctaatccaacatggcttgagagagagcagccacaacccaacttgagttctgcacttctcctgtacaagttatacagcaaaaaagcctacagctagtcctgagaaccagcactcacagcctcttgagggtgaaccctgcagtcacagagtgctgcagaaactcctggcttcccaggaactcaagagcaaacgaaccaataaaatagacttataatgtgcttcatatatgtagccctctgttctgaaaaatgtcttataacatgaagctacagcatcagcagtactaatctctggtcacaagagataggggcagtggaaagacagaccaacggccaagacccaggaaaatcatttcattttttttttaacgttcaagcacaaaatatactaatggaattgattgtcctattaaaactttcggtcactacttgtagctcagtgaaaaaattagtaaatgcaatgaactacataaactattcatttagtaaatgactgtctggctccactggggctgggcagaactggggcagcaggggttcaggaggacagggagtgggagcagatgctgaaaccaagatcatcatcaaggaggaaggtttgaggaacaaaagcatgaggcaactcggag

SEQ ID NO: 32871 - DNA, 4208 bp, Bovine  19866880647772
  misc_feature (1)..(1): n is a, c, g, or t
ncagcaacctgtgctttcacagtcacatggatacgcataccacactcctatcccactgtcacgagaagcccatgcaccacaactggagggtgatccctacccaccccaaccacaggaagcctgagcacagcaatgaagacccagcacagccaacaataaaagttaattactttttaaaataaaaatgcttaattatatgattattggagggcttcccaggtggcacagtggtaaagaatccacctgccaatgcaggaaatgccagagacacaggtttgatccctgggtcaggaagatccccaggagtaggaaacggcaagccattccagtattcttgcctgggaaatcccacagatagaggagcctggtgcgctacagcccacggggtcgcatagagtcggacatgactgagcacgcacatactcgttatatgaatttcaccgcaactttttaaaaacaaaagacaaaaaggctccctagacccaccctgggagaaggcaatggcaccccactccagtactcttgcctggaaaatcccatggatggaggagcctagtaggctgcagtccatggggtcgctaagagtccgacacaattgagcgacttcactttcacttttcactttcatgcattggagaaggaaatggcaactcactccagtgttcttgcctggagaatcccagggaccagggagcctggtaggctgccgtctatggggtcacacagagtcggacacaactgaagcaacttagcaacagcagcagcagcagacccaccctgaggagttgcccattctactgtgagctgttgaggacagagagcccatccaatgtctcatcccagccgcagggtctggggcaagagacaaagagcacagcgctggggccagagagacagggcaaagtctgctgttcactggcccacaatccaacagtgtccaggagacaggtccagggacccttgggagggcgttttcaagggctcccttctggatatgatcaccatcaactggaaactgtgtgtgcccagtcgtatctgactctttgtgaccccgtggactgtagcccaccaggttcctctgtccatgggattttctaggcaagaatactggagggggttgctattttcttctccaggggatcctccccacccagggattgaatctgggtctcttgcatctcctgcactggcaggcggattctttaccaccaagccacctgggaagcctgaggatcaccacagccaattggaaacagtaggtgggggaagaacagggccagggacaaagcattctaattgccccagcttaatgcagactttgctcaagtcctaaaatcaagcaggtgtcacctaccctgtgaaggatcatgcccccgccacaagtcacattcctaagggcccaacacaccggaaaggagaagggattccacccaagacatttcaaaaggatgcacttctctgactgtcctgccttcctttcttcactcctctgacccgagagaccccagcccagtgggaacatgccaacttctccaaagccaggagtttatttgcaatgtaaagacaatggtctccatttctctttctgacgaccttccagaatgttctgttgtcactggcaaagcccactgacaattccccggaaataaaaatagaatctggtaataaaaaagtctaaccttttttccccttggtgcttagtcttagttccatttgctcacaggtgccttaggcccctgtgcaggggcctccatccccacttctcaaaccagagttcccagggccagacacctcagctcagcgggccgtgtgcagaagcactgctcacaacactgcaattcaggatggcgatccgggctgtgtgacgacacctgggaccaccaggagccgcgagcaggcacagctgctcaggagaactccacctccctctctgctgccgagatccctataaagcatgcaccactcctggcctggtccctagggaaagtggggagcaagtgctctattttatatttttttggccataccacgtcataccccttgcaatggaagcacagagtcttaactactggaccaccgaggaagaatcaagtttacctttgcttctaaaccaagctcagtctcactctattggcctgagtgatgccaggcagaagcactcttgtctgggacctacttggggcatctgtaacactgcatccccaagagtccaatgtacaccaatgtcctctcctgtttagatgctgtttaagctagggagttggggaaagcaagaaggatgattacagagcctagggacctagacatctatagtggatacttgctggtggtccacagttgaaccaccgagcccctctttcctctcctaccctcagtccacatgacctagtagactcccataggcaaactttattcaacctaactcagctaccctggccacagtagattgaaccaagagtgagcacatgacttaagctagccaatcagagacctctccttaagaaatctagcgctatgagcatgagaactgcgtctctccataatgctctgggtacatgtataaatgtgagaatggagggacagccatgttcacagcctgtgatctgttctgtggtcagctactgatgaaagagtcccagatggtctacacatcctgacattcatgtccatatataatcccctccccttgattgtgggctggacctaatgacttgcttcttacagacagactgtggggaaaatgatgtcacttcttgagattaagttataaaaagctacaatttccatattgctccctttctctccagctcttcacatttgcttgctctgataataagcgccacatattatgagctgccccaagcagcacacgtggccaggagtcaaggactgctttctgccaccagctagcaaggacctgaggtccaacaactgtctaggaactgaattcttaccaacagccatgtgctgagtttagatccttccctagttgagccttgaggtgaccacaactctggctagccatctttgattacagcctacaagaagaagaagacccagctaagctacaccaggatgcctaacctgaaaactgttgataccataaatgatgttttaaggcattaagttttggggtaattggttacacagcaacagataactaatacatggtctgaaaaggaggagaaaggagagccacgctgaagaaagaagagaaagaagcagataaatatagagaaggagaaatgacagagggaaacttggtagtcagagatccccacagattggaatggatgtggggaaactcaccagaggcgattgctgttgttcgggcaagagatgaaggtggtttacagtgcatgctaaattgcttcagtcatgtctgactctttgcaaccttatagaccatagcctgccaggctcctctgtccatggcattctctaggcaagaatactggagtgggttgtcatgccctcctccaggggatcttcccaacccagggactgaaccaacagctcttacatctcctgcattggcagacagattctttaccttcctaataaaggaagccctagtttacagtaagggggaggcaatatccctttctgtgattgagaagaggtgaagggaggaaaatgatcagggagaaaatccatagatgagttttatttgaacatatggccagttaatagctcatgacataattgaactccgcaaacatgtattgaactgtgttggggctctttcagcactgcaaagatgaggaagatgagttccttgtccccaaggtgctcacagtttaggggaagaaaatcaagatgatccaatgtataatgtgctgcatttggcctgtgagcagagagttatatgttgaagagaaaagggaatgattaaccatgtctcagaagacagaaaggcttctcagaggggtcatcaacatgggcctgatgacacctataggaaaatgcatttctgttcagtaacaggacataaaaagaattcaaaggaataaaatgaatgcgtttctaggttccttgtactcttccttgtcttgagggcataataaaacaagtctttcttccagttaggggaacatcgggacttagatcaaaggagtgaagggagactgtgaggcaatctggatggttcctctgcctcacagatggtagcctctgcccactttgaaaaaaacggatcaaggcatgag

SEQ ID NO: 32872 - DNA, 1076 bp, Bovine  19866880714275
  misc_feature (1)..(1): n is a, c, g, or t
ntgaaataggcacgttgttatggccattttacaggtgagagagcaggcacagagaggttgattcacttgccctgggtcacacagctaaagagtgctatacaagaattttaacacaggcagtctctttccactacatactgaacacctactatttgcaaggcatggttgaaggtgctgggaatacaatgtgaccaagactaagttcctgcctttgcagagcttacattttaatgggaggagacagataataaataaaacaaacgcatataactttaaaatcacaatctttatatttacatctcatttccccattaatcactggtacgaccttgagccattactaaccccctctgaacctcaactcataatcatatgtagaactgggctgatgtgggagcaaaataagaatacttgtaaaatggcttttcataccatctgccacatgctgctgctgctaagtcacttcagtcgtgtccgactctgtgtgaccccatagatggcagcccaccaggctccctcgtccctgggattctccaggcaagaacactggagtgggttgccatttccttctccacataacaggggcttaataaatgttaatggttgaatctggatcccaacaaagtacgagccccacgaagagaagcgaaaggagttttggaactggagaactggttgaaggagtctacagagaatctgactgctcagttaggaaagggtaatttatcttcttggtctagaaggattccagaaccaagccagctcccaactcccttttccccaagttattatctacatctgctggagacaaaatagggattgaccagattggggaccaagatatcaatttctggtgctaaatcaccacttaggacatacgagaggctgccagtatgtttgcattaataaagccttatctggcctatgaggatctcaataattgttccagaggccagcaaggagaccatcatcaatagagtagacctgggggtggacagtgatggaaaaatgagccctaggtcctaattattgatgggtctggtcttctttcataattgcattgaattattaataca

SEQ ID NO: 32873 - DNA, 1858 bp, Bovine  19866880818651
  misc_feature (1)..(1): n is a, c, g, or t
natgataaagctaacaagttgaacagaccctgaacaggccagctctagaaagaagcaaatccaggccttgatgccggggccaggcagttcctagtgaggagccaggacgactgcccagggcacctgagcaggttaccatggcatcagcagcaaacgacatctggctctcgccctcttgagatggcccaccccacacctggctgggtgccagcagcctttggctgccgcctgatggggagaaggacaagtccccgtgctaatgaagtggcaggagtgaacggtacccaccccagcctgaggcagacagcagagccctagctggttagaactgcaaaacactgtccaagcctgccttggagaggaaatccattgccccctctgggcagcatttcccaggagcctgcccccagaatccctacatctcacagttgccccatcaactgctaccccagttgctgcaattcctgccccttgagtaggggctggacttaatgaccatgactcctaacaaagagcacgtagaggaaaggacaatgtccagtttccaactgtcactgtgatgtcctccttgctttctctcctggaatgcttgcgtgggggaaagcaagctgccgtgtcacgaggcccctccagcaatctgtggagaggcccccgtggtaaggaactgaggcctcctgctgaccgtgagccatcttgaaggcagctcctccctccccactcaggccttccgatgcctgcaccccagctaacatcttgactagaacctcatgaagagactgagccaaagccatccagcgagtcatccccaagttcctgacccgcagagaccctaaaacatcagaaccctgttgttttaaggcactgtgtttatgggtaatttgttatgcagcagtagctgattaatggaccccaagcacaccctgccagacatcactaatcaatcacagcttcactcctgctgggtccagatgatgcctcaaaatctctctcaaccctgagctccaggcagccactaccaactgaccagagttagcatatgagatgaaaccatctgccattccttagcctaagatagagggtgagacagttggatggcatcattgactcaatgcatacgaagtggagcaaactctgggagatggtggaggacaaggaagcctggcgagcagcagtccatggggtcgcaaagacctggacacgaccgagcaactgaacaacaagcctaagccaatcagtcaacaaatatatacatgacagaaaccccagtaggaacatgggccaacaaaacaggcagtcccgagccatgaggagaccttggtccagcagaatgtcctactggaagaaggcaacagcctctgaaaaacacagctgcattctagcaggacctgctggagagggtgcccccttcccaatgtgcttcacccaaccccaagggaccttctggcaaggtaagcagaggggacctccaacaccaccatacagatcctggggggccaggggagaggacagggcatccaactgtctctccgtctccccactcaacagctgccctgcctcaaggtgggggcacccccatctccagctgccaactcagaacaatttattataacaaaaatcacatcaacaataacagctcaaggacacctagatcctttcatggaagttgtgttctctctggggttctaaaagatcaaagcgtcggttctgcagagctgttacttactgctactgccaagctgggccaacagcagagcttgaggcccttctcaacaagggtcacccccagaaataacaaaacatcattcctgttgaaattcttgcaaggaggctggcacaacactcaactcttaccaatttg

SEQ ID NO: 32874 - DNA, 772 bp, Bovine  19866880920132
  misc_feature (1)..(1): n is a, c, g, or t
ngctccctgaccctcactcgtggggaggacggcaaagagccgaggtgttcggtgggggagacagggcgatggagtattccagggagttgagaagactggagggggagaaggcgctccgtctccggcgggaagcctcgtgagccagcccggctccccggagcaagcccgtgggtgggtgtgatcatcgtggatgacgggtgggcggatgccgacggggtaggggggggcaagggacgaggtgggcgaaattgagggtttccctcgccacctcagaagccccggacagagcgcagagatcggccctgccctcctgggcaccagccacccttgggcggctcggccttgtcggcggaggctgcagccccagagagctgcagtcgccctcggccgggatggcatctgagcacccccgcccccaccccataggctcctgggcttcggctgccttgactaccagacgccattttcccttttcctttggctaaaggtgtgtctctctttattaggaattatatatgagatgggaaaacatttttcctaagagagagaagaaaaaaaatcctcggagcaaaatgctggttgtcggacgtttcctatgtccacactcccttgccagggctgaccttgagccgttagggagaaagggttacgtcattgccggagaaaggggacaaatgaggggtaggatgatgactcgggggtggattcttgggccagacacccagaggagaaggctcttgggatccccctgctgcgttccccttgtatcagc

SEQ ID NO: 32875 - DNA, 1316 bp, Bovine  19866880952623
  misc_feature (1)..(1): n is a, c, g, or t
ngtccaattgcattttcctcttgcagccccagagtcacacttcagatgcgcgtcctctgacgaagacggaaggcagcctgtccgcgtgtctgagcgtgtcacggccattctggctctgcccaccagtccatgagctcctctccggaggcagtgtatttctccgttctcctccagcccaacttgtcagcagcccccttgggcggcaaacgtaaaggttgtttggcttcaaaggtcagctcggtacccgttctttgcctctgccgccagagtcctaggaaagccgcgggagtgcaagccgtcctggaggcaggccacccctgctcccacccccgttctcactccttcaccagcgcccccctcgcctgaacagtgtcttcagccaaggaaggacagacgctcacaggctgtgttcccaccgccttcctcgcgcagaaaagcttaagcgccaaagctcggcacacacagttgttcaagtcacacagcagaagccaccaagggggtcagatagaaggagccctggggctggggggctgaccctttggtgtccgtgggcctctgtgctcaagaggcttgacagtgcagcgaatatagcctggttcaaagtcagggaggctgtttggctacattctcaggcagtcatttctattaatgaggcacctgtcctaaaaatgcagctctcaaatcagggtccagggcctttggcaccctggcagattcttccagatggtcagcaggctgtcgcatccaatattaatgcttaaactatgacagcatcaacacctctgcttccagcatgacaaaaccacgtcctttccttgtgacatctctaagaaccatggactgtcaccactcaggaacttggagagttccaacctatcctcacttcatagatgaaaagcctgagaccaggagccaggaaaagccacgccgtagcccttaagattaatgccaggtagggcaagaaccccagtgcagattttccttgagctacaatacctgaactgccttaaggaaacacctactgtcaaccatagactttctcccactcaagtccagtgaagggtttttcctatcaagggtgggttcagtagctagaccatggggaactttgcttaaatcactggagaacctctgttgttaatcagattaaatccaaagaggatttattaagtttatttttcattagacaatataaaaccagcaagttcaaggtcttctcagtctcagaggtctaggctgtgtccagaaccctacagtttacctaccctagtttacagctatgactctcaaccattactatgcatcagaatcgcctg

SEQ ID NO: 32876 - DNA, 3937 bp, Bovine  19866880986326
  misc_feature (1)..(1): n is a, c, g, or t
nacagcctacagctaacgtcacacttagtggagaaagactgaattcttctccttaaagaagaagatatactctcaccagacccatcaacatcatactggaaattgtagttagtgtaactaggcaagaaaaagaaataaaatacggattgaaaaggaaaaaaatgtctttcttcacaaacaacataattttctaaatatacaatcctgagaaatcaataacaataacagcaaaattcctagaaacaataagtaagtttaacaaggtcacaggtcaccaggtcaacacacaaaaatcaatcatagttttaaacactgaaggcaggaggagaaggggaagacagtggatgaggtggttggatggcatcaccgactcaatggacatgagtttgagcaagctccgggagtcggtgatggtcagggaggcctggtgtcctgcagtccatggggtttcaaacagtcggacacaactgagcgactgaactgaactgaaaaatacataccattttcatatttcaagaaacattaaatacttaagcataaatctaaagaatatacaaaggatatatgtgctgaaaagagtacaaaatgctaatgaaagaattcaaatttggcctaaataaatggcaagcatggggtcacaaagagtcggacaccactgagagactgaactgactgaaatggcaagatataccatgctcatggactggaaaattcagtgtagtaaagatattcatttttccagctagatctatagattcatataatttcaaagttccatcaggattttttctatagatttgggcaagctaactttaaaatttatatggaaaagcaaagaaactaaaatagtcctatggactgactgtgtactcctaaaattcgtatgctgaaaccctaattgtcagtgcgatggtatttggagacggagatttagggaggtaattaggtcatgagagtggagtcctgataatggaattactgcccttacatgaagagacaagagagagcttgcttcctctctttctttcttccatgtgaagaatatatcaagaaggcaatcaactatgaaccaagacgggggctctcaccaggacccagccatgttgattccctaatctcaaacttccaacctccagaactgaaaactaaatgtttgttgtttaagccattcactctatggtattctgttatagcagcccagactaaggaagacaaataaataaatcaattttggaaaatgaagagtaagattggagaagtcatactacccaaattttgttaaagttatagcagtcaagacatggaattagcaaagaaatagacatatacatatcagatgaattagaatagagtccagaaacagccccacagaaacatggcaaactcatttttttaaaacaaaggtgcaaaagccattcagtggggaaaagacagtgttttcagcaaatggtactgcaacaatcatgtaaaacccaaccacactaaaaaaaaacttcacaccatataaaaaaaataactggatcatatatctaaatataaaactacagagctcactttggcaggactaaaattagaacaatatagagaagattagcatgcttgacttagtatgaatagaatactagatttctaattaaaaaatagatatgcaacaagtaccaaagggttactgtagagcaccgggaactatagttgatatctggtaataacgtgtgatggaaaataatttcaaaaataatatatgtgtatttgtataactgaatcacattgctgtgcacctgaaacattgtaagctaactacaatatatataactacaatatatatacaaaatatatctatattttaaaagacaaaaaaaataaaactaccaaacttcaccaaaggcataggtaaaatctttgagatatgaagttaggcaaaacattcttagatatgacaccaaagtataaatgcataaaggaaaaaaattgaaaatcagatttcttccaaactagaaactctgatctgcaaaagacactatcaagagaatgaaaagacaaactattttcaaatcatatatccaacaaaggacttgtatccagaataagcaaagaatgttcaaaactcaacaagaggaaaacaaataacacaatctaaaaatgggcaaaggactgaaataaacacttcattaaagaggatatgtggatgtcaaacaaatatttagcattattagccattgtgtgcctgcatgcatgcatgctaagtcacttcagtcatgtccaaccctttgcagctctatggactgtagcctgccaggctcctctatccatgggattctccaagcgcaaatactagagtgggttgccatgcccttctccaggggatcttcccaacccagggatcaaacctatttcaattgcatctcctgcattctttaccacaggcagattctttaccactagcaccatctgggaagcctgttctttggtggaaggaccccgaataggtgtctccacattttcttggcctcttggtagtaaaatgtctgccaaagccacatcattaatcaatgaatttccactgtaggaagcaggagggcaggatgaacaggaagatcccacccacccaccagcttcacatcaagaagaaagcaggtgtcagacagaatagagagatactttttgtctgccttctcatatcagggagtgaaaatgccagaactatccccaacatgttcccttttcatctcattgggcagaactgatcacttgttcactctaagatcaggacctgggcccacctccccagagatcacaggaactgaaacctgaacaaactgaagatcctactggcaaaggagaaaaggaggggataaactgtcatggttctgcccaaggtcacccagctgataagtgcagaagccagatctcaaacccaaaactgtctggcagccaagccagtgctctcagtctctgtccattgctctttgggatgcaggtgatgttgtgatcagctccctctctaaggcagcatgccaggagggctagtggagattgcactgctaatgacgacgcaagccttagaagagagagcagagcaggatgctcacggtgaaccagagtccgggtcatcctgaacctgcttacctgacgcaggggaaagcatgtctgtgaaatctccatcttcctgtgactctgtctcccttggcctctccccactggcctccatcttcgtctttgaacaggcccttagagactctaaagggaaacagagttgggtaagggagctgtaaaagtctgcctctctgccttgccccctgacccagccactttgggttgctcccttagccctgttcattctgctccctgctggtttccccagggtccctgatatccaaaataactccaaaagtcaccatatgtgactctattgcaagtgtaccctcccttaaagtgagggctgcaaactgtatttcaatgagaaaataaattagcaagtaataaattgtccctcctttctctgtgttcctagtgggccttgaaattagcaagaaccaaatgtcacattaatttcactgtcaggagccagcactaaagggtgacatcatagtgtcccctgggactggaatccactagcctgggtgagaggtaggccagcctcaggccctgaagtggaccagtggggaaaagaaagtggacactcttcgtgaacagatcccatgccaagtcctgttgtgttttgtcctgggctgtcttccaagaggagagagctgggtctctaaaaagttaaaggtattatggttttgggcgccagcataaatagatctgcccacaccggttatgttcccaacatgctgcttgtacctccagccccgtttcaggaggccttgtaggcaaagagcatcttgttgtatctaagtggtggtctctccattcccaaacaatttctgctacagta

SEQ ID NO: 32877 - DNA, 787 bp, Bovine  19866881083170
  misc_feature (1)..(1): n is a, c, g, or t
ntgttatccatcatctaggctatttgctgctaaattattccatcctccctggaaaactatggtttccagaaatccctcagcctggtcaccctcccatcttgctttcacctttgacatatgggtttgtcttctctttccagccagatcacagggcctctgacataggggtggttgcctttttctttgcaatctctaggtgcaagccttgggttgggtgcggggggaagctgaatctccttgacgaatggaaggcctcagggggctctggctgctcccagcatggtgccctgctcccagtggaggtttccgggcttggctggctggtctgaggatgaataagtgttttgggggaggcagccctgagctggctagcagtctcagacagcccagctgccatccaggtggttggcctataaatcactaggccttaccctccctgcaactcgataaagctgaggcataaacagcatcttgtgtcagtgatgaagcaactggcacctccctcagctctggatgaagcctcctggagcttgtttaggccctgattctttcttgcacacagctgctgtgctatttgaagaagtcgggacactctcccgcctcataacagatccatggtgcctgtattttaccattagggatttatttgttgagggtgaacagtgcttcctttgtaaggttttgtttgaaaatggtggtgccttgggagaatggtgtcttactcagcctctagaatcttagtgtgaatgtgcttatcagccaccttgctcctgctccacttccatct

SEQ ID NO: 32878 - DNA, 1369 bp, Bovine  19866881242652
  misc_feature (1)..(1): n is a, c, g, or t
nctccaatgtacagatgtgggactggagactcagaggcaggctgtgctttcttcaggaccatgcaggtgtgtggcagatcctggacttgctcttggacatccagatcttgccgagtcccaggttctttgccctctatacttggttgtctccctttttatccacttgcaacctcagggaaagcaccaagttggataaaaagtagagccaaagatgtctgtgtggcttctcccctagtgggagccccgaagctgtggttctgcctggggtgggcttgggaaacagaggagagacaagggcgatagctttctccctgggatccctttacttatttaatccaccaaccaaagagctgttaattcaacaaatattgggaggtttgcattccccaatggaggggagtgtagaccctccagaggaatcagtagatgctagttcttttgttttgggaaagtgtttcaactcttgagctgctgaacaactgctggttttgaggataaccacattctcagctttggagaagggaacagctacccactccagtattctggcctggagaattccatgagttgtggagtccatgggttcgcaaagagcgactgattgagtgacacgattgagcgactttgacttcacttcacattctcagcttggtgagggtgtgataattcaataagcattttaaagatcttcttgctgtgcgaggggaactgtggcagcatctagctctttaggaatattctctgaaacttgggactgtcctggtcaaaccagtgcatgccttcaccattcttccgtccacctgttactttaaccggcattaaccgagcctgctctgtgccaggcgctgtgtcaggctcaggctcagaggatctaaagggaaataaggcttaacctctgcccttcagttgcccacagcctggttgggggagcaggcatgaagtctccagttgcagaagatcagtgtgttttcattgtagctctggccccgtacagcagctaactcctagccaagaggttgggggcaggagccctgcctgggaggggctgctaacccagctggggctgggggtacctgcctggattgcctcctccgcggttgccttttctaatggtgccactgttccagggcacgtttggtgtctgtcaacctggcgtggatgcttttcagtgagttttcatggactctgtcctgcagactccttttgctgctttcgtttgtcatcatggaatattttgcctcagagtgtgctgctcagagcgggagggaaattgaatccttgctgccttgatgactggctttctcaaagtttgtgataatttctgcaggagcatgagctgcatttaatttgctctggttgggtcatctga

SEQ ID NO: 32879 - DNA, 877 bp, Bovine  19866881285507
  misc_feature (1)..(1): n is a, c, g, or t
nccagaatagacttaaacgttatcaaagatattctgatcaaactataccatctctaatgtcatcttgttttttagatgtaatctttgctgctctgttttaagtcccttggaatgcctttcatttcaatttttccctcatgattgaacacagagttgggtggccagtcaaggcctttgattcatcttttctctattgccctaagtttatgagaattttaccttcttactagtatctgctctttcttcaaatcctttcccagttattaaaaaaatataacagcaagttcaagacattatttagatagtttccagctaaacctgaccgtacaaagggtggtgatcttgctgaccctaattgtggaagaggcagcaaccttatgctgtggttcagcagaggctgctagtttccaaagccttgaaggggccgtggatgaccgtcaagtaaggccctgaagactgtgctcctgcccttcaggaggtgtgacttccttgtcaactacctgtattggccctgaacttgtgtctggccaggaggtggcgccctttctctgcccagttggtagcagttggtccttactgtggggagggaaaaagaagagctttgcttgggctgtcgtttcagaggcgctgagacgcagaggcccttgtttccctcttctgaacagacaatagttccccggacgcgggattctggttggggcttcttttctgcagggtcagagccacttctctgtccagggtatggcctgcacctctttccctttagaggtgccactaacacctcttttctttggggttctctcccgttagaatgagcagtcggttctgagagaaggatcagaatagaagactgttgagggtagaatggaaatggaaa

SEQ ID NO: 32880 - DNA, 1289 bp, Bovine  19866881301170
  misc_feature (1)..(1): n is a, c, g, or t
nccactcacgggaaagctccttactggaggcagaaactgcaccagaaatcctctgcaggtccccacagcaaccaagaaagcattccatttggagaaaagaggcacagtgggaaatccaaggctgtttgtctaaccaaaaatacactgttaactaaagccatagtatagctctttttaggggaaaaaaaaaatcagtgacaagtttttaacagttccatgtaaaaagaatgtgccactcacataagtgatttcagtaatcacgtaacccctttatgtttctaacagtagggaggggaaaaaagaacagaaatctatttttttttaaagtttgaataaagaattaaattagtaaataatatctaaatcagagttatttttttatttttctcaaaacttgagttgtttgaaagcactttaattattctataattacatggattaatgtattcccaccccccacgggaaagtctatgttcttgggggtgtcatggaagcaaggccaagatattaataatcacacaagtagcccgatattaagtataaaaaggttagtaatttgagctctctttgccatttccctggtggccacccaggcttctagaggcagaaccacagccttcagggccagacaactgccccgaccactttcccctccgcctcaatcccacccctgggatatataagcctcagttcctcactgcttcccaatcacagagtggtcaatctcggccagcgaagtccctgagagtgaagacagaggggacttcagccacacatggctgggagatgtagtgaggaagaaagaggaactgggttcactgacaggaacctggggaagtttctctcatctcggagcctccaggagctcggtgagagcttctctagactcggcttgaaccgggacagtgcttgagaacaagggcatggagtatctacaggccaataagggcccctggctagtgacactcacagggtcatggctaccagcggggcggggagtggatccagggccacggctccaggaagacacagatatcaacctctgacatccccactatgggcagcaattcactctgaagaaatatgtgtccacatccatccaccctaccgaggtcagtatttaaaaaaaaatgaccaaagagtttttccctaaatttcccccttcttttggcaaatattttattgccagagttccaataaaataggctgtgctgagtatggactgtgggtcctgccccacctgcttcacgtttcaatcatcaaacaatccaacacttgttttttttttt

SEQ ID NO: 32881 - DNA, 1599 bp, Bovine  19866881302259
  misc_feature (1)..(1): n is a, c, g, or t
natgtttaaaaagagttgaggggttgcagagatggatctgaagagattctgcctgcaaaggaactacagactagagattatacagaacaggtatttatttatgtattagccatgccacgtgacataccggatcttagttccccaaccagcgatcaaatccatgccctctgcagtggaagcatagacttaaccactggacaccagagaaataccagaacaaacatttaaacacatgactgtttcagttttaaaaaaagagaaacacatcacaagaaacaaagacataaaatgtgatggaggttcagagcaagagaagatgggaagagtacagatagggagaggaagaacatagaatcatctggaaaggctttttgaaagaatttaagggaacataaattcaagttataaactttatagttcaagtttttctgaaaagggaaaaatagtaaatcttttaggctttgtgggtcatatggtccctgttagaactattcagctcttttgatatagtataaaacagctaagtaagtgtgtgagcatggctgggttccaatgaaactttatagaaagaggtgggccaaatctgtcagatctcccattttaagccatgttgtagccatccacttgcataatcatgaaagaatttatagacgatacaataattctttggttaagctttggtgaatggatagaacttgaataggaacgaaggacaactcagaagtaaaataaacaatttttatgggatgttgcagagagcaagtcttcaagagtttgaaatagaggatttggtatgggagaaatacttgaaatacagctagtttgagtaggagtattttatggaaagggctttagctggtggctcagtggtaaagaatctgccaccaatgcaggagatgtgggtttgatccctgtgttgggaagatcccctggagaaggaaatagcaactcactccagtattctggcctgggaaatcccatggacagaggagcctagtgggctacagtccatggagttgcaaaagagtcagacaggacttagtgactaaacaacaaggccagattttatggagaaccttgataggcaagtaataaagttttgatgtaagacgagaattagggaaccagtgacaggttctgagctggaaattatggcatgcaaatatttttcaaatcagtgagtcagttcaaggattgacatctagggccatgcaagcaagcaaagcagaggtcctgaagactgtctccacagggttaaaaactaaccctttattccccagccaacaatggtcatgatgctacctgcttccacacacaactggagctggtctgcacctcacacagagctgggcccagattcccagaagtttcaaggtgcccatcagggtctggcttggtttccccaaagccttgggtgtttttgccttcctgtcctctaccaaggggactgttcctccatcttttcccctgctgtctgctctgcctcctgcatcccagggccctctcactgctgggaatcgcatgttatcacaaatgagttaccaaaggctccgacaagctgctcgtcgctatccccagcaggagaaaagcagccacgac

SEQ ID NO: 32882 - DNA, 981 bp, Bovine  19866881360420
  misc_feature (1)..(1): n is a, c, g, or t
ngcaaagaaaaagaagatgaactaaagagaaaacagagcacctccgttttaacatggcaagtttaaagcatcacaattcccaacatgtcttgttatgtgcagagcatggtgcaaagcgtcaagttcccgggacacaacagggagaagcagaaaaagaactgagactattagaaagatgccagcaatgagttgtcacctggggtgccaaacccacagggaagaagaggtcccaggtcgcacgcctgggataggaccacagacaggtggaagggaaggctgtggagaagggaacttcttccctcactcctgacattttcttccagagaaggaagcttaactagtggaacttctggaactctctctgccccactgctccagtgacttgctgttaactttggaaagagtacttgggcccccttgactccgcccacatcttgtttctcttgggtaactgttctccccaccttcttgcttttactcttttttttttttttaaggagtaggcattttacttatgtatttcagaacaataaagacttttattacacgaactgaggtaggaggcaagagggtttatttttgcttttttatttattctgtttttttgttttttttgagacttgcaggatctcagttccccaaccagggactgggcctgtggcccctgcattgggagtgccaagtcttaaccactggaccgccaggggagtccttgcttttacccttaaagagcaggaggtctgtctccagtcagtgttgggaccgagtaggtaggtctgcttaaattctggggctcggtattagcaaactccgttggctaaagaatggtctctgaccgccaatagaggtactatttcaccttccatacttacttttgttttacaccttgacttatgcaaaactcaggtggaaataagaatgctaacacttgggagccacttgaagcctgtcgggttatccgctgcggcataacaaactccc

SEQ ID NO: 32883 - DNA, 1245 bp, Bovine  19866881382740
  misc_feature (1)..(1): n is a, c, g, or t
naccgcaaaccacacaaacgaccttaggacagtgttagccaacgtcctctacggtgaggagggactcagcattaagctttgtgactcccgacatgcccaggtctggcctgggaacactgaggagtatattcagtgttggtgagacttggattgtgcagatgaactggaatctatcgagggctgggtgagacacacgcccacatcggcaacaaagtctaaagtaacgatgtgttagtcgttcagttgtgtccgactctttgcgaccccatggactgtagcccactaggctcctttgtccatgggattctcctggcaagaatactggagagggttgccatgcccttctccaaaataataactatcatttattgaggactaagtatgtgccagaccctgagtcagtcagactcctgacctacagcatctgatttaatcctcacagcaaccccatggagtagggattgttgttaccaccatcacacagatgagaaactgagaggagtgagctgcctaactgataagtgttagcaccagaattccaatctttagagagtcagactccgagtcctgtgcccttaatcaccctacaatctgccttccaacaaataaagctaccatctattgaacacttcaatacatgccaatgacgggctggctatgaatatcatctcataacataggcagttaagatgagtaattcagcaactctttcatctgctgaggactaacttcatacaccatgccaaaatgtttcctaagtgtaaaggaaacaaatgtcactgccttcaggaaggtcatcattcttccaactgacccataagtggatcctgacatgttatcaggatgggttttcctactggcacagtactacagcaagaacacactgaagtatgtaaagagagccatctgaattcacttaaaaagtctaaactatgaaatgctttaaaatacaatccttttcacttttaagattcactttttcacttcttttacattttaagaaaaactaaagctagacctaaggtaacaatgtattgccaagtgaaaaccctgagtagtcaagaaaattttcgttcatgattgctttgactttctgcaaattaaagtgcttctacagcgcctgcagacagtttattcccttaagaagatgagagtccctctgaaatccagcttctgcctgagttatgacaaatcccaaattagtggtccctcagtaggctctatactaatgaccgtacattttat

SEQ ID NO: 32884 - DNA, 1726 bp, Bovine  19866881383076
  misc_feature (1)..(1): n is a, c, g, or t
nagagaacgagaaagctctcatttttgtttttaataagggcactaatcccattcaaatgggctatatcttcatgatctaatcacttcccaaaatgcctacctgctgctactgtcacaatggggtgaggggtaggacttcaacatacaactttgggaaggatacaaatatccatcctacggcaagttatccatcacggctgtgaggtttagatagagatgtctagcagtcatggtcctaagtcatcgctaacatccagagccgctgactagtctgatcattgttacctgccccttccttcttccatctgctttataaaaaagaaactctaagctctcatgggtattgtctgcttatcattcagatagttctccaaaacctcacatgcgaaactttacatcgtgaaatgatgtcattatcaaaatctagaattattcttgggctcctagagtagaatgtttaccctcccctgactcttttcaaacaggtgggtagacccaggtggcaagcgaagaaaaaaaatggcttaaaataaattgtaatattttactgtaacatatcatttgctgaaatcaagctttgtccaaactacattaccccaaaagtaagagagtgtccctgtctgatgctaaattctaagccagctgcttcagagctctgtgctgtttccttctccatggtctgaccttaacggccagacatttatcagtgttcttgctgtaaccgaacagcacttattccgtattacatgctgcttaggctgcaccacagagacagccggaaaacgccttagcagcacggctttttgcatttccacggagaagttatgcctgaagcagtcatcttatccagatgtatcttcccccctccagattggatcttatcaccagctcagtcaccctcttatcctactcctgagaagtggagattgggggccagaaaatatggctgagcaggaccctggaagactcacgcacaagcacatctttattctgcagttaaaatttctgagaggttccaacctgagagatcccattattggaaacttcaaagaaataaaacgaacatcatagttccttatgtaggacaatattccaaagttcaaaacgttattccatctggaagacaagatagggcctgtctgtgtcatcgtgtgcatgaatgtgtgtatgtatgtgaatggtcttaacagactggcagcggtgtgatggatgacctctaacctcctatgatcctgtccaccttaatataagcttcttccttcaggtgagatgctgctgaactacaggtaatgcacgcacgtaactccaagtaactcagggctcaatagccttcgtttcagaaattactagtgagcttgccgagagcaaaaggagccccactaccttctgacccaggtgaccacgaggcacgttttacattgtctgtatgagagttctcaaatttcggaaagtttgagatttacagaaagcaacattggtctagaagtgaagattctcatccccaagaaaatgagttctagtgagttctagtgacctatttggatgggaggaatggtgaggattaaatgcttcatatttattgagcacctgcagtgatctatgtccttttcaaaacatagcagaggagacataacttctctttcaatcaggttaatgaggaattgatttttgaagctttttaaaaacacaaagtgcaataccagcgttaaacaccaatcagatgggg

SEQ ID NO: 32885 - DNA, 1399 bp, Bovine  19866882064109
  misc_feature (1)..(1): n is a, c, g, or t
naaaaagtttcttggctcaagcctgctgtcttactgctatgtgaactttgagagctgggatgagggaagaacttattccccctaatcgcttgaattaactgcccttgcttctttatctgtaactggaataagcccatgaagttgttggggaattgtggcatgctgaaagcctggtccttcctccttcctgacatcggtgggactcataggtgtcactcactcacatggcactcggcagtccttggtacagcccaacatcttggctgcttctagggaaatctagtatctttttggttattgggtgtccttagaatcagagggaattagagagtatatgagttaggaatgcatttgtttgtacataactgacagctccatctagagtgttttaaacaaaaagaatgtattttcctcacataacaggaagacttgccacagttgcctgttgatattgtctcagtggtctgacggtgtcagaactgggatctctgtgattttcttagaattttcctcatggttataaaacagctgctgcagctccaggtatcacttcactctcaaggtaggaagagaagggtaagaagagttgcaatatttataaacatccctttttgttaagaaagtaaaagccttcccacatcctctagcagacctccacttgtgactcacaagccagaactgtgtcacatggccataactactgcaaggcaggcagggaaagtatttcgtttttcctggggaagaggaggattgggaataggtgttgggttaggcttcagcacactgtctgccacagaaggcttgcagggaacggtcatgagaaaactcaggacttcctaactgaaaaatttatcacccggttaaaatttattcattcacgtatataataattacacccattgtacaggtgttgaaactgaggcagagtgtttatattcacatgaggagcctgaaataagcctggtgagagagaaatagcttttaaccccaactgtggctcagatttgagaggttccatgtacttccccctaagccccacttttagtgtgttcccttcattgtgtctggaaggcactgaggaaggcggggaacttattctctggtccccaagcagcaagggcctggggccttgctgggggaggcggagcagcctgcccttccttctcggcctgcctcctgccttccctgcccctctctgctggggtctctctgggccttccctcctgttcccagaaggtgtgtgggctgatgtctggcccacgtgcctatctgtagcccttgcccagagcccccagcctcccagcccttcctgacctgtgctctcccactccaggtcccccacatctactgggagctgtccaccaagcgggtgcttctgatggagtttgtggatggcggg

SEQ ID NO: 32886 - DNA, 821 bp, Bovine  19866880363675
  misc_feature (1)..(1): n is a, c, g, or t
nataagaaataatgaacatttttacaatgatgaaaaaataaatccctttcctgtgtccttctaaatttactttgactagctattgaacaggcgtttcatagattcaatacatcacaacatattaagtgcggctcagctcccgccacccgcgctgccctgctgtggaccgtctctttctgtttgcatcttggccgtcctctgtgcatataaactaagtgtctccatttctgctctcagagtgtaccacgccatacaaccgagatttcaagaacaaatatcaacagtggctaagccaaacatatcttgtcaagagagtgccactgcagtgtaaagattgatttgttgagggaggtcttgcatataagtagatgtgaaggcaaagactgaggttaacaagtttccactgtgggagttgatttataacaaaataacaaagggacagttctgcctctgccaattactttccatctcttctcgtatccatcgccacagcagctttattcatcaccagaaatccagtttctccagtgcagatccatgtaaaactctgtggacaaaatgactgccctcagaacttatgctttcgtgtagactaggataatttcataccagtcagtactgtttggaggagctctctgtgcccagatagtgcttggatacacaaaagggataaaagagaaagagaagaggaggaccttacatgggaggtgttcacagacaccagatctacagacaaaagtgtgtcaagagtgaattgcatattctgagtccttttgcggaccacctgaaactatcacaacattgttaatcagctatccccc

SEQ ID NO: 32887 - DNA, 1565 bp, Bovine  19866880511592
  misc_feature (1)..(1): n is a, c, g, or t
nataggtagtataaaaaccagaccaataaattcagagaatatgcccatataaagaaaactctaaatgggaaacacagctaatttctcctaaaagagctaaatttcaattatttagcttccatctgatatctatagaaatagggacttggtaagaatggaaggatttgatgtcatctcagaaaatccattccacctttctcttggtggacatggcctgatattttaacatatcctaagcttctagataaatttcaagagactatctagtgtcagagcaaaatagtggttccttagagtggttcctttttcagagttccttagaaaagtgtctcttctttgactggactgaacctgggccctttccaaggtctaggatgagcaactttgctttttttttgcagttctgtatggctcgatgactctcaatctctgaccctccacccttctgtgctgatcaatgtcttcactccttgaaggtcagagcttctgcagactgcctggattaaggtctccatgtcagagcctgttatctgctgcagagcccctaatgccattagcaagaaaatgaaagaagcttccaaacaaccttcagatcgatgctaacgttgtaacttccaacagctgctgctcagctcctttatttgttaagacctcctcctgtgtggaaccttcttgactcaagtttaattctgtccatttaacaaagatgttttgagcagctgctttgtatccaggcctggacaaagccttgggaaagtgaagcatacaggatggggggtgcggggtggttctttcccacctgataataagtatccaactggaaagaaggaaatcacaaagcatataccagcttgagtatggtcaagatgatttcaataataaaatgtaaatttggaagttagtctgaagaggaatattgatgctggtaaagaaggaagaaagaggcaggactgctgttttttggacgcatggtagaaaattcagcacttttcactgcactcaatttctagctcttttctatcaagacttagctcaggaataacacaaaaactcccatggagcaactctatttatacttgagggtgcttcaatttcttatagtgaaaggaggaggaagaaagtggtataaaaaattctaatagttgtttcctttattttaggaaaacagggtaacggaaatgtggtcctctttcacctagttcatgaagttctaaaatggagtctctcctatattgatataaaaaaatcgataggcagggattttagcatctggcagcctttcttcacactgccaggtggatggttctagaatcgtgtctccctatcttcttgtgggtcagccatgactgatgctttcaaggtcttaacaaccctgagaatacttcttggagaaaatgaaaatacttatctgcccattcaaaattctcagcaatctgggccaggctcttgcttttccaatctcatcttctttccctgttctattcacatcttctattattgacatactcatctccaaaatatcttttgtacatcacatgggctttattgctcaccatttctctatc

SEQ ID NO: 32888 - DNA, 1684 bp, Bovine  19866880518336
  misc_feature (1)..(1): n is a, c, g, or t
ngattgggaagaccccttagaggagggcatggcaacccactccttattcttgcctgagaattccatggatagaagagcctggagggcgacagtccatggggtcacagagagttagaaatgactgaagaaactgagcacaatacttgtcacttcaaataaagtgtcagtgaggatttctgcatttctcaattgtttgactgcattattgagcccagggcttcctggtggctcagcggtaaagaatctgcctgcaatgcaggagacacgtttccatccctgggtcaggaagattccctggagaaggaaacagcaatccactccagtattcttgtctgggaaataccatggacagaggagactggtgggctatactccatggggtcacaaaagagttggacacgacttagcgactgaacaaatattgagcctatcctgtatttataattaaaaactactattaaactttatttctttattcaaggatgcacaaataactgtggaaagtatcttagtaactaactctcctgttcttaaatccaaatgcctccttctagagctgcttctgttattgtagcagtccaaatatccatctcatcaagctcttcagtgctcaaatgttatccattctgcagctggaagagctctcattatttttgcatgtagaaaatatgacacctgaagatgaaaagaaaaaaaaaatctcattcagcttttgcagctttataggttttggaacatcgttatcaataactgtaatataaactaagcagatgtttctataactctacaaactttcttatcgttttccagcagacattctgcagggcatgctttttagatacaaaatattaattgataaaggaatctggccaaagaaactcaatgaagcaccatgtcctacagtctttaaatatggatggacaaatatgcagacaaaagaaataaaaactgctataaacacctcacaaagttgcaacagaaaaattggctcaggagagtacaaacattacataatttttaaataaatttttatttgatcatagtttcttaacaatgttgctagtttctgctatacaacaaagtgaaccagttatacataaggctttaatataattttattcaaatctctgatatatttttgcaaaacatgttttgttgcctagtgatggtgataagtcatttgttttttgactagctcagtgaaagaagcatgacagaactcttctagacagtaatagataaatatctgtatgctattccccaaaaaaatgtttacatatatttcctcatgataccattagatgccttttcaaagaactgaagaaaagttaaaaagaaaagtaccctgtattgaagctgatgctttaaagaagaagacagaaaataaaaaatatagcacaggatagtgaggttgaaactacagaattattggctaggatagagtgatatcttttgaacatttcttgttttttaaatctacagaatcgattgctaacagaagtatgaagaagtgaaaagtgtctagagttgtagataacattatacataccctccagaaatccctgaataataagaagccaggttctgaatcagacaatgtatataaactctttttccctcctcagaatgtttacttacaactacagaagaaaataaattggaaatctttactttcaaatggaaa

SEQ ID NO: 32889 - DNA, 704 bp, Bovine  19866880588902
  misc_feature (1)..(1): n is a, c, g, or t
naaaggacggtggttacttttccgtctttctggaaggtagaaacattgtcagaaagtccctcatgtcttcgtccaggggaaggagcattggtacaaggtaaagaacctcttctactggtcacaccaggcatcagggctttcattgattaatatttaattgttttgtttttcctaagagctttgagcaccaccccttacagcacttattgtaatagttcttaaatctaaacatcttcagaatattatctgggtttcaaacattttagtaataaatgacttgctcaagtattattttctgtattaattaaaacactgcaggtgtgatcttcctgtcccagagcagtaagtgaggaagtatatcatgtggaagacagagctgtaactaagatcttcctcaataatgtggctatgtttaatttcatcacctctttttttactaactcctcagtgtgaacaagttttctctcctttatctctctcttcttaaattagaagtaaattctaattaagaattatggttcatttgtgtcctggttagtggaggctttcctagagggtgataagtgacatactccaccctcccttcaatcaaaaggcacatttcccaacctcttaagaagcctgtgcttcttaatcagagtggggtgttatttgcatttgagaagtaaatagcgctccaggacagttcatttcacccagcagag

SEQ ID NO: 32890 - DNA, 2012 bp, Bovine  19866880590998
  misc_feature (1)..(1): n is a, c, g, or t
ngggttgtgtctttcagcaccccaggtcctaagcggtcttcctgtttggataacctcaagtgacaaagtgctggtcctcgtatatcacagtctttcccagcaaggattaggtcacactgggccaaggttttactaatgagatcatgcataatcaataagggtcggctgacatcttgtcagctccatcactgtcacccaggtctggggtaaagcaacgaggaggggagacctggcggctacctggactctgaacagatgggcggcattggatggagccactgcccctgagaacaggtccaagtcttgttagcagaggacacaggtcattcgctcatttgtttgctcatcctttccttcgtccattccacagagagtaatttgtcaggtcccatcggtactattcccaccatagaggatgacacagaaaagggtcccatattttgaaacttcccctaaagcacctcattctacaagggatgacacagaggacaaagagcaggaaagaggaaggaagggaaaaagaagcaaagagaaaagagaaggaagagacgggacgaggcatggaataatattaatttataggcagagaattaacataggacaacacgcaatagaaaggcccagagcttcagtttgagcagtcagaagtgaacagggctgtctccttacccaggcacgtgctgtttaagggactcttgtcaggtctagtccgagcttttgtgattatgaacaaaaggttgaagtccatcttgctcatgttaatggcttaagtttatttatttctcattagaatcataaaacttgtaatggacaataataccatttctgaatacaaaatttaactctgattctcattaactatataaaattctcaaactattttattgggttgtggaagtgttatattcatgaagacaaatgtatgtgtgtatacacacacacacacatatataactgatgtttacattcagttataaaatatatatatatatataggagaaggcaatggcacccctctccagtactcttgcctggaggagcctggtaggctgcagtccatggggtctctaagagtcagacacgactgagcgacttcactttcacttttcactttcctgcattggagaaggaaatggcaacccactccagtgttcttgcctggagaatcccagggatgggggagcctggtggctgccgtctatgaggtcgcacagagtcagacacgactgaagtgacttagcagcagcagtagcagcatatatatatatatatatatatatatatatatatatatatatagctaaagtatcaaggaactaagcactttacaattttaatatgagagatcttttttaattaaatgagagaagttagcagctattaataatgactaagacaattggcaaattaggttttcaatcagtgtctctgtctctcaaaccatatttcctaattaaagaatttaggagagttctcaccattggctgcaagaaataccatgttcttttttttctcttagggaaagaagaaacttctttacactaaaactttttatcccctcttgtatcatgtttttcttttttctttttaccctgaccttgtcatttgatataaacctagtctatttctctccgaagaaactatactttgaatcttatctaaggctattaaagacttttattagagtgagcagttcctacatacaagttttaggaattttatttcacaaaataaaaaataaacagttaaataagtaatgtcacatccctgcttgattttttgttactatgctttcacttctgtgaatcttctagatgagtattgtcatagttgactattaatctgctagaaatataataaggattagaactttttgctgccatcttccaggtggtctcctctagaaggtaacgttgacacttgtaactgctgtgagactcaaacctgtgaaaaatcacacctctccccgaagcggctcaaagccactgggaggaagctacgggtcaaggcag

SEQ ID NO: 32891 - DNA, 3235 bp, Bovine  19866880620684
  misc_feature (1)..(1): n is a, c, g, or t
ncacacacacacacacacatatatatatataaagatagtgataagtcgtgtccaactcttgcgatcccatggactgtagcctgccaggctcctctgtccatgggattctccaggcaagaatactggagtgggttgccatttccttcttcaggggaacttccctaccaaaaaattgaacccaggtctcccacatcacaggcagaggctttactgactgagctacacaagaagcccagacaaggccctaatatatattttagaggtctgtatctgtggtttcccctagagaaggaaacagcaatccactccaggtattcttgcctggagaacttcatggacagaggagtctgatgggctatggacatgactgagtgactaacacctaactaattgtggttagatccaggaacacacagcaatactgctgcaaagcaaaagggccctctcccaacttggagcatcaagatgaaaagagaattcaaagagtgcttagatacttgaactgagatatggctgacactccagaatgatagtgcaaggaagaagttctagaatattctagtccagtcctcttgattgcaagagggagagaatcaaagttcatgaagtacacgtgtctctgtcaattctggtttcctcggtgtgtatgaccagcagtgggattactggggcgtatggcaggtctatttccagttttttaaggaatctccacactgttctccatagtggctgtactagttcgcattcccaccaacagtgtaagagggttctctttcctccacaccctctccagcatttattgtttgtagatttttgatagtagtcactctgactggtgtgaggtagtacctcattgtggttttgatttgcatttatctgataatgagtgtaccacaatgttcatcgcagcactgtttgcaatagccaggacatggaagcaacctagatgtccatcggcagacgaatggataagaaagctgtggtacatatacacaatggaatattactcagccattaaaaagaatgcatttgaatcagttctaatgaggtagatgaaaccggagcctattatacagagtgaagtaagtcagaaagaaaaacaccaatacagtatactaatacatatatatagaatttagaaagatgataacaatgaccttatatgcaagacagcaaaagagacacagctgtaaagaacagacttttggactctggaagaaggcgaggatgggataatttgagagaatagcattgaaacatgtatattatcatatgtgaaatggatccgccagtccaggtttgatgcatgagacagggtgctcagggctgatgcactgggatgaccctgagggatgggatggggagggaggagggagggggcttcaggatggggggcaccatggtaccccgtggcagattcatgtcaatgtatggcaaaaccaatacaatattgtaaagtaattagcctccaattaaaataaattaagtaattaagaaaaaaaaaaaaacaaagttcatggaacaccagggcccaatgtcacatagatagttggtgtcagaggagagatcagggccttggttgccagtgcaagatattaaattgcataaaatgccttgcactcaggagttactcctagtaacttcagttctgaatttgttaacttctcttttctgcatgcagaacttaaaaagaagtggaaatattagtactagaccctaagaacattagttagaaagctggttcttttacatactggtatcatttaggcaaagtacagatttggggcctcagtgtattcattccaagttgaaaaattagtttggtaggccttccatagatctaacactcataatttgaagcattttcattttaaaattaaaaatgatctgcctgcctaataaaagagggatgagaacacaaaaggggggggaaaatgctacaatatcataagtctttgtcacttggtagctttgaaataagtttgctattgttaaatttgctggtgccatcttagcaaggcaaacagaaatataatgtttgttaattgaactatagaagtaataattaactttgatgtagaatgcaaagtcctcagtagtgaactctggttgtataagtggaagcagttatcagaggccaaatcagattagaaaggaaccattccagttacacctgggtggtgttgagagtacaccagtcactgagtgccttttacacatgtaacgatattttcctcagatgctgcaggaaaacgggacgaacgtgagaactcattgctgtgagtaaccagtgtctgggcagaaagctgctgctgccactgctatgtcacttcagtcatgtctgaaagctagaatctcttaatcagcaccctggcctggggagaggggtggtaggtggagtaaaatgttgagatgctatccgagagatgctcttaccacattcacaaggtgagatgctcttattcctgtagtacttgattgagtagatcaaactttcctctaagaagctattttgcccctaaaatttgtaccagcaaccctatttggggagatgaaatctaccttcagaattcagggtgctggggatggagtatacacagttcccacaggctggctcggcacaaaggacagtgaggtacctctcagaccagcaaggtcacctagggggaatggacactgcctcaccacctctgatgcctgcaggacaggtgggacatcaggtactatgctttttctccagtcctgagaagtgttaagattgagctatggaacaacaggccaatcgtgcctccagagaaatagtggctgggatctctccatactgtctgctctggctcatgcctacggtatgcttactatccctgtctcccacctctacaatgagcatctcctggatatcatctaagatgtgtttacttgttctgtttgtttgtttgcttttctcttgattcccctgattcatgcctaacaagtgatcaggttgaaaaaggatgctcagtagatgattgctgattggggagctgattggggacttgattgactcatttggaataacttgtccaaatctagcttaccacagattctcacagaaacttaagagagaagctgttttattatctagccaaagatatgtgtgaattttgttagggatctttttcagaatattttcaatgagtattttattatacaacaaattttctttggagaccccccttcctcctacttacagctctca

SEQ ID NO: 32892 - DNA, 1990 bp, Bovine  19866880637000
  misc_feature (1)..(1): n is a, c, g, or t
nacttttgacctataagccttttcccagtaatctgttcacagagggtcttccctgcccactccatctaaactagatggcatctgcccatgtacacaatccctttcctgattattgttttttcttagaattctaaatatttagaatatctctaaaacatgctatattttacttatcttgttcatttttacttatcttgaattttcccttagaatgcatcacagtaggaatttttgtgttttattattctttcttcagtatccaaagcagcgcctggcacacattgtgcactcagtcatcatttgtaaggtgaataaaaaacctatggtgctcatgtgtaacccaatgtttattactcccaatagaatacactgttgttgttcagtcactaaatcatctccagctctttgcgatcatatggactgcagcaggctagtcttccctgtccatcattccctggagtttgttcaaactcacctttactgagttgatgatatcatctaattatctcattttctgtcacccccttctcctcctgccttcaatctttactagcaccagggtcttttccaattggtaggctctttgcatcaggtcaccaaagtattagagcttcatcttcagcatcaatccttccaatgaatattcacaggtatttcctttaggattgactggtttgatctccatactgtccaagggactctcaagagtcttcttcagcactgcatttcaaagccatcaattctttggcccttggccttctttatggtccaactgtcacatttgtacatgactattgaaataccatagctttgagtatgcagagctttgttggcaaagtgatacctctgctttgtaatatgctgtctaggtttgtcatatcttttcttccaaggagcaagtatctttttattttgtggctgcagtcactgtctgcggtaattttggagtccaagaaaataaaatttatcagtgtttccactttttccccatctattttctatgaagtgatgggaccgaatgccatgatcttcatttttttgaatcgagttttaaaccagcttttcgctctcctctttcactctcaacaatactggccatctattagagcaaatgtggtgaagtgttaagctagagtaagaatactcactgactacatgatgtagtctcagatttttcacttaattctttgggtcatcatcatcttccctttcaaagtgatggtgctatattaacctgggatgttaaaaaatgcataaatgagtgctttgtatacatagaggcacaagaaaattgcaagagggtgagtttctagaccttcttcctctacatttacctccctttatttctttgtttattttaatatattggccttccataacatatttcatattttatttacctcagataattattttaaaaagcataaatggaagatccactcagatcattaacaaaaaactctatcgttgtatctgggaacagtatttgtactattactatgaaagatctaaagatcacatctttgacccacctctttataattatataattagacccctttgtgttggatgagattaaaataggatctaggtaacacggtgactttgttcattgttttaagatagaatcacatgagatcatccagatatagcacttaacatcatgatcagcacataacagtttgcctttatctttgtaacttattttagggttcttagtataacaatgaagtctaaatgttgttcttcaaatcgtccatttaattagatgttatgaagagacaaagaaaattatgtttggtatcttccaaaatataagcagaaatgagttttataaaaagacacaattggttgcaaacttcctctttacttgggtcccacactttcctcctgcctctctagtcactaccaagtatatctcttcaccaggctcacatatgtgacaagataaaaaggtctgtgcgggaaaaatataggggtaataaatcaa

SEQ ID NO: 32893 - DNA, 1828 bp, Bovine  19866880653492
  misc_feature (1)..(1): n is a, c, g, or t
natttaaatagaacactagaagattctgtggacatgtttatatgtgtaaatctgacatgtagacaagagataaaactatgccatcaaaagtccatgtgaaaaatagatgctaggagaggaaatgtcaaagagataagataaagttctaaaaaggaaacattttacagttagaactttccaaggaggaaaagtagaatcttcagaggtattgagtcagctcagtggaggggaaaaaaattaggattttctagtatgagatgtgtgattggcaggaataacctttagggttcctgtcaaacctgaaatttgatgactttatgcctacaaaattaccataaaacttccccctccactttttattcattctgccctctgttccccttgtcactgtttcttttatattttgttttcagtaagccttctgagaaacccgtttagattcatttattctagacattcaaatttaagatttgacctctcagtcagtggttaccagacaatagtagcaataaactatttcatttctgatttgatttcatcttgcatttcccaagatacacccaaggaactttgttttcattgactcactcccttatttaaaaatacacatgcttattatgtgtctaggatgaagaaagcattataggatcaggagaaacttggagaaataatgtcatgtttcctgcctccaatccaaatatctattgccaaattatccaaatgatgagtttctgattgtttcctgaacaaaattctacagtttcccctaaatatcattcctaaatataacatgattccttataaattcatttaaatttgaagctctataagctgaaactccagtactttggccacctcatgagaagagtttactaattggaaaagactctgatgctgggagggattgggggcaggaggagaaggggacaacagaggatgagatggctggatggcatcactgactctatggacatgagcttgagtgaactcctggagttggtgatggacagggaggcctgatgtgctgtgattcatggggtcgcaaagagtcagacacgactgagcgactgaactgaactgatgatcagcttggaacaatctcatacagagtttgtctttcattaattctcatataaatatatattaatttctaaaaaatatacagttcctcatgtacaattagaattttcaatatgtcacaggagtggatatcagaaaattacttatattctgttttagtcacaattaggtgtgactgtgcatcacacatacagaagtacacgcatactgtggtctgtaagtctgaatgtgaatcaggacaggttcagtggcttactggggacataagctgcttttcaatggtgactctgctacaacatctagcttccacccactttttggtctcagagagtagttccagattcatccttcatctctacccctcagccatcagaactaaagatagggaaggagagagaatgtcccctaacttgaagacaactgcctggaagtgacagacatcacctcctcctatttccctttttgcgacccagtcatatggtccaaggtggcaataagtggggctaagaaaaaccatggtatctatatagctacctacccaactatgaatcagggcatttattattgaggaagaaagggagaattgggaataactaacagtgtcttccactcttttcagtatttgaatttagccctaaacagctgtgtattgttctctctagagttaatatttgaatttggctctgtatccaaaataataataatgtgaaatgtattaaaatatatacataacatgtaaaatatatta

SEQ ID NO: 32894 - DNA, 1922 bp, Bovine  19866880714493
  misc_feature (1)..(1): n is a, c, g, or t
nctaggaggattttagttattgtatagaaaaataagaacagcggccaaatcagtaaactttctcaccttttgggaagaaattagaggattgtagagaacaaaaaataaaatcagcaacagtcaaataaacggacatctagaacaaaagcaagacatgggtcaacaattcctcttaattatatataaatttttcactttctgggaatgactgaaaagttctaagaatcatgatctccatgagtcaggctatggcccacaagtgtggaaaaataccaaaatgagaaggcaaagataattaatggcaatggattactctatcctctcatctccaccttgatatctgatagttcacaatgtataacaactagagattcctggtgaatgtctgtaataccctacataatctcacagtttgtaacactggatcagtaagggctggagaccaaagagaatgctgggaatgcactggttgttattttcagaagggacttgtttggcaaactgaaggaaatattgagtgtctgttactgaaagagtaaatatagtcgtggattgttcgtgaaagttggggcatatcagttgcagtgatactaaggtaaatagagaagtggaacccgaatgaacaaaggcagccatgttgttgggtaagggtgggtttatcaaatattgacaaacatgaaatgattgtaatcagtcactgtcaaaggagaacaggtcccctcctctcttttacaaatgatccaattaaaggaaacatgttggctataaaagtcaaaatcaacaatgcactatactctgacaacccatccaacatataaaatcaatagtgcattctgctgccatgcagcacaaagcgacagcagcaacttccccacctctttagtcaaatatgacactgtatcaatcgatcaaaactcagtacttattgagcaaggcttctgaagaatgcatactgcattgtacttctatatccaccccctgctcattttattttgataaattttaacttaaaggcataataccttagaatgttctgttgacacatggagtgtttatttgtataatcaccatacaatttggcattgactacgtttacaacatgattataaagcactgtagggctagaaatgcaaatgccattaaatcaagaactgtaattttggttctgtctccacaccattgctttgtccaagtcccccattcagagtgacaaacaagacatagatggttccaattagtcatcaggcttgcactagaactaaaaacaatctgaaagggaaacaagggggtgctggatatggaacaaagtgtgagtttgacaggataaaaaaatccataactaaatatttgttgtcatgtgaaaagggcagcagagaggaatcagattctgactctgtgtgcccttgaacaaatcatttttctactctggatcttgagcttctataaaactaaggaatgggtttaatggactaaagtaactatacaatgactaaagttttaatagtcgaatataatgctgtttaaatagtctcttcccaagatccgtagtcagaataaattttctattatgacagactgaattacattttataaacagtatttaccagaactacgtgcaatgctcgctgatgttttctagtctatcagttttcattttctttataaatgctgatcatgactgccaatggatcacaacccacagcttgaaaatcattgttttatggccctttgctttttcttttccctgctgctcatgggccttctttcctcctttctccctttcatttaagcatctcaactgtaagttccaagctctgatcccttgtatttagctgaatttatattttctccaaatattctatatttctccatcccatagggctcgcacaatacaaggaacctcaactggttctcaacaaatt

SEQ ID NO: 32895 - DNA, 4018 bp, Bovine  19866880867539
  misc_feature (1)..(1): n is a, c, g, or t
ncacaactcttgatagagaatcatttctttttcctacctagagctagcactggtaacatcctagctctgcacataaaatctcagaggccagccttcttgctccccaggactgtgcagcctgccctctccctttgtcctgtgaaggactgatgttccacaagttgagcccactttggattacagcctgtaataaagagaggatgttcggcctcctccttagaactcaacttacttttcaggcaggaactgaccagggtttttcaggagttttgaaaagagaaatacgcaatgctgtgcagcaagtgctctaggtccctttgctccccatatagaggtcacaaactacctattttaagaaaacaagcaaacaataaacaaacaacaaaacaaacacaaaaaccaattttaaaaaacagttctgtaactcccagggctacaactagggctgaggaagaccgctggcagcccttctatcattcctcagctgaaagcaatcttcctggtaatctgtggacatgggtagagcctgatccatcttccatcccctcaaaaatgttgcttgtccactgaggttcttttagatactttcttgatttagatcttgtcccgtgacttctcttttttcccactttcctcatctgtgtttcctgttgtccctgtcactgatgacatcttttcaccatcaagtccctcgctccatgaagtccttgtctttccccttgggtacatatctcccccaaaacactagatgttctttgaggagaacaattaggcccttcatattctggttttctttcaaaggacatagctctcaaaagctatttgttgatttttttcttgataagttgatatgccctagaagttttatactccatataatcaaagctatggtttttccaatagtcatgtatggatgtgagaggtggaccataaagaaggctgaacatcaaagaactgatgtttttgagttctggtgctggagaagactcttgagagtcctttggacagcaaggagatcaaacggccaatcctacaggaaatcaaccctgaatattcattgtcaggactgctgatgaagttgaagctctgatattttggccacctgatgtgaaaagccagctcattgtaaaagactctgatactgggaaagattgagggcaggaggagaaaggggtgacagaggatgagatggatggctagtaccaccaactcaatgaacatgagtctgagcaaactctgggagatactgaaggacagggaagcctggtgtgctgcagtccatggagtcacagggagttggatacagtttagtgaataaacaacagcaaacaacaacaaaaagtttgatagccaggaagaatgaatacagatcactcatttatcaattttttgagtgtctactatctgtgcgaaattttaataaatgataccttatttcttcaaagttttatttaggaacaaagataaagtaaacaaaaaatgagccatagagagaagatggaagtttctgctaagagagggagtttgagtttttaccattgctgtttagaaccccaggcttacaagttctctctctatttttatttctgttcatgtgtggggaaagccagagggatatttctgggtttgttgaggaaaagatggaggtgttggagacattaaaataagtttttctggcctctacttccaaggttgtactgaagaccagaaagatatatggatacagagcctccggctaaaaaactgttttgcagagttcattttaggaaaataaagcttgcctctgttcacagacaagtcagaagattactgagtgggggtagaagtggagagaagtagtattagcagatagaactttttgtggcagaactctgtacttccttgtcttatgtaatccttatccactcacccagggctgtcattcctgcctccgtgccctcaagaacaaacgcagccagtatagtgacattttaataataatactttgtacttatacagcacctgtcagccagtgatctcaaagtacttcccctgagattaactcattaatcctcacaaggataagtgactttcccaaggtcacagaaaagtgaacatcagggatgggtgggagcctcaagttccctgctcacatcaaaactcagaggctgtccacttgcctgcctgtctgccacaaaactgcctctcacatagcccacactcgcaaagccaccgtgcctttgtaactgcatgcttgggttttccatggaaattgttttgttcaatcaatctagtaataatcaaaccagctctgtttagaaagtcccccatccatagctggaaatgtaaacattcttggaagggggcagagatgattagaatgtactaccctgtagaatgtgtcacctcgtgttttagatttgggggttagctgcacacattttgctcatcccagcagagtgaagtatgtgggggaaggcatatttaactcaatctgcttagcaaactgcttcatgagcaggctgactaagagcaagattcagccctcaaatgtggctagatcctctctttcccatggaagtaaataatatccagtttcaggggtttaagctggcacagaaaggatgcccagggcaacaagaacacaaaaacacaagacacaggggccttggacagctgttgatctttgagcactgggacagccctggaaagagtctttttctagaaggtgcagtccaggccctccagctggggtttgtagtgggatctcactcctacacaatgtctggattaccacacaggtgcccaggaccagagtcatatatatcagccttgactgaagctcatttttgctagaattgggggatgttgaatttgaagttccaacaaattgtgaacgtggaggaaaggaattgggagcatatggtttaatccatgtttcgccagtttggagtcatggtcacagaaagcttacctgaaaatactaaggacatccctggaaaatgttactggggaaagtggtgcataaacagaggttcaaagtgtcttcagtattttctgaatcacttgggactggctcaagaatcagtgcaggaaaatgcctctaggtgagcagggagaaaagacagaggtagggaacagtctctatcaaccttgttcgatgtacagactctatctatgtgcttgacaaggtaattaagacaaataagtgagtgccaagtatcttataaatacactaaaagattttagaagagataaaagttaaccagagttagtgttatcaaaacaatttcatggtgtgactaaaatttacacaaggcccttgagacaggttggctggaattgaggggttatggaagagtaaaatcatcataataattgctatgtattaagcccctactttggagggaatgatgctaaagctgaaactccagtactttggccacctcatgcaaagagttgactcattggaaaagactctgatgctgggagggattgggggcaaaaggagaaggggacaacagaggatgagatggctggatggcatcactgactcgatggacgtgagtctcagcgaactccaggagttggtgatggacagggaggcttggcgtgctgcgattcatggggtcgcaaagagttggacacgactgagcgactgatctgatctgatctctgatgtacatattgcttatatcatctactaaactctaaaaatggtgtaataccctgatagaacttggtggaacatggtcaggtgatgagggcaaaaatctttaagagagtgtttatccctgctgatattcagctaacatatttcactgacataggacatttactcccttaagaaaggtgttgcttgggctccttcaaagccattgttgttcattcgttaaatcatatccaactctttgagaccccatgaactgcagctcaccaggccccttctgtcttccactatctcctgggaggttgctcaaactcatgtccattgaatcgggtggtactatccaaacatctcatcctctgttgctctatt

SEQ ID NO: 32896 - DNA, 1855 bp, Bovine  19866880915224
  misc_feature (1)..(1): n is a, c, g, or t
ntgactctgtatacaggattctcctgtcctctgaatcaaatttcctcacagtgactggtgactcccatttgtatttggaagctctaatgaacctgaaatgaaatttgtagcttcaaagctcctataaatgtaaaatatgactatcaaacggtctttgagaggaagaggatatttcctgctctcctgccccctgggagaatattactgactatcatgtctctttcatttcttctttaatggaaaacctccctgaaggacaccttgggctctgctattgtcttcatttccatagctgtcttgagctaagctttaccctaggaaactcctattgtgaggctacctttctgcaggttcctcttcccagctctctcttctctctccccttttctcacctctcttttgtctcttcctgtcctagacagcgtctgtccatttcaccctctttctcttgtattattacaatttaagtatcatgaagtggaagtcagattgctgagctttcggagacagatgagaccaagcagtccgccgggagcactcggcaccagcgtgcgcagtagcccagcatatggagttgaatctccagatactgacattaacactcctgcttcaggtaactcatttagctttggtgtcattttacaataaatataccatccaccgacacaaattagacagctattgagattaattttgaggcactatcggcaacatcttaaatcaaaaatcattctttattagcatgcttggcagtatagtgtgcctgccctcccccctcctgatccctgccacagaataaatgaggccccatggttgacatagcgcatcaagtgttttataatagtctaattgtagctaatggtttgtgcagctaattaaggccctatgaattactgtaatcagtcaggctcatcctttaaaccagatagttctattcaaccgtccctttagtaagaaacaatatgtatatgcacacacacacatacacacacacacacacacacacacacatatatatatatatatgtataaggacatatacacactcacacaggctgtaatgatcagccaggttcatctgagcacaaagagattaataagacttttctctcttcattacaaaatattgatttaaagaaggacacatttccagcagcagctccagtccctgtagatggggccaaggtagagtcttctgtatgtcttctacctgaaaactgaaacatgagttaatgcctagtacagcagctctctgactcttctcataatccatccaggttgcagcccagagttaccttttggggcatttgttaagttgtgggaaaccagacacttcagagaaatggtgacaaagaagccacctgaacagcacagttgaaaattcagaagggaccaaactccatttgtgaaccagctggttgacaacactatcaacatgattaagcttctttgatagcagttaccaaggatttagaggaagaagttactgaacaattctagaagagctttcctctgttaaagaattgtaagaggaatgggataattttttttgcagtgggtttgctttgatgagcatattctaaacagaagatctgtcagagtacagaagagttttccaaaggcctgaagcatatataatttcttggtttatttgaaacttgactggacatagcaaaaaataactttggaagcaattctataaggccttggggaaacagagaaaaggagcagtaggccttctctagtaattgtatctgactctttgagagggagaaaacatcctatagaaatgtcatccatatgacctctgttggaaaacatgcaatctggtccccccagggtcccattgtcaatg

SEQ ID NO: 32897 - DNA, 1736 bp, Bovine  19866881014842
  misc_feature (1)..(1): n is a, c, g, or t
naatatgtcatttgttcttgaatttgtttttaaacattgccagtctgaagtggctatttggatttgtcaaactttttcccttataacttctgcagaaaatgtacaagtagagataatcctagtaacttattaaaatacacattttgagaaacaattacaaaaactgtttttttctttcacaattatttgaagtctacaagaacgtatttttattcactaaaaattgaaaatagtttgtaactgaaagcttgcttgactctagcaatagatcgtttattttactgactgggaggtggggtagaaagagagatatcatttagtgactgacttgaatacaaaaattaggctacaggatgaaggcatttaaggcgtttggtgtcttcctcccctcagggttaactgtgcatagcgctgcatccctgcaggcaactgattttgtcacaaaatcctaccttagtaggaattcaattatggcttgcaaagtttatgtgaaaaaaaaaaaaatgaacgcagcaaagttatttcatagtctcaattcagataaatgtaaacgtagtagggagtgcaatgaccttacacccaggaagtgtgcatttcaacatctgtatctgtgaatctcaatctcatagggccacgaggagttgggacccaatttctcctccaattctaaattgttgaaatttgttcttattcagttttaggcctggactattaagtaaataggtcaatactccccttgtttttaatctctatatgaataagctgttttcccttcctgagcctttccaatcccaaggccttaaggcttagccagaaggacccgaatatatcaacagtcaagagcaggaagctcactagcaaagaaagtctaaaacacttgttctcatctgtgtacaaaaaaaaaaaaaaaaaaattgcagtgctccctgaaggccaactgtacttgactttgcagtaaagagctatatgcaactaaaatactcttagcaagcattttggggcagctacgatttttgttgtgctaaatttatggaatttaaataattataatgaattgatttctaagataattacacttataatacaattttcagagagtaaagactacatagtaaatttgtaatattttatccattacaaaatttaaggaaatgaaaagcaaaacaaaaatacaaggaatcaaaaaaagtcttatttatttaattgttaatttacttactttactggtgcttgggagttctttggctggggtgggtgtatcatacccttagaaacaatttttttttaagtacatagatttttttcctctcaatacaaacatttctagtatgaactaaagaaatgtttgctaactaaatattatacattgtgcttctattttaaatcccatattgtacctattttgtcataaattgatttctttataggttaagtctcaattcttctttgaataaaatgtaaaattcaagaaaggacacccataagctcctcttttgaactttacagttgttgcaggcaggtgaactgcgggctcacaaatattagttggaactcaggtcagtggcctttattgtaagggaaaagaaatcaacttagaacattctagatggaaactttgcccttttgctgttgcctttcctcttagaaaacaagttaaaagataccattggccaggttaattgacttacaagtgtgtctttttaataagtgtcataaagtatgtcaggctgctgaaa

SEQ ID NO: 32898 - DNA, 1068 bp, Bovine  19866881033407
  misc_feature (1)..(1): n is a, c, g, or t
ntaccttgtcttctttggagacagagcattgttacaactaaaatctgaggaattgttgatacgctccaccatgtcaccagtgaaagcctaaccctagaggtcacagagcttggagagggaaggtccgggtggatggagagatgcaggaagggagtgttaagagggagaggtgcacattaggaatagaaaggacattctggggagctatatttcttacagtctaattgctcgatgttttatagaacctgatcattaggggatcttgggcatgattccacagagatgttcttgtgaaataaagcaagaggctattaaacagaaagtttaaatatagctacagggagacatccttcccgacaacttgacagatgtcttggaatgacgactccttccttcatcgctaattacaaaatcatttgtcttaaggagaggacaaaagagaagtaattatgaaaaacatgattcttaagggataaaaagataacatcagtttaaaacacggaagcaatcataaccacttagaatcattattagtttggtggaaccaatgacaggttgctttttagaaaccagagggaatggggctcctgaagcagagggaagaaaacattcagtttcttgttatgctaaacttatccccagactcccgagacttctttgatgaacagttcattaaaatttccgaccgcagatgaatttgagctaaaatacacaaatgttttaattatacattcctttttaattacactaatgacttgtaatgtgtttatgttggtttagagtttaatttcttcccttagattaggtggttgacttaaggactgtgcttttcagtaaaatagcatgattcatcaatgtttgattatgaattaatgcccaaatgcagaaaagctgctgccagtggagggatggccctgcccatgaacaactgcctttcctctggggctctggggcagagcatatctcgccattttgcaggcataagtgttggggagttctgagaaaaaagttctgaatagtttccagattgggaagatgctaaggagggtgataggagagtggataaat

SEQ ID NO: 32899 - DNA, 1004 bp, Bovine  19866881060493
  misc_feature (1)..(1): n is a, c, g, or t
naaaaattctgctttcccccatattacttgttttttgattatgaatagatatttatagagcattgggtacatccttaactctcactattttaaggtaaatgctatgatcattctcattttaccaatgaggaactgaggcccagaggagttaaatttatctgtgatcacacagctagtaagtggtagaattgttatccaaacctaaatgccttggctctaacgtctgtgcttttgaccactgtgtctttcccaaaggcaaaaattagggtcttctggataattatcacaaattctgaacaggttttttgttgttgttgttaattttcacctgttcagggagtgtctaatttaggggttaagcagaacccctgttaattgttttaaatacccacagctttccctctccttaatgacttgctcctaagtgagctctttctcatgacttggacttagatacacagctgtgctagacacagggttgcggatctctgtgcatcagagatcttgggtatatttcaaagactggaaaatgttcagtctgtcatacctgaattaatccctcagttctctgtacccatgggaaaagccccagactgattgctgttttgtatttccagctgttttatgtagtcaggctattccccagctccaaatctctagtgggtctttactttcagctgcactgagtctaaactcctttgacaagatgtcaagacctttcattatctcactattccccacacagcccatctgcttggtatgggtcagcatacgtacttccacttctaacttccacatccaggagctccatccatctttttattattattatttctttgttttataggagtgtagttgctttataatgttctatcagttctattatacagcaaagtgaatcagtcacacatacacatatacccccctcttccttggatatccttgccatttaggtcaccacagagcattgagtaaaatccctatgctatacagtccattctcat

SEQ ID NO: 32900 - DNA, 853 bp, Bovine  19866881089622
  misc_feature (1)..(1): n is a, c, g, or t
natctgaattcctagaggacacgaaaaagcagcactgggacttcattataagttggtcctcttgtaagttgctgcagcatggaaatgggaaaaccttctacaaaactgacatggagttcatttcatagcatgttatccagattggaaacacactccaacttgatttgttcatataaccagtctgtctgtgactgagcataaagtggaagacgtatatcctgagttatctcaatgtcaatgttatttcctataaactttgtaaactatgatatgtcctatcaatttaattatgataatgcactctcaagagtcccatttagccactggagggacagaaaccatttaccaggtgatgtgtccaaatatcaaattcaaagaaattaactggttaaattatttccatcatttaagccttcttgaatataaaagttgagtaagggaaacaatactaaggtttagaaatttaaatcacaatttagacctgactgaacatctggaaatggcaacccactccagtattcttacctggagagtcccatggacagaggagccgggtaggctacagtccatggggtcgtaagagttggacgtggcttagtgactaaaccagaccagaccagaaacatctggaatgagccagactttatcaaatgggctcagatttagcacattgattttttgaaggaattcctttaaaaaaaaaaaaaaagacttttgctgcatttgaaagaaaatttctataacactgtaccacttactgctctgcaagatggcttacttctcttacacatcttaaatattctagcagattattaactccttgatagcagggcactaggaagtaaagaaccaa

SEQ ID NO: 32901 - DNA, 2890 bp, Bovine  19866881239680
  misc_feature (1)..(1): n is a, c, g, or t
ntcttatgattttaccatcacaatatctcaagtagcaagagagccagaaaaggtgaaacaggaaggatgacagtagtcatcttgaggtccctaagctgatgggcatttcataaggccaggatatgcctcttaaggggaagattcaagccatatcaaccacccagctatccagggctgaatcacagcaacagtaaaacactaaagataaagctgttaatgctttcctaattgtttcctatgatgtaccaggacagtgtttgatactaaatgtttctgcatttgtatttccagttttgaccttgtgttataggatttaagggcttccttggtggcttagatggtaaagaatctgcctgcaatgcaggacactctagatggatccctgggttgggaagatgccctggagaaggccattgcaatccattccagtattcttgcctggagatttccatgcccggaggaacctggcgagctacagtcccatggggtcgcaaagagtcggacatgactgagagactaacactttcgatacaagatttaaagattcttttgatggtgagaaacaaaacaaaaacacttgaataggcaaaattctttgttacttacagatctaaatgagagaaggccaccatgcaggaccacccagagggttgtgtcttgggacagggtaactgcaagctagaactgtaaaaggaggtgtatttatggtaaatactgtggggttagttagtttcactggattcctcaagtctgggtgttttgagtaattctgcgggtccaagaatgaggggactgtcccaggatattacgtgtctggggacctcttgaatttgggtatgtatatagtgtaatccagatgtatttgaacttaataagagaagaaaacaaggggcaggatagaactgagaatttttggccatgacttcaaaactggataaagatagcacttaggaaatacactattgatctctcccttcaatactccagtactcttgcctggagaatgccatggagaggagcctggtaggctgcagtccatggggtcgcgaagagtcggatacgactaagcaacttcactttcacttttcactttcatgcattggagaaggaaatggcaacccactccagtgttcttgcctggagaatcccagagacggcggagcctggtgggctgccatctgtggggtctcgcagagttgaacacgactgaagtgacttaatagtagtagtagacaattcctcatggatgtccactaggcatctctacctcaaaatgtccaaaactaaactttttatcttcctaacccatacttgctgtttccaagtctgcccccttctctgttgctataatgttgccttttaccttgggaagtgtcaagtcttacacccatttctgctgtccaatctcagactttctcaccttatgtcatgcagtgagaagacatggttggcagcttgaccttctctaaaatgatgtagacaaaagtgttgaagcaacagaaaacagaactcaaacagatagaccagcagtgacttgatttacagtgagcaccatcataagtttttataacatgtcaccagcttagtcttagtcaatggcgttaatcttgggtgacaagtcatgaatgataagcagctgtaactgaagtttcccccatgacacatttgacagggccagaaatcttgacctgagataaaataccagctgcttgctcactagctactttcaaaccaaaccttgcagcataaagcatgggaaaaaatgtcaaaagtccctcaatctgtctcattaccacataataaaaattatctagcagtcatcttgaaagggacaaaaagttagtgtgaattagttttttattcacggtcttttcaaagggttactttctagtccatactactgtgaactctagtctacaatagctctccactgaccttgataattaacattaaatatatggacaataaacttaaacattgtggaaataagatttttggatggctacactggtcgctcggaccgtaaagaatctgctagtaggagacctgggttcttatccctgggtcaggaagatactctggagaaggaaatagctaacccactccagtattcttccctggagaatttcatgtacggaagagcttggctggctacagtccatggagtcacaaagtgtcagacatgactgagagactaacattaactctcacactttcttttccattgttgttgtttagtcgtgttttactctttgtgaccccatggactgtagccctgccgggggtcctctgtccgtgggatttcctaggcactggaatgggttgcaatttccttctccagaggatcttcgtgaccaggggatcaaacatgtatctcttgcattggcaggtggattctttttccctgagccatcaggaaagcctgcgttctcttcctgttgtgtgtgtgcctcttctacaggactataaaactgaagaactagaaagaattttagatttatctggtctaaaaagctcatttaaacatgaggcaactggagctcagtaacagaaatttttccaagggccacattgctattaaattaaaaatttggaatttcaacttatatcttccaactatgtgtcaaggttctttccattcatcactcttatcagcctttttttaggaggatattgaattgattgatgatgattcaatcaattaaatgaaattgtgttctttgtatcatctttggctacacttataaataaatgtgcaggcgcttctctggtggcccaatggttaagaatctgccttccaaagctggggactttggtttgattccttattggggaactaatatcccatatgctgccaagcaacaaagactacaagaaaaaaccttcatgc

SEQ ID NO: 32902 - DNA, 1753 bp, Bovine  19866881252042
  misc_feature (1)..(1): n is a, c, g, or t
ngcatgggactgagtattcctaatatctgagaatttgttagtcttttgaaatccttggccaggcctatgttgaatatggatgacactggccttgattgtaatactgatgttgatcctgataatgaaaatgatgctggaagccaatctcgcatttcatgcatttctttattgagcactgtctttatcctctgaaataatcctctctcacctccaggactctaaatacacgttgactccctgaagctttgtttcactgatattgttagtaatatcactcctctccatcacccttctaccaagtcaagcttttactgtggcatgctctccttctatgactggagaggcagccttacctttgcttcacctctgatacctgattataacagcctgatgtggggttaagagacaacctcaagtggagaaatattgaatcagtagcacgatgtaataaatatgcaaatctctcctttcagaagccttattccaggccatctaataatgcctccatatttcttcatgttattattctctctgctgcagcagggaggaggctgcttctacagcagtgctgttctgccttcccacctgtttacatttactatatgactgcctagggaaccctgcagaaaataatgcttgtgtgagccatttagttgactacatgtcaaaaagtaatttgaatcaaagagtcactaacttaattgatggtgatggctccatccaaaaacaaccaaagaaattgatgttgtgcaaattgcacatatattgctcttgaatttgtgagcatattcttgtttgccttgacaggattcaaattatcttccggacagctcgacacattacttaagatgtgcctgtatgtgaattttagctgctaaagggggcaataacaaccttcctgtgaaattaattcccatgacttcaacttcatcttgctctttcttttactcattccctgcacatactccttccactcctttacaattgtgttctaacctctaagtcattctagtcaccatggaatacagacctattgtctttgcagaccccatagagacctaaggtcttgaggagtaaaagatgacagaattttaaattctgtggacacattcagttcagtgattataggctctatttttgacttgtcattaggtattttttgatgggtagagatcctgaaaattaatttccaagtgagcatatatcccagcgagagctggtatttagatcctgggctgaggaggctgacccagcagtcatgcccccagagtggtggtgctgtgggtcagaggacagggtcagcataagaaacagtcagtttgcaacacttggagttatctgcatgaagatataagattctcaaaaataactctcagtggtgctgtcccagtaggtgccaattccagcagactatacaatgaagtgtataaagcattggatgaggggaagaaacacagctatcaggcttacctctgacactaaggagctgtcagacatgagccacacacaaacaaggtagtaatgtgagaagatttgaggttttctggcactaaggaaatgaattattataagatcaagaggaaggaaaattaagcagcaacccacctgcttggtctacccttctgttcatggcaatcattttatggagctagatatctgtaaatatcacctgaaaaaaacaaagatgtacatgatgttcaaagggtctgtgatggttaattttatgtgtcaacctgattgggctaaaggatgc

SEQ ID NO: 32903 - DNA, 1292 bp, Bovine  19866881299310
  misc_feature (1)..(1): n is a, c, g, or t
naacatttgtatccctcctggtcttgcaaagtgctgcttggtaaatgttgattgattgaaggttatttgattaatgttaagtgaactttacagtttattcactcaccataaccactactctggaaaatgaaatccatgagataaatattgtattgattaacctctctgcaaccacaatcatcaaataaaatgaataattcactcgctcttattttcacatgccagcctgaaatcttggtttccttttagaacaaacttggaattttcatgcagtaaatatagaaagtaactcaaaatctcctaaatttcaaatttatagactgcttgagagcattcaaatattgttaatactgccggctatttagatagccagaagacgtggaagggcctccatcactaatgtctcatggtttatttgaagtagctggtgtcatattgattgtaataccattgcttctatgtttcgttagaaacatgacttctaagagaataaaagtatcctttaattttaaaagttactgaatttcatcatgtttttctaaaaagaaatggaaaaaaacaaatttccgactctatcagctcttctctctgtttggtctagcagctgccttggacattttgcaaaaacatttttgaaaatatgatctgcaattttagacactcgatttttcctgtaggaattataaacactttttgagtccggttctctgtgcttcagtttttactcaaacttgatcaaaacccaggatgagagagatgtgtgaaaactcaaactcaagttcctctaccaaaaagttaaaatggataattcaaacagcaaaagtctgtcgatttgaatgtaatgtctttaaatcaatggttgcattttaatgtttcatatgattagcacattattgatatgtcatggataaataaataaaacattaatatctatttctaggaatttcaaacaattattaacttcatgcatgggaatttctaattttgtttacattttatgttactaagcctggtactaaggtatggggaaaatcaataaacctctagcaccagaggtagcatacccaaaagatatcatacagggaatggcaccaccaccatgagtgactgacacaaaataggaacttgcaaactggatggaaataaaacataaatacacaaaatgagaagaaaatattattttaactgttgctgctgctgctgctaagtcgctttcagtcgcgtccgactctgtgtgaccccatagacagaagcccaccaggctccgccatccctgggattctccaggcaag

SEQ ID NO: 32904 - DNA, 947 bp, Bovine  19866881584314
  misc_feature (1)..(1): n is a, c, g, or t
naaaaacaagatacagacagtatcacacgtgtatatctgctaagtgaaatgtagctataggatagggctgccattgttaagcagaaacatcagaaaggttttcagaaaagggatgaagctaggatggtagaagtaggaattagacagccaaagaatggagcagtaacaccattgcaggtggagagagtaacacaaagctcaaaaacagggaatccatatgatggaataagtagatacttttgagatggtagaacaataaaaatctaaggatgtccttctctgtatgaatttccaaagatggaatagcaatttaaccagctctttatcaaatggtagcttctcttatagcatcttatattaaaatatcatacaatcagcaagacatggttatattcttgttgtttctgaaagttatacaattatcttgatatttttgtaacattaagtgtgaaaaatttccttgttttctctcctcgtcttttttccagccacttttagcagcctgaaaatcagctttcattttgactgccgcttaacagaatttgattaaaaaaagtaaactaattacaacggaaacgcagccctgcgaagctttaagaaaaacacattattttgttttagggttcagttactatacattcatttatcatctttataagcgatgtgcaggcgatgatgaataggccctggctttgaatcaggaaatgtaaattatcctttttctttctttttttcattttttttaaacaaataatgagtgctaggtaatttgaagctaactgatgtgccaagaactcaaagatgatgtcatgcatgaaagcaacaaggtctacttatctgataggctgaagcaaagacaactcctggtccaggggatgcacacttgagttgaggtggttgtgtcctgcggtgacctagcggttggaggaccatcattaagagccagg

SEQ ID NO: 32905 - DNA, 727 bp, Bovine  19866881585993
  misc_feature (1)..(1): n is a, c, g, or t
naactgaggactttgctagtgcgggatcctgtgtgcctcagattccccactcacacgtgagagaaatgcacatagttacatagataactggttttcccaaagaagagcatctaaggaatatcaagtgtaatatatgaatacaaataaaagagaagaagcattgtttagttccccaaccagggatcaaacccacaccccttgcagcggaaacacagcatcttaaccactgcactatcaaggaggccctaagggagcatttcttaaactgaaggaagacctatgtgtgcaggttgaaagtgctttttgctatacaggcaaagtcaacaagaaaactgacagctaattaattctgggggaaacaagatcttatataaagaacaaacctcctataaacatcaagaaagaaagaaggggagagagagagggagcctggctctaagattaaaaatccttgcagaagggggaagatatagagttgaatgaaagaattaggtttgcataagaagatgggtacctcttcctccaaggctttcagtaaggatgccatgctgtatgcaaatattgacaatttaaatgagattaacaatttgtaaatcacgtatttcctggcatgtggtttatgctcattcagtgctagccctcacccattatcagagcaccaggcacctgaatgaggaactcctgactcatctctggaaggggtcacactctaggtactagagtctag

SEQ ID NO: 32906 - DNA, 1065 bp, Bovine  19866881821206
  misc_feature (1)..(1): n is a, c, g, or t
nagatgaattgtttattcttgtggaagtcctggtggcactgcgccttgatctctggccatctgatgctggggccagcaccctctcaaatataccagtcgtgatggtcaaagagagccccaccaccaatcactgcattgtacctcaactgggtccccgacttccctgactgtcaagaacattgagtaggtggtcttgaagttgtccaatgaaaggattaatgcactcctgtcaaaagtagctttaaaattctgattagaaatcactctctcttgcactgaatttgtctcaggaaatagagaaaagagaagctgtttagagacgtggttaaatccccaggtttggcagtcaagctgcctgtgattaaagattgggtctgatgttttatagctggttcaaaaatgggaaaggagtacatcaaggctgtatactgttaccctgcttatttggcttataagcagagggctgttgttgtttagtcaacaacaacaacttgagccacttcctttcttctcttggccctttgcacttggttgttgttgttcagtcacccagtcatgtctgactctttgcaaccccacagactgcagcacgccaaggcctctctgttcctcaccatctcctgaagtttgcccaagttcatgtccattgcatcagtgatgccatccaaccatctctcatcctctgatgccctcttctccttctgtcctcaatctttcccagcatcacagacttttctaatgagtcagctgttcacagcacatgaccaaaatgctgtaatttcagcttcagcatcagtccttccaacgagtattcagggttgatttcccttaggattgattggtttaatctccttgttgtccaagggactgtcagtagtcttctccagcaccacagttcaaaggcattgattctttggtgctccgccttctttgggggcttccctggtggctcagatggtaaagagtctgtttgcaatgcgggagaccagagttcagtccctgggttgggaagatccccggagaaggaaatgacaacccactccagtattctgtcggaaaatccca

SEQ ID NO: 32907 - DNA, 1363 bp, Bovine  19866882171462
  misc_feature (1)..(1): n is a, c, g, or t
nagatattaagtgctcactgcagcctctgcagtaagagttatctccgaagattatggactgaggggctcagtgaggaattcatagaagaggggagacttgaactgtgccacgtggggtagcaaggccttggatagacaggtgagtatagaggagtgagaagttgtgaacaagcatcacccagaagatgcagagcagtgcaaaggcatgtatggaggaagcataagtgtcactggcagtgctgactgccaggacacctgagtcctgcgtgaggcctgagctgccaggacgcctgagtcctgcgtgaggcctgagctgccaggacgcctgagtcctgcgtgaggcctgagctgccaggacgcctgagtcctgcgtgaggcctgagctgccaggacgcctgagtcctgcgtgaggcctgagctgccaggacgcctgagtcctgcgtgaggcctgagctgccaggacgcctgagtcctgcgtgaggcctgagctgccaggacgcctgagtcctgcgtgaggcctgagctgccaggacgcctgaagtcctgcgtgaggcctgagctgccaggacgcctgagtcctgcgtgaggcctgagctgccaggacgcctgaagtccctgcgtgaggcctgagctgccaggacgcctgaagtcctgcgtgaggcctgagctgccaggacgcctgagtcctgcgtgaggcctgagctgctaggacgcctgaacaagcctgttgtctaccttcatcaactttgcaagaccctcctccccttcctcttgccttctccctcacctatatggaaagtgatcagggctttccttgtaagtcagtgggttaagcagaggcacagtcctccagtaagatttcaggttaatggagggatgaggcaagagactgggcagaaacatcctcatgccttttgttccttctccactcaaatgtctagacaggagagagatttgggacaaaaggactcttggcagtatctaataacaccttgacgttatgtgttgaatcaaccacaggcttatatccctttcccaggctggagaaatgttaattaaatattaattcaacccttccctttcctgaccccattaggtcacaaatatttgttcagctaacctctcttctattgtgtactctcctctgtctcttctgcttggagagatgtcaggcagatttccacagtacctcccacccttcaaaacattcatccctgctctccctaagtgaacaggtctttttgtttggtttgagtttacagttgtttataataataacagaaaggaaaaaagctcttgttttgtgaatctgccacttggtaaggactaagataagtgtatcatatgcattagctcatttaac

SEQ ID NO: 32908 - DNA, 2860 bp, Bovine  19866880291489
  misc_feature (1)..(1): n is a, c, g, or t
ngggttaagtgtaagttccagtggccctttggagcccagtccctggaagcagccagcagagtgttggcagggtcagggctctaggtgtggtgtcaggagactgtaggctctgctggcctagaaaagccccaatggccagctacttggagcaccgtcactgggcgtggggggtgtccaggtgcttctaaccctgctctctctgaggccctcccactattcctaatcctagatggagaggagcttcagcctctttcaggcacagaaggaatgtccttcccagagttgactgacacctccctagggatgttgatactcccctcctgttcgacagaacctataggcagagtccctcccagccagattataccttcttgttttctgcagagttctcagaaaggcctcgagagggactcggagagactccagatggggagacttgtggtctctctcttccatttcggaggaatggagcccaagcctctatctatagggtagaacaaacatttagcagcttggaaccttctagatttctgcagctgacttggagaaggcttctgcatcacatggtctgtcagtcaatcgtggcgtgacatttgtgcatatccttagctaccccttgggccctggtggctgtggacagtgtcttctgtattccgtgagccgctgtggctccagcgtgggctggactcacgggatcctggtgttgttgacctgccggagcacgaccagaaggaacttgatgttctgagaaaggaggaagaaggaagttgtgccttgcagcttgtggtcattgagggccatccctaaaaataacagagtgcattcgtcaggattagatttggctgcgagtagtaggaaaagccaaatgacagcggtttacacaagatggaagtttatttctgtgtcctgtccgagcccggagctctgcagtccaggccacgatatggtgattctgctatacagattcccggggtgtggctttcatgtgctcacagctcaagacggctgcaaaatgtcagccatcatgccctgtgttccaggcagcaggctggaggaaaggagtaaagggggctcataggggaaggatccggaatttgccaaggacactgcccctcatgtttcattagctaggattagtcacctggcccaagtagcttcggggggagatcaggaggtttgggccctggctgtaggcggtcacatgctcagctagctgccctgtccctcgtcccggtttgtttaatacagatgaagggaggggagtggggctgagggggattgtgggccttccttttttttggggggggctgctatgcatcttattgggatccttagttccccagcctggaattgagcctgtgccccttgcagtgaaagcacagaatcttaaccaaaggaccactgggggaagtccccactgtgggcatttaccggaggtttttctcaggctgagaagctgagccagtggttcaaaggtggcagaatctccaccagggagatttctctggaggaggccagtcctgccttgggaccagaaagccacatgctccaggacaggagtggaagcaggggctgagcccaagacagaaaggctttccaggggctggagccagccccatggagtggtcacagtgagggaagtgggccaccctattctcagagggttggtgtgtgctgagacagtgtgggcctgtctgggctgctaggacctgggggaagaggacacgcttgggaaagatggaagacccacaggggcggggacacaggtggaccagatacggtgcttgtggggctggcccaggacgagggctctacttgagcactgtccccacctggcccacaggcctggggggtggcaggggcccctccaggggcgtcccacagcaccctgttgctgggcatatttgggttctctggagatctggagttgtatttgaaattccttgactttcaggtcctagcagctaatgagaatggaaagaaacaaaacccacagggctcaagcactttgcctgtgtggactgaagactttctccttccagatgagctgccttctctgaggcttcagtgaggggaatgtttgggaaagtagcttcttataaggcacagtacagttcagttcagtcgctcagtcgtgtctgactctttgcgaccccatgaatcgcagcatgccaggcctccctgtccatcaccaactcccagagttcacccagactcacgtccatcgagtcagtgatgccatccagccatctcatcctctgtcgtccccttctcctcctgcccccaatccctcccagcatcagagtcttttccaatgagtcaactcttcgcatgaggtggccaaagtactggagtttcagcgttagcatcattccttccaaagaaatcccagggctgatctccttcagaatggactggttggacctccttgcagtccaagggactctcaagagtcttctccaacaccacagttcaaaagcatcaattctttggtgcatttctagctaactgtttttcatgcagtcgctaagagtccgacacgactgagcgacttcactttcacttttcactttcatgcattagagaaggaaatggcaacccactccagtattcttgcctggagaattccagggacggtggagcgtggtgggctgccgtctatgggctcgcacagagtcggacatgactgaatcgacttagcagcagcagtataatataatatacttgtttattactgatttgaaggacatacaatttattcttgtgcttttatcttgtatcctgtgactgccttcatgttaatttctaatagttggtagattacttccaatttgtatacaatgtagaaaaaaattcatca

SEQ ID NO: 32909 - DNA, 1106 bp, Bovine  19866880357482
  misc_feature (1)..(1): n is a, c, g, or t
ntctggtagctttgcctccagtgttgcatctttgagtctccgcttccttatccgaagattgggcaccatcgttcttgtccatgccggggtggttataaggctccaagtgtgcaaaagtgctttgtaaactgtcaagtgctggtcttatcccccgtcccccacgcccacctggggccaggctctgaacctcaatggctgctgtgggtcccaggcttgctcctgtcccgacaggtggcagatgacctcgtctccccggatgcactcagcaccatcagagagatggacgtggccaacttccgtcgggtgccccgtttgcccatctatggcatggcccagcccagtgccaaggtgaccaccctgggggcacacttgtggggcagagggagggtgattgagccctttcgctgatggccttcctgtcccccaggccctggggagtatcctggcctacctgaccgactccaagaggaaactgcagcaagtcgtgtgggtcaacctgagggaggaggctgtgctggagtgtgacgggcgaacccacagtctgcggtggcctgggccccccatggcccctgaccagctggaggtggggctctcctgccttgtaccacccctccgttggaggccttctggggagctggcctgaaagggtcttcagaagcttgtatgctcctgttgtacagttgcagaaacgggccccgagaggagcatctcagggaatgactgattcaagactgtcatgctagccccgggtctggttagaaacctggaggctccagaaggggcagtgataggccccaaagccaggactggcctggccatagccggctctggtctttcagggctggcctgggggttgccttgtggcctgagccctctgtcccaccctcccctagaacctggagacccagctgaaggcccacctgaccaggcctccccccgatgccgacggcccgcagacccacaggttccagacatgcctcaccatgcaggaggtcttcagccagcaccacggggcctgccccggcctcacctaccaccgcatccccgtcccagacttctgcgcccctcgcgaggaggtgagggccgagcggctgaggcctccgggg

SEQ ID NO: 32910 - DNA, 931 bp, Bovine  19866880480560
  misc_feature (1)..(1): n is a, c, g, or t
nccatggcaggctcgagcaccggccaccagctcccaccctggcctcaggcccctccgccctacaggagcagagctgctatgggtcagcaaggatgaatcggaatcccctccctaaccctgagaggactccagggaggcaggtgggcggacttggttctctgtggtttcctgccagcccactacccttggccctgcctgaaggccactagagaagcctgctaggggctgagggggtgctgggcaacaggctcagaggccagatctcgatcctacaccaatcacggctcttttctcccctaagccccaagagaagagaaaaaaagcctctcttttctccaaatacccccaagaacatgaccctgtgctcagaagagccagggaatcccaatcaggggctagaccgtggctgggagctggcaggccaggccgtgtgcctgggccccagatgactggccagaggaactggtggacatgccccagcctcggccctggaagcactgagctcctcttcacctccatggaccccctggatcatggagagaaagctgggtccacagatcgggcctcagcctccccacctgtaaaaggatgctgggagggacagaacaaaggcggcatcttcctctttctgggagtgaaagctaatctagaaacctcagaggggatggataggcaaggagggcagtgctggccatgggcagagtctggtgtgtgggtactctctgctcagagtcccggctgcagggtctgtgtgcccccacgctccagtgctggaggagcacccctcatcctgaggtcagggctgcgggacgtctgtgttcagccacctcgtccctcccccggaagcactcacccctggctgggcgcatgcgtgctggttgcagcgccggcggatgggcttgggcctcttcctgtggtcgcacaggtgccg

SEQ ID NO: 32911 - DNA, 1327 bp, Bovine  19866880583995
  misc_feature (1)..(1): n is a, c, g, or t
ntttaacctgtcctgagacccccctggcaggctggggtacttctgcttctgttgtggcacacggactctctagttgcaatgtgggctccagagctcatgagctctgtggtttgcagcacacgggcttagtcgccctgcagcatgtgggatcttagtcccccaactaaagattgaacccatgtccctggcattggaaggcaaagtcttaaccactgggctaccaggaaaattcagagtgttgaaagaatcctgatgtaaaggtgggctaactgtagcttagagtggtcaagagcttgcagggtgcaaggacccgcagggtggcaggatttaaataggcattatacctgtttttttagacgaggaaactgaggagggaataagtgacctccctaaggccgcacacccggtggctgcagagtcaggtggatggcttggcccccaagtattctgaagcccagcccttctctctggctcctgcctcctgtggttcggagggtgggagcagctctgggagaaagtatgccacagtcctgccttccctctacctttctccctgtctgtctccaggtgggtgacggaggagtggggcacctgcagccggagctgtgggaagctcggggtgcagactcggggggtgcagtgcctgctgcccctcaccaacggtactcacaaggccatgccggccaaggcctgccccggggagcggcctgaggcccgtcggccctgcctgcgcgtgccctgtccactccagtggcggacaggagcctggtcccaggtgagctgttctcagagggtgcgaggggctgggctaataggcacttaccctggaagtccagaaagaggtgggtctgggaggggagctgccgagagttctggttgtccatgcaggcagagtttctggttgaatttctctccctgcatctgatttgatttttctcaaaactgagtccatcagctcccatgtatgctggaacatgggtttgttctcggcctttatattattcagtatctgctttgaccttcactgagagctaggaggcttgggctaatatccctgtgttttagatatgcgaattgaagcacattctttttagtatttatttttatttggctgtgctgagtctcaccaggatcctccatcttcactgtggcctgtgggatctagttccccgaccagggatagaagctgggccccctgcattgggagaacagaatcgtagccactggaccactagggaagtccctgaagcacacttcttgcattcaggaagtatttactgaagtgccagttacattgcaggcgcactgtgctaagaatgcctagaac

SEQ ID NO: 32912 - DNA, 2095 bp, Bovine  19866880660983
  misc_feature (1)..(1): n is a, c, g, or t
ncagacgtaatcgagcctggatgggctggcaggaacgggtgcagacgtccagaggaggctgatgcgtttataatgatgctactttgcaagacaaatccggccttagtgggctgacagtgaggaggccagggtcggggtgggagggaagaggctgcagtggcatctaaacaagggccacttcatgccccaaaccctgggaaatcttgatcctagattgactggatgtctccattcatctgtctgaggcagcaggagtttggggggatgggaggcatctttacttttcatccttcatccgagaggctgtaggccatcaacgtttccctctttgttgtttcatttccagccggtggtcagtgatggataaaggaggatgcactggcggggggtagtcagtggacacttcagagagagtggaaggcagggtagtaccctcaaggatgcagtagacaagtttgaaagaaagccccagggcaggcagatgagctctaaaacacaaatctagacactgagctttgaaggcacactctcaggacagtgctcctgtcaatatgtgtctccccagaggccagaaagatctagtgatgtggcccctgaaaggtccttgaaagcagggaccgtgtctgccttgctcaccgtcgttcccagcagctagtacagtgcctggccataggaagtgctcaataagtacatgtcagtatgaataaggaaatgaatgccactcacccacctgtccactcgggctagttatttccctcagtggaccttggtgtcctcattcaggaagtggagctaatgattcccagatcacctcctaagggctccaatggcacctgtcagattagctgatggccatcatagcactttaaatatgtgggaccccctaacagaggtgacagaagccatcacacctggggcctgctctctctcctatctcctctgccaaattccacaggccatactgaccacctggaccagtgggaagaggagatctcagtagataagactatgatgaagctgctctaggcttggagaggccaaggactaacttgtgcttttctccttcagtccctctctccctcttgggctggtcttgatccccacacacccaggaaattgggtttctggcaccttgagtagtgatgcttccaataatttcaggaatgccttccatgaaagagaaagttctttgaggaagttcttcctgaatattagtagagagataatgccactcaggtgggggcttgttcaggggttagtttcaaatgccaagtagagatgttactataaaaggcatctgggctagtgcttcccatcgattgttagacaggcaggcaggagggacttggaagacaacctgcctgcatgggatctgatctaagactcagagtttgggtggggggagtggaggtagactgaagacttggggtctagagcaaggaggaagagaaggggcagacaaatcatcaaggcatccagtgctgggcaagaagttgcgaccgtaccctcccacccaccctcaacaggtgaggacagggatacagtgaagcatcatcttctcttctccccctctggaccacctgggacatttttaagaatctctgcccccagcttgctgcgtgaatttaattcctgggcttgagcatctccacttggacaatgagcgggctggactatattggtgctctgtccctcctaactttgacattcatctgccagtcacacaaagggggctatgggaggcactggctcttctggggatcaggatccctgtcactgcaccccagaacccacacatctcctcccttggggcccagcagtcactgtgacctacaatgactttgagggatgctgctctgtaccctgcccaatgggccatgtgccaacacctgccttctccccatgcgccatccgtcactgtctctgtgtgtcgctgggaagacagcttcattagctcctccagagccatccatcccctggtgcagagacaatgaagccctcccacccacatcaggctgggagggcccggaaccctaaaagcagtttctgcagggccatcctgctgtccctcctccctgtatagctgtcccgccag

SEQ ID NO: 32913 - DNA, 1097 bp, Bovine  19866880670905
  misc_feature (1)..(1): n is a, c, g, or t
nctgtgttctcggaaccctcactgtgaccctgtcccttgggttgtattcagggacccctcccctctgccaacagcagtgcctcccgccttcctgagaaggtttgctctgtgctggtgtggttggaaccacgtgggagcggtttagttacaaaggagtgggtccatttcatttcttcttggacagctcctttgttctgcacccacctccttgctcttcagctcactctccttggtgaagatggccacccgggaagccaggtccttcaactccttcttccaggcctctgggaggagggggcaagatctggccaactgatccccggggtctccctgtgcaccctccctttgggccgagtgtggaagggggataggtggaagagcctcctctcctccctgccctcccacccaggatcttaaagagaagggtattttcacagggcaggtggtgccctcgagggaaggagctggaatcacactattggttggtgggtgggagtgcttgctgctgacatttgtgtcccagcctgtgtcttagttgggaaatgctggagaatgtttggctacgtgtaccgagatgtttgtgatttagactcgctttgcctctttcaggaaaatgaagccagggtggagattcagttgataggctgtgccagtggctacaacactgagcgactcctggccaggttggtaaagagccctgcaggaagccttctgggcccctccgccccttctccaggatcctccctgctctttggggaaagagagaggcttggcccaagtggaggcctctgaaatgctgccccagcactccctatggctaactgttctgactggccggtgcctgagcacacaggttacaaaattcagtatttccaatactgttcctggctagagcctggaagtcacatgtctgttgtccagatatgtttgtcctctgctttttctgactcctcaaacacctcacagccaagcaagggtgcatttctgaggaccttggacccccacccacctaagagccatggccttttccttctcaggcacctgtccaagccaggcacccttggggccaggtatagccccaaggtatagggccctag

SEQ ID NO: 32914 - DNA, 674 bp, Bovine  19866880687113
  misc_feature (1)..(1): n is a, c, g, or t
nccttgagccccaaggaagtctgtgggtatgggaggttttgtcccagttttgagtcccatcccaggctcctgggagatgccagaggagctgccccaagggggagggagccccagggcccagagagcaattctgggtctgccttgggcccagcccccaaatcccagggctgtgggagaccagacgtggccctgcctttggcagctcagtgacagtgtcccctcagaggcagcactgtgctctctgggtggcctctgtccagtcacccctcgaggccttccctgctgctcgcatgtggagtgctggccagagtctgtcttaaacaggtgcatgtaggtccaggactcgggccaggctggtggctggcttacgtgatcctcggacctgggtttgatttagagtgtattcattcattcagtcaaccagtatttcttgaacacctgttgtgtgccaggctctcttctagaaatagggcttccgtggagaatgggacacaaaagcatgcaagacactatgtactgggagaaaacaaataatccaccatccagtgttcagcggtgacacacacctgtcacagccgcgcctcctggccttgtctgtccccagggcagagctgagggacacgctcccagcttgcctgtccccagccaaggcgtagagtgaaggccattttttg

SEQ ID NO: 32915 - DNA, 1983 bp, Bovine  19866880690913
  misc_feature (1)..(1): n is a, c, g, or t
nactgcccagggcggtgggggtggaggattgggctcatctctcacctgggcctcctggatggttcccacggtccactcctccccggagcggcagaggtgcgcacaggactgcagctccctcaataaaatccccagagcccccgctgccttgggatcagatacaagctcctgaagcctgggtctcaggcccccttgccctcaacctgagctgccttcagccctctttgagttgctagaatctgatgagcctttgccctcaccatccgctctgccctaatgtcctttctcccactcttcctggcaaacaccgaatagccttcaagtctttgcttaaatataacctccttggagaaaccttcccctgccatcctatctaaaggtgacctcctcacacttcctcagagcgccctgtatttttccttcagggtgcttattgtcagttatggttacacctttacttggggggttgttggttcatgtctgcctctctcagaagactgaaagcaccaccaagggtgttgggtttaacatctgggttattctgcatccctgcgcttagcatggtgctagagaaataactgttgtgaagaaaagaggccagtgcggaggctgtcctgctgccatatttccagcaggtggcgttccagggccgaacttcatcagtcccctgactccaggagggctccccgccttccattctccaacctcctcccaccccctgcctcggagccctctgcactctgctcacgtctttgagtcttgaggttgcacatcatggttatgtttgccctcatctcctacagggggctagtggcaactctcctgcagagacctctcctgcagaggccagtcaaacccctttctttttccatggtgcctatgcagaactcagaaaactgaatgaccagtgggaaagacaatgactcagtctcatggagagagggggcccctggaggtgaacattaaggcttggagcctgactcgtgccgttccagattgcttcagttggccctgtgggctgtagcctgccaggctcctctgtccatgggattctccaggcaagaataatggggcaggttgtcgtgccttcctccaggggatcttcctgacttaggaaacgaacccacgtctcttatgcctcctgcactggcaggctggttctttaccactagtgccacctgggaagttaaggttttggcacctgatttctggattccagtgcttgctctactgcttactaatgtgagactttgggtggactacttaaccactttgtgccttattttcttcctctgtaaaaatgggactaggtcctgcctcatagggtgttttgagactagaatgaggaaatacatggcaagtatttaggatggtacctgtgtgtagtaaatgatcagtgaatgacagtttttactattgaacaattctttacccactatagaatccccattccagatgtgggagagactgcctgtgcttgtgcatagcgcgcacacacacacacatatatgcagggaaaaacacaacaacaccacacacctcttccagctgtgggctcaggcaggccacggagcctcctttgccaggacaggggagcccagcagatgccctgtcaccttcctggcactctgcctcctgcattcagtgccagtggcttggcaggacagttgccatggcagcaggtgaccaggcctgcagtcagggacagtggctgggccctggctgagctctctggctctttaaagggggtggcttcctgccaaagcacaggctctcctgctgctcatacgttcagctggcatgagcagccatggccacatccagagtccaccagtctgcttgccctgggaactggaagctaagccagtcgctcactctgggtcttccctcagaagccctggagggtcgtgccagcacctcattggcttctctctgtggggtgaaacaaaacacacaaaagtgaattccctctcaccaccttga

SEQ ID NO: 32916 - DNA, 1689 bp, Bovine  19866880752321
  misc_feature (1)..(1): n is a, c, g, or t
nctagcattattctcgcaccttaattgaggtgttaattgacaaaaaaaattgtgtatatttaaggtatgcaatttggtgttttgctatatggatacattgtgaaataaccatccacagttaagctatttaacatctccatcacctcacatagttttttcttttttcatggtaagcatacttaaaactaccctctagatctctaagcagatttcgggtatacagtgcagcgttgttcagtgtagtcacgtgactctacgttagatccccagaacttactcgtcttaataactggaagttggcaccccttgaccaacatctccccatttccctcattctccagctcctagcaaacaccattctattctttgcttctatgagtttgactgttttcaattccccatataattgaaatcatgcagtatttgtccttctatgtctggcttatttaacttagggcttccctggtggctcagagagtaaagtgtctgcccgcaatgtgggagatctctgttcgatctctgggttggcaagatcccatggagaaggaaatggcaacccactccagtattcttgcctggaaaatcccatgaacagaggagcctggtaggctacagtccacggggttgcaaagagttggacatgactgggcgacttcacttcacttatttaacttagcattgtgacctccaagttcatctacatggtctcaaatggtaggctttcttttttaagccagaataataagcctttagtaattatttttgtgccttgcatttatgtagaggaactttctagtttcagagccgcatttgagcctcatgataacctggggagagcatagaagcagttagtgttattgcatctcatagatgaggaaacatacttgactgaagttaagtagtttcctcaagctttcactgctaatgtggggccaggactcacgtttggctttcttgcctcttagcccactattctttaccatcacagtgattttgcggtttcatattatgcttgcagactgttttcccccggtgtttgtatttggccaccatggtggggcagtggtcatcctctgggctggagaggtgaagtgggtgtgctggtggagctgaacctttaggttggtagcctaggctgctcttggcagcataagagcagagtaactgtgatgtgacttctcattttcctttcaactttatcccctcaggcaatgcgcagagccatctctaggaatacggccatgctcgtctgttctgccccacagttccctcatggtgtgatagaccctatccctgaagtggccaaggtatgtgggagaaaggactagtaggcagacagatagagattttagagtagagtctaatggtgccttataggaaagaagaaagtgattttgagtttagattgtagcccagtggtggtgaataccggtcatccaccctgaggtaagctgcacagctttatggaagcctctgaaggtgactagctcgggctgtgggagagggataacacacatttaaactgtacattctgcagtggtactgacattttgattcagatcaggaaataatctgcatttaggggcatgcctaccagagggtgatcttcacccactgtgctgccccagagcacccctccctccttcccaaccctgcagttactagagcaggacaccacacaccttcaag

SEQ ID NO: 32917 - DNA, 2202 bp, Bovine  19866880814522
  misc_feature (1)..(1): n is a, c, g, or t
nggaactggggaaacggtaggatacatcctccggtctaaagaagattgaagtgttgtagtggaggagacaggcataaaaattattttgacaaagtggtaacagagaaagtataaatgtggttaaaagcactgactaaaaacacccaccagacccagtttgaaatcttagctttatctgtcacttctagctgtgtaatcttaggtaaataacctcactgaggctgtttccccatatgttaacgaggataatcccagtacacagctgatggggttctagccgtaagtaagataagacacacgtgaagcacacacacgcaaagcacttagtagagtgtgtggcacaactattttcagtgtgatagcagatctgtgtatgtacatgaaggtaaggggcctcaaagagggagtagcaaacattctgagtggtctggtggtgtctgttgagtggaaccttgagccgtgaataggaattcatcattaagaacaggtagcaagaacaagggaaaggaaaacaacaaaggagcaaggcactcagtaaacagaaaaggcagcggttagtgttcatgtgggaaaatctggctcacgaagggactggcatttttggttgcataagcagcttaggatttgtcctatagacaatgggagtcactgaaagattgttaagcacagaagtaaggtcagggtattatgtcaaaatacagctgagcaaaacatgtagtgtgtagtaagctgtgcacagtttcatagttctaataatcaaacacaaagaccttagaaagcaacagtccaatgccaattttgtatgacaaagtgagatttaaaaaataaatctgattagaaatggaagaagctaaagcaattctaaagtcaaccaaaaaatatgagaattatatgaattataactgagaccactgctcattctcagattctgtgatttgagactcaggaaatcatgaccaagtttccatcccttatctcttctgatccaacaaaatataccttatcattaataatcgcaaatgatggactaccttccctagcaatctgctttctacacaaggtgtctattaagcctggagacataaataacatcttacttttttacagactgaagatgtcttggacaatgttatgcatttttgtctgttgggtaagagacactgaacctctttagttttaacaataaactttgcttaagtaattttttttttaattacaagaataaagagaaaaagatgtgatcatctaaaccagcagagccgcacactccttccaaggactgagcacttgctcaccttcacgaggaggtcggtgagctccttctccccactatacactgctccggaggctttcccctcttgccacaagacatctgcagagaaaaggcagaccactgggtcagtaagcaggagcctctggggagacagattctaaagaagaaacagggagaaactcctctgtgtacaagagttggagcagaacctccaaggcgtccttacattaaatcaagaaaaagagcttcagtaaagagtgtcacagcaaaataaagatgaaaggtcaaccaccaccatcaacaacagtgtgaaaaaggtagcaacagcatctaggtacaatagagaacgtccactagtaacgtcgtcatccccagctggcctctaacagcagaaccacttcttctgtctacactcgttttcagttctctgtatggctccgcttgacctttttctgcagtggcttccaccttctctccctttctagccagtcaaagggagtgtggaaactgctatgggcacagttagcagaaagagtaaggcaaagtgcaaaatttcagcacagtatcaccagagctggagtcagggaactgaatctctgactggacaaaccatggtgagatgtgagccatcagcatcgtcctcagacaagcctggaaacccatacagagttagccacctgcttccagcaacatgtgctgcagcactcagcgtcagcagcacagccaacactgggagaaggaccagaggaaaggttcctgaccgggatgtgaggtccgaccttccactattctctgaggtcctcccccagaaacactccccaataccaatacaaatccgttcacgtgggggtctcgggtcctttaagacaacatgcctgtgccctactgaaagtgagtggtgagaattatagaagcactcaaactgaaaa

SEQ ID NO: 32918 - DNA, 1233 bp, Bovine  19866880826725
  misc_feature (1)..(1): n is a, c, g, or t
nccctagggagccgtggcctctgagatatccgggaacgcgcttgggtcccgtccctgtctgagaagtgaggggccatcagggccagcgcggcccttagtgttggcgagccagttgctggcgctggaggcccccaacttggtttttgttcggctcatcccctgcctctggccccaggtggtgatgaaggtggtgcagctgctgcccgatgggcaccgggtgaagagggaggtggacgcggcgctggacacggtcagcgagaccatgacgcccatgcactaccacctgcgggagatcatcatctgcaccttccgccaggtgagccccggcccacgtgccgtccccgcgtgcacagccccaggagggggctgacctgggtgtgaggcggctagggcgccccacaggaccctcaggggctctcagtcccttctatgcctcctggaagtcaaggtgatccctgccatggaagcacgcccagccctgactttccccggctggattctgcagtgcttggtggggtgtgcaggggtgaggttcagaggattcggcagctgctgtggccctgggacccatcaaggatgtgactgctcagatgaacaccctgtcctcgatccctgtggtgccaggcattcaccctccagtttctgggccacgggaggccctgggggtactgggcaggaggcaggtgggtggatgggtcctggggagcggctgtttaatatccggcaggaaagccatccagtgttttcacagctgatgctgcctgagggactaagcattcaattatacacatcagaagttttctataaaagtccagatttcatataaaaattcagaattttatccgatctagaaaaaacaagccctttagtcagccatggtcccaggcactctgttgcacgtggcccagctggtggagtcacataacccacgggggctgctctggccatcagactcgggggcctctggtctctgtgtggagcatcagttcagttcaattcagttcagtcgctcagttgtgtccgactttttgtgaccccatgaatcgcagcccgtcaggcctccctgtccatcaccaactcccggagttcactcagactcacatccatcaagtcagtgatgccatccagccatctcatcctctgtcgtccccttctcctcctgctcccaatccctcccagcatcagagtcttttccaatgagtcaactctttgcatgaggtggccaaagtactg

SEQ ID NO: 32919 - DNA, 1337 bp, Bovine  19866880894958
  misc_feature (1)..(1): n is a, c, g, or t
nagcagtgcgtcaaatggcctgtggctcatgggtgctgtctgacactgccagctactgtcccagctggggcccacctctgcccacacctcctcttcctagaccataagccagagcttgtggatcagggattgttaacttaggagaccaggtcaggagagcctctgttgtcactgactggtgacagggaggccctggacatgctttgtttctggtgatactctcgctggtcagggaggtcctagaggacagggtctgaagccagtcggtgtcagtatattaattcaatccaacatgtgcttcctgttcatgctatatttactgcccactcgtacacctatggccagttgatttccaacaagaataccaagaatattcaatggggaaagaaggatctccgcaactaacaatgcttgcataatgggatatctacaggcagaagaatgaagttgaacccctgcctcacgccgtctaccaaaatcagctcacaatagatcaaagccccaagaacaagagctaaagccatagaactcttggagaaaatagagggataaatcatgaccttggattcctagatacgaaaccaaaagcatgagcaatgaaagaaaaaaaaaaagagagaaataaactggtcttcatggaaattgaaagcttttgtacatgaaaagacattttcaggaaagtgagaagattacctgaacagaatgggggaaagtatttgcaatcatatatctgataagaatctctgtcgtagaccatcttctagagacaggcagtgtgagtgctctcgtgagcaggacagaccagcagacatggttcctgcccttgttggaacttaggtgtgtgggagggagaatcactgatgggcacacaggctgttcaggccaggcacgcagtaggtgcttggcctgagttttcctgtggctatgggtctgaaagtcctccccaggccatactcggtgctacccgctcctggcttccactggttctgcttctgaccccacatcctccctggtgactcctcctctctggtctccctatgctgaccttgctccccgccctccagtcctgtgccacctcctccgtctcccctcaggtactccccccagctgaaagtggcccccgcagcagtctggcctacaagtacatcatccacgaggacctgctgccccttatcgggagcaacaatgtgctcctggaggagacagacacctacgagtgggcactcaagagctgggcgccctgcaccaaggcctgtggaggaggtaccagcctgcctgactgcagcccccttgtggggcagcccagggcctctcgggagaggacgcaggaggggtca

SEQ ID NO: 32920 - DNA, 1065 bp, Bovine  19866881009816
  misc_feature (1)..(1): n is a, c, g, or t
naaatagctgcccgtgtgcatatagtccgagacatgctaagacgggtaagttctgacccagagagacaagcactggctctcctgtctggaggggaatgtaaggggctgagggccgtggcttcaaacagccaagatactgataccccataaagtctccaagatgaaaacggaaaaggactgtttctggaatattgctgccaatacaataagcaccttacaccaggtgccttgatgcaaagcaggcactggctgagcgacagcctctggggtaaagcccatacatctagcaggaaatgtctgaactgggaagttgaggtctgagagatgcaaagagctggtaacccagacagcaaaaataaagaccatctattttgactccaccttaaaatcagaagtaaaaaaattcgtttgaaggtgctttaaagacaagttccttacttctagaagtaccttttcttcttttttttaaatagctgccttagcagcattgctttttattcaagtatactctaaagcaagcagggctatagataagaaaatgctgggaagtgtcagagtgtaaatctaaagaatttgcacccttaagatgtctgaaacccccaaaaacttggcatcggtgccagggacacagaacagacattcactaaaaatgtgctaaactgacgagcttcatcaaagcttctctcaagggtgaagacaggattggttctttttaagaacctgtttccattaggaagcccagggtgaggcaggtgtgcagagttaacttttactggatgtaaagatcaagcacagatagctcttattcccagaggtcccccccatttactgaggtggttttttgggtgggagacctgacccaagtctgctttagctggcgtggtttgagagagcaggtgccaagcatcaactgggggggacctggcttctggatactatcagctttgttactctggatctgaatggttagctattcttcagcccagtaacccaccacctaattcatgtttgctccctttgtttgacaaccccgacgatccattcgaaggctcaacgagaaggctc

SEQ ID NO: 32921 - DNA, 814 bp, Bovine  19866881049867
  misc_feature (1)..(1): n is a, c, g, or t
ntaggggggaaccccactgtgagggctgctgagctcagagtcttttggtcccttcaggcatatgccacctatttgagtgtttctgtgatcggaagaagacagaatgaaagaaacggggcaagagacggggtggagaggaggaagacaagagggaaagactaaccgctccagctgggctggaagagaaatcagtctgactcatctttgtgtattctttcacccgctacacaggcctgacgcacagtaggcccccaacacaggactccgctgctctcatttgcatccacttccatttaatatcaccataaactaaggagaggtaaaagagacttgggtttggagtcaaaagatctagctgaatctacgcccaagtcctgttatgccttaatttcccctttcaaggagggaccataacacctcttattttatctacctcctggtgtgtctgtgaagaataaattttaaaaaggtatccttaagcaatctgtactctcgtccccattaaattaaaaaggattcggttagattacaggtacaaagtattcaagtgaatggggctcctggaactctgtacagaggtgctgggagggttatatgggcttatgcacaggagtgctgagcaccccacctggcgcagagaaagcagtccgtaccccggagtaattagaacagaggccgtccttcattagcgcttaaactgtgctgggggagagtacacataatatttcatttaagcctcataaaataaaaatagttatttcagagcagttcaataaacaggagcttcaatcaagggaataactatgtgtcatga

SEQ ID NO: 32922 - DNA, 1438 bp, Bovine  19866881081154
  misc_feature (1)..(1): n is a, c, g, or t
ntaaagaacctgtctcccaacgcagcagacataagagatgtgagttcaatccctaggttgggcagatcccctggaagagggcatggcaacccactccactactattgcctggagaatcccatggacagtagagcctggcagcctacagtccatgggtcacaaagagtcagacacaaatgaagtgacttagcaagtacacacatgtaattgctgggttacactgggatatggtatgcaaatgttcaattttataagacattgccaattttccccctaaagtgtctgttcctgttatgcatcttcaacactcgtattaagagcaccagtctttactctgttagaggcaccccaatggctacagaagtgagggcccaattggcagagcgttcactgccgaggtaaggtccccagtgccctccctgctgaccgaggaggtggagggagctggggagggtagaatacaaaggaactcaacagattgagggtccaagtggaggtcaccttccctctggtatcagtcaggcgcccagtgggttctcaggcctgagttaacacaggtccaggcagggccctcctgggtcgggagagggtgtggtggctcagggcaggagcataaacattccaggggtttcagggggtgacttctaccgttagttgggggcaggggaggtcagctaacagtgatgttcagggaaggtttactttatttctttaagtcccagatcccctagaagcgaatcgaggatggaacaggaaactcaggggcctggtcatcgaaagcatcagagggccccggggcaaaatgccttgcttagcatatccagagtccatctacacacctccagagggcctcccttcagccagggccgcaagaaggggaagcagagagcgagcaggcaggtggtcccaccagacccctggaggagagcagctcacccctggatccttgctggacggactccacctattcctctgggggaaggcacagcatcctcaggagagggaaggggtgcgggtggaggacggagaacctgagacgcttgtctccagtgaagcgaagcgaagcgaagcaagagcttgaagcttccccacagcgacgcagcccagatagccagaccaacagttctgtggctcccaggggggccctcaggggaagaggactggctggcctagtctggctttggcatcagctcctggatgctgagtctgggccaaaactgctcctgagggcaagggggggttgggtgacagcctatagctggcttctcctggaccgccaactgtttggcttggggagaggcccatgctaggtcagccccctggccccggaggcacacaacgtgcctttgctccaacgcaggtgtctggacgaggaggtaggtctacggcttttccttctggcttcagaaatggtctctgagagaaaaccagggtcctg

SEQ ID NO: 32923 - DNA, 1693 bp, Bovine  19866881133955
  misc_feature (1)..(1): n is a, c, g, or t
ntgtgaatactacaccactttacataaggggcctgagcatggaggatttggtatccactggggtcctgaaaccaatgctccatggatactaaggaacaactgtacctacatttctggagttttgatcccattctcgaaggctagttcccgataagctttgcaggccatcaaaatactttctgtccccccagaggtcacctgtaataaaaaagagagttggggtagctatcagcatgcactttctgccttgatcttgagggtatctgatgcagagacgttcaagctctgggatgcacactttagagcacctgctgctgtctttcagaaggaaaatttgactttattggctaagcccaatcttggctcaggagaagaataaaactactgaatgatcagaagctccacactgtatgtgtaaacaaataaatgcgtatctgcccagaccacctgtgcacaacacacttacatttctgttgttcatccaattgcagacaggacagggcattttatccccttccagaagcatcagggttactgactgatttaaatttttaatgcccactaaagaatgtgaaactgggaagttatagctctagtcaactatgcaatacattagaagaccaagaagagacactcaggcattccagagtaaacttgtgattttgacaagtttgaaagacagaaaagcaaggagcctctgcttagtttattaacttacttatctgaagtcaaaacaaaagtcctaatgttcttaaagaaaaatgtcttcctgaagctaggcctacctagcccctctgacacaggcaaattttacctgagttgatacaaaaatactcgaggtcatttccttcatcctgtttgcctcactggactacaacctcatgaaggtggcgaccagtctgttcatgacaatattcctgatacccagctagtaaagctgacacccatcagaccatcagttaacatttcctaatgcctgatttgactctcagtaaaccacaaccaatacaggtacgccatacccatctggctatcctttggtagcttctaagaatgaaatcatttcaaaacacacacaacacacaaaagagccatagcattgagctaggtgaatatttccttagatttgtcatctccaaagattcatacaatcttagaaaacttttccattttataggtaagaaaactgagccctgagagactgattcacccaaagtcatccatcttttgataaaaagtaaacctttctatattttcgtatttagtgtaacctgatgagatgaaatgagagcagatgatggctgaaatttcctaaagtaatatccacatataagacaaaaataccataggctacaaaatccaagcggtcaggagttacgtggcagattaaaaagtcagtcattttgtaactgaggaagccgtcgggaaacacatgaccgtcatccacacaggcaggtactgagctggggcataggacccttgtttgtaggctcctgcgtttctgcttacagctgaggtcagtgctgcagatcgcagtgtgtcctggggtccagcataaaacctcagaacaccacatgaggaaccaagacagctgtgaaggaagtcaggaaagcaccaagttctcagtgcactgttctctcactaaggttcagcaagacctaagcagaaatatttccaaatccctagtcactca

SEQ ID NO: 32924 - DNA, 1276 bp, Bovine  19866881190865
  misc_feature (1)..(1): n is a, c, g, or t
ncagtaactaaatataggagcagctggtgcgcacggggtgttgcagcagctccttagcacagatctcggggcttcagataaggtagaattctcattgatgagggcaggagccctgtcggagggctgtggtcagtgtttaagcaaaaatcatctctcctagcatgatcttcctttcatggaactgaatgagaacgggcagccagagtggtggtgctgacacgaagattttggttgactcaaattgtttgtttagtcagaggcccctcacattctagggcagctctgcctaaggggcttcacacttagtgaagagtgggctcatacctctctccatcactcatgtgtaactcagacaattctctatttttctttaaaacaatttaaaaccaaaaagaaaagaagtgcaatttggtgtattccacccacagccccccaacccctggcccaagcccctttctctgtctgctcctgttatatgctcaataaattcttgctactttttggtcaaagaggtccagtgttgggttggtgctgaaaggagctgacagtgaagttgggcagccttgtaggatcgcttttgggggcacactctagactctcatcatctcaagtttgttcttccttcaattctggggccctcctatcccatcttgggcctcatatgcatgtggtcctgtcaccctccggtctcagccctgcctatgccaaagagtaacaggccttggtcacctgacttacaagggggactgtcagctggactttataaggaattctcccttggtggaggggtggttttgggtgaaggaagcgtggtttcctacccagagagtggagtggtgattttaggcagttggaacctcttgggagtctagggcatatctgtgctgtatgcagagcatcctctggaatgtaagggccctcttctagtcatttgctttgacagccagattttacaggctcttcctgttcctgctttgaggtccaatctctgacccatattataggatgtctgagcctgccaccacctggtgaggtttttaatttgactagtttttaatcaatgggttctgactctaaggcgctactgctcccacctggtggcagctgatagaaattacaggtatagtgcctgattgaaagtagtcagtagtcaacctagccagtcccaccaggattagcacagaccctgggtaaacttggagatttaccttccctttaccttcttttgtgaggccagggttgccttaatgatgttccttaaaaaagccttcctcat

SEQ ID NO: 32925 - DNA, 1437 bp, Bovine  19866881305649
  misc_feature (1)..(1): n is a, c, g, or t
naagcatggtgtattaactactggacccaccaaggaaatcccatcctcacccttttttaagcctcttctctccagtgatccagtcttctttctctcgttttcctgcccctactttcttttcccctggggtcttgccgataaactcagcatcagggtgacaattaggtctgtgactaaaactgtaaccttccctccttactgtctcatgggggagggaattcttagagaccacccactctccaaacggtgaggtctgacccagcagagattttgtgtccccatttcccggtcgcggaaggaggctggcaaaggtgattgaggagaactgggagctggagaagtggacagggctttgaggctgtgggatggagggacaggtgtctctccgtgcacctggctgcaccctgcctcctccccgctgccctgccagttcagtgagtcacaggccagcatacaccagagtcctcacacctgcctggacacgagttgaggtcttggcgaggtcacacatattaaccctccaaggaagttggttgggctgggctgatgggtggattagcggctctgcaggccgagcctgatgtcgcctgggctctgggcccctcaggaggaggtgagtggcctggggccctccctgtagacttcctgggtccccggggaaggcaggtcaagggtgggtccttggctgattgcggatgggcacttcatggccctgtgtcttcccaggcgcaggttcctttgtgagcagcagaccagcctggtggctggcgacagaatacccgcgtctgcatgctgaggaagatgggtgaggccgtggccagagttgcaaggaaggtcaatgagaccgtggagagtggctccgacaccctgggtgagtgagggcatggcttttccagctgcagggccctctctccgtggtttatttaatcaggctggaaatgagatagaaggggaaggtgaaagacaccgaatcagtatgcacccttcggcataaagggcagtgttccatggactttattgtagttgtgctcagtttgtatatatggggtcccagcataagacatgtttcttggtatgggtcataatcaaagaggtttggaatgccctgagtaggggtgtcatctgctgggagcctgtctgcttcctcagactattgacagctgcaaatatgtatgtgcccttggaccaggtgatggtagacaacgctccaagtagccccaggacgtgcacaggtgcctcatgagtgtgaccttgctgaatcttcacagcctccccgtgatggatgttacccaccaggcatgactagccacagatttcagatgaggagatggagggggggaaggacaagtgggctttttccaggtcacccagccaagaggccccttttcactccacttttttaattgaatcatgtcatatatttgttgaactggtcat

SEQ ID NO: 32926 - DNA, 927 bp, Bovine  19866881398856
  misc_feature (1)..(1): n is a, c, g, or t
nccccgcttcctttcaggatttcatgaagccagcaaaaagggtgtccctttgctcttccctcacggcgcctgcctgcctgtgaccatttctgatcctggtttccggggccaggggtggcctggcgggatcagagagaagagatatggttcccagggtggatgggaggggcagagccctttgtggaactcagaatgatctgatcaggtcccagtcactgcggctcttgggcttcttgcctctcaattttcttttgcgttaacctgaggatgtaccataaatattcatagagcttcagatgttgggcaacgactcctcagccttccctcacatgctgctgtgccctggatggacttggctttctctgtgcctcggtttacccatctgtgtagaggatgtttccttaaggcttcttaaatctcagggcaagggatcatgtgtctgactctttttgtgaccccatggattgtagtctaccaggctccttgatccatgggacttctcaggcaagagtactggagtggattgccatttccttctccggaggttcttcctgacccaaggatcaaacccttgtctcctgtattagccggtgaattctttaccactgagccacttgggaagctcccaatatattcactttttttcaggttcttttcctatatagattattacagagtatcgagtagagttccacgtgctatacagtaggtccttgttggttatctattttattatatagtaaagtatgtttgtttaattccaagtgcctaatttatcattccctagcaccccgatgtttcccctttggtaaccataaacttgttttcaaaatctgtgaagtctgttcgtattgtgccaataagttcatgtatatcatttttaatttgatttgacatgtgagtgatatcatgtgatattttctctgg

SEQ ID NO: 32927 - DNA, 746 bp, Bovine  19866881488239
  misc_feature (1)..(1): n is a, c, g, or t
nttactgggcatgaggcattgtaccaggcatttgatgaattagtataacacaaacagacccacataactaaccatcatgcagagcaaggcaatatgcttgatgatgaacaagatagaggtatcctctaaccttttggaactgacaggcttagagtaaagagatgtgaaattataagaattattgggtattcaaagagagtttgaggggagaacttgtggtggaagcagagaatgacatttaagttgaaaagagataggaaacttgttggattccatgaacttagatctttctggagagctcagacttattctctcttctctgatgtctgctcttctaagtcaaacttcctgaatgctgacttagaccagtctgtagctgccagctccagagctgtgagtcctgctcagatgacaggttaccaggcaactgaccatcataggggagacaggtggggtggctgagccatgtggggtcattagtcatgcctctttctttcctcctttcttctctaaaatatcatcaaacagctagtcacatggactttgggacaatagaagcacaggtaatgccatggtaggtaaacccaagagcctggtagagactcaattttcaagagcagttaagtttcatcaaagcacccagcgttactggccacaagtccagaatcccatgtatgaagcagaaaagacacaacaggtgagataaaaggcacgtcatcacaggattttctcctgtacactgatgg

SEQ ID NO: 32928 - DNA, 1891 bp, Bovine  19866881495162
  misc_feature (1)..(1): n is a, c, g, or t
nacccttgctaatgcattttctgtaatggattctctgacacttagccttggttttgacttgttgtggttgtgaggttgtgtccagagatggcactgggcaatcccctctggactttttgctctcaactagagactttgtaagacttccccggagggatgtagcgagtgtcagaagcaggcctatagctataaacaacttgctttaaaggactgaaatgatttgtatatgatagggacttataagaatatttgaacgaaacgagtttttaattgggtctaagatgatgcaataacgagggattgtttcattaactgtttgggcagtcagtggaatggtttatacatttggaatgcttgacttacgtgagaagcggatagtcagagtaggtatttgagatatgtctgagtgagtggtttcctttgcagtgacccttgcaacatctgtccctaagtggcagatgatggtttgaacctcaaaactgagtgtcgcagtcccctcaagcagatccacaaggactagcttcaggctgctttgcccaccaggaggcgagtcagcagtggaccccagggtttctggagacttcggaaccctagtcactgctctgacactgggatgctcagaggggatgtaaggcaagtaggaatggctgtgtcatcctgcccttcccaggcgtccttttccaacctactgaagcatgggaatctaggtgtatgagtttgctaggactgctgtaacaaaggactataaacagggtagcttgaacggcagacatttgttgtctcactgttctgaagactagaaacctgaggtccaggtgttggcaggactggttccttccgggggcagtagtaacaaagaatgggccccaagcctctgccctaggcgggcagttttctggccgtccttcgtgttctttaacttgtaaaagcattgtccccatctctacctttgtctctgtgtggtgttctctctgtttgcatgtctgtgtccacacttcccctttttataagtccaccagttacattggatgaaggtctcatcctcctctagtttgacctcatcttaactaactacatgtgcagtgaccccttttccaaagaatgttccattctgtggtgctgacagtgaggacttcaacatatgaattattggggggcacaattcagcataccacacgagggtagatagaaatagctgcagcatgaatgtagctactctattggttactgctgaaacccactctgttttgtgggaagtgatcagatcagaaagaatcctgtggttaaggggggaggtacccatcctggtctgacaggttaaaggtatagccttctagacatgggttagtttgtcttgagctatgaacatgacttgtcccctggggctgttggcctgaggtcacacatggcaggatgctggtcagggcacagcgtggactgtagttctagggagctctttttagtctgtttatctcactttacaagagtcctaagctcgtgcccttgttcaaattctagaaccaactgtctttactctttgctgagataaatgcaaaagcctggtgcctagtctgccattcgattcttcttccagccaagtgatcacttgatgatcactctgcaactacaaatttctcttctgtatcttgggagagaaagatggaattaacaaagacgggtgattcagcaagtgacatcatggtcacaagatagattttgcaaatgacaacaggaacacaatgtggtcctacaatatttttgtgctttctcttgaaaaattatgctggcttgctgtttcctattgctaactaaggcaaaagagtcttcgcaaggttgcattcaccttatattctacttaaaacggcagcgtccatgaccacctgctcgtccc

SEQ ID NO: 32929 - DNA, 1312 bp, Bovine  19866880364407
  misc_feature (1)..(1): n is a, c, g, or t
ncagtatacattataatgtatataagatgcatatatttaacatatacctatagaacatatacattataatatacacatatgcattttaatataacaaatatttcaaatacttacatttcaaggtatctctacaggctcaagccacttgtgactaaatgaccaaagatgctgggaaaacacttggcctgcactcagacaggagcttccccagattatattaatagaagcgcctgacaactcaggggctgcctgcactgctgttcccatggaaaccgacattagatctcagaagcccaaagcatgaggccttaaactaatcattgtggcaaaaaaataaaaaataacaacccattttcttctcacaatgtggaaatggtgattaggttaatagaccctgatcccttttcctggggctatgctttttataaaaaataaggacagaaatccaacctttgaaaactttttccacacctgttcattccaaactacatcaatacccttcccccgctaacacttccaaattcaataggacccccatccaacaatttagtaggaattagaatactaaaccacacagcctggatctggatctgtttcttttgatcactttactacaagcattgaaagaggaaaaaagagaatacaaaattaagcgaaaaactgagacctctctggattaagagtttaactgtgtgtattagtttcttactctgcagttctaaatggaatacactagagtttatggataaaatatgattcataagcaagattaactagctagcatctgtactacataaaatgcaagggtaggcattcatttccattaatgctacttgtataaggaataaaaccagtcatgatggccatctggctgaccccaatttcacagactaaacaagagagaaatcgtaaatgtgtatttccatcaaaggaacagaattccctggagaaaaagatactgcaaatctaagagtgaggttgcagcattctttttcagtaaattgtggaaaacagaccaacttctagcgtcttatgggcaggaagcgaagactgaacacaaagttgcttgaatttagatatgaacaaagctcacagggacttccctagtggtccagtagttaagacttggcactttcaatgcagcggtcacacgtacaaaccctcgtcagggaactaagatctcatatgccacgtcgtgcggccaaaaaaaaggaacccacctcatatatttactgtaacacttaccttatctctagttcaatcacacatgtcttaacccaccaaaccaccctgtcctttgcaaacagcaaca

SEQ ID NO: 32930 - DNA, 1851 bp, Bovine  19866880395518
  misc_feature (1)..(1): n is a, c, g, or t
ncccgaaccccccctcccacttccttcacttggctcagcctcccaagcttccacgatttggacataaacttctccccatccccagcaattcccagtgcatggatgctctaacagaaggctggagacagaacccacagctgtgctcctcagcatcaatatttttcttttctatcaacatatggaagattagacaggaatcctgttccttttcaatcttgagttactcacagatagattccctctgttttgtaatttccgggacattgtgcacatacaatatgtgtgtataaagttttggctttacctactcaaaaaatggataattttgcatttctgcttcctttcttcagtcttttccttttctttcactttacaggtatcattctcagaatctccctgtctattaaagaaaagaatccaaggaaggatctcttctctgaactgaagtttgtctgtaattctagagactatagttttagtctccccaccacactcctgacaagtcacaaaagaaagattaaagtcagctccagaggccggcaagaaatgtcccttcataaggttcatattttgtacaacctctgtcatttcaaagtaagcaactcacggatacccctagtctgcacatgtgtctttctcagttttggaagagctgaagtgttccactcagacattttattactgtatgcatgggatcacagtggtaagggtcaagaaacaagaccatcatggttctaagccagtccctcaatacctggatatattacttatgtagtggtcaagagcaatgagcaggcagtgtaacgtaacacctgtgttacatgtgcattcgttcatacatttccttttgtcatgtcttagctgctaatccagcaccaaccaggagaaggcagtacaggctaaacaacagaagctttcagttttctttaaagtgaaacagaaataagctgatggatattctttataatataaacctccatccgtgctggggaacaaaggaaacttctccaacactgtcatcacctcctgcacatatcttaaccctccctcacctctgtcgttctattttctccttctaccatctcctccactcttcctagtaagttaaaatacacacaatatattaagtggaaaaacatctgaattgcaaagtttcctaatcctgccttaaaccctcaaatttctctctccagcattattacttaaggcaaggtttcctttttagatggcatttgtgaagggcccatgatgtttttctatgacaaggcatacttatcatgagtccccaaggccacttgcttcattgctcaaatacagaaaaatttcatgcattgaaaaaagagctatttttttttcctctgaatatggaattctcttccctaagaacactaagagtggctgaaggctgctcactaaaagccagaaggaggattctaaaggaccctcaacctctggcaccctgggaatccaatcactctaccagccatgtggggtgatggagggggaatcccctcttgtgttctgcagggccctggggagaaaggacaagtagccatctggacatttaggcgagtccgtttcttctactcagccaagaagcacaggcttcatcaatcattcagccacacttccaagcactcttgtttgggtgattgggttttctggggtggttattaccagaatgctccgcgcaaaagtatgaagttgccaaattgggcctctctgccttccatctacaattccttctttaatgtcacctttatcctttcccccaagggcacagcgtctccacaccaacccgcaccagccagggctctccttggaaccctcccactgagatgttccctgtgt

SEQ ID NO: 32931 - DNA, 1751 bp, Bovine  19866880413847
  misc_feature (1)..(1): n is a, c, g, or t
ntttgtattatttctctgtcttcggtaaggttttttttttttttaataaatgctagatgttttagagtttggattcaattcagatagaaggcttttcccacagactcttgctcatccacttcctcccttgagaatggtgaaaaacagccctctctcccatcccctgatagggtgagggctactattatcttttctctcctaatagtcaatatattgagtatactgactccctcatctaaaccttgggtaaaggggaaagcagtgattgcttttaattggatgattgctaccctatgcttccctttggtgggatccccaaaaagacaaatgaccttttagactgctgctactgttgctaagtcgcttcagttgtgtctgactctgcgcaaccccagagacggcagcccaccaggctcccccgtccctgggattcttcaggcaagaacactggagtgggttgccatttccttctccaatgcatgaaagtgaaaagtgaaagtgaagtcgctcagtcgtgtccgactcctagcgaccccacggactgcagcccaccaggctcctccgtccatgggattttccaggcaagagtactggagtggggtgccgttgccttctctgcctttggactaaaggtcccaaagaaaaggactaaaaaagcctataatgaaggctttaacctttgataaccaatatatcataatacgacttttagccctgttacctgctaaacgtgtgatttgagcaagctgtttaactcatcagcaccttatattcctaacctatgaaattcctgtggtcagtgttatgataaataagagtaagtaggttattattttgttatgaaagtcacacgtaatatttgtcccaaagagcttagcatagtgttggcgcatattctgtacttaatacatattagctgaagaaataagcacaaaaatactcccaagagaatgttgtacttcaatttatgaaaaattatacttgttatgtctccagaattcttagtgcttttgcttttaccccataaagttgctgtagagaggaagtggtccctgttcctaccatagatatgagaggatgttctatcagtggagtctgaggttagcctgagtcctgtcatctgctcagttactttagtaaaagcttagatcgtcactgtactaattcctttatcgctctgagtggccacgcaccatcagtgtgtcatgtgaatgcccctgctctaaaagcaagtcccccaaacagggagtgatggccagaactgtcattctgagtcagggaaggcttcagaccagaagaaatgaagcattctatacctgcagctgaatgggtcatctgaaaaggtggacacctgaaaaggaaggtttgagtttctccctcatcttgccaactttttagggaaagtcttttggtaactcctttctcatccattcattcaagtttactagtcacgacacgtgctgcaaatcaccagttcctgggtctcaagttaaatgtgatttgtaaataatattggcatattccactgtgagaaacccttgatcttgtatcctttcagtgtttttcatttaacacattttatttagagagatttggaagtatacatttaaggcaagtgtctggtgcatttaatagatttatagagccagctgcctgacagtggtgtcaaaagaagaacccatactttggatgatgctagtagagaaccaagccaagtcgttgcatagttctgcttttcctttggagatcac

SEQ ID NO: 32932 - DNA, 3566 bp, Bovine  19866880460662
  misc_feature (1)..(1): n is a, c, g, or t
naaatggcaacccactctaatattcttgcctgggagatcccatgggcagaggagcctggcgggctactgcccatggggttgcaaaacagttggacacgatttagcaactaaacaacaacaaaaggttcgtaacatctcattttgtttcaaaatgatttatgatttgtcagggaaaacatgggttccctttcatctgtgttccatggttgtgctattaatagttctctctcccattccattctctgtcatccaccaggtcaagtaagcagatttcttccccaggctccttcattctgggaaatgggtggggaaggatgggagatgaataggactttcctcagagacattgcaatggcaccacactccaatattcttgcctggaaaatcccatggacggaggagcctggagggctgcagtccatggggtcgcaaagagtcggacacgactgagcgacttcactttcacacattggagaaggaaatggcaacccactctagcctggagaatcccagggacgggggagcctggtgggctgccgtctatagggttgcacagagtcggacacgactgaagcgacttagcagcagcagagacatttacacttgaccttgaatgatgaatgtgatttccccaggtggaaatggggtaggagaggggacactgcacatcaagacaacagaattatgagagtgctatgttccagaaaactcaactctctgggtgtgcctggagactgtgagtgggggatgagggaagatgtggtcagaatggttacctgagctcaaaatattgaggactcttttatgccatggcataatatttaatggcaaaatatttaattccttcttgtcttctcttttgaaaaaatgcctggctgagacttaagagaggaaataagaaaaacaaaactgggttcaaccattcccccattagaaactgttctgagcctcccaaggagcctggcctcagaacattcttgtgcactgagctcccagaatcgtgggtaccaatgcgccacggttaccatttcaggccctggaaaagggcaaaagctgtgttctgcttggtaccgtgttattgccatgaaacgtgcattctgtaaggaaaacgctttgctgtattcccctgccttgcggaccccatgctgagcttcagatgtttgtctttcttggatgttgggcttaaataaggacccctatggagagtgaagccacattcagtcctcagcgcaacaattacatattctatttattccaccagtacacggcccccaaagttgaaatccactcaccgatgctagtggctgctgttaggctctacctagtcaggcatagttgctgaatatgcagccgaggagagaagcaacggatgggggtgacaggaggactttaaaggggttcctgcccttcccctcctcccaacaggacagtgggcatccttccacgatactaaaaccctcttctgtttctgtttctagatccttcagccccaagagcaccccagcaaacacaggataggttttaagtgtctggcaaacctaagaaaacaatcgtaatgtaaagctgattttggcaaaacaattacatacaaaacacacatttaggaatgagcaagaagattcagaataaatactgacttgcctgtggcagcatagaatcactcagaaggcaggaaaagcaattttctgatacccaaatcgagacaggcaaccggaacttgagctatgggcatgctgtatacatcagggctgtcatggaaagaggaggtggaggagaggaagtaacacttagaaccagagacggagtctgcactggctctccctctggacagctgtctgtaggtgaaacagactgtcaaatatgtggactcccttagtactttatatatgcacatatgcagagacagtatcatttccactaaatctctttacagacaaatatctagttaactgttttgtaggataatatccttatattaccaagagagaaactggcaaccaagtggcaaaggaactccctacaattcaattaaaaaatgcatgatagaaatcacactaaaaacatgtttattgattctctacctaatgagccctagatatatcacatgcctatgtaatatgtaatatacgccctgaaaatgtatgctgctgtggcggccactgctgctaagtcgcttcagtcgtgtccaactttgtgcgaccccatagatggcagcctaccaggctcgcccattcctgggattctccaggcaagaacactggagtgggttgccatttccttctccaaggcatgaaagcgaaaagtggaagtgaagtcgcttggttgtgtccgactcttacccaccccatggactgcagcctaccaggctcctctacccatgggattttccaggcaagagtactggagtgggttgccattgccttctccggaaaatgtatgatgtactactaattattattaattaaatgcagttcacagtctgaaggttagtcaagtacaattaatactaggatattacatgaggcccaattctttaatatgaattatcatctaagcgtaagaatatacaatttgattgtgaccaatgtttgagtaaagtatttaccatcttagtgcctctttggaatatctaaatatgctggaaccctgatcaactctttacctgctaaagttaaaatatttgtctgtacaaccaaatagcaaggggctcttcttggtagccaaaagatctatgggctcctgcaacaagccactcatgttaaacttgatatttaaaaccatctatacacaccatgcctgcatcagagccactgaaaattgctaggttggtgaaagtatgtcaccataatcagatctcaagtggacagtcaaaactgtctaccacctgtggagaaccgtgagggacctgagaaattacccttcccttcttacagcgttaacctgtccctgtttcatggacgctgcctggagacgtgagattcaagatcagagaccaaggactttatatgataacaagagcaacagtcagttcatcagtatttgtgctggttccctgagctctagatctccaaggcaatgtggaagggccaggtggcatctggtacacacaggtaggtttcatttacaagacagaaaacatgcgttagggaacctgaatattttataacaggcagtaaaatctgttggacctttgccccagaaggtgatactctctttattgttctgaacagtaagtagacaggctttggaggaagacactatttctctctcccaaggaggtttactctacagccctgaagaaaagtcctgaaacaagggagttagcgattctgactctaagatgagcaaaaaggcaaaagacctgcagagacctgtcctcgtctcttcagtgtgatcctcactttcatggatgactgttcccaccttctctcccttcagtcacctgagctgccgctgccgcagcacacaccctctgctccttcgcttccttctagtttgggtttgctcctttttagtttcttttcctggcttctatttctctgctcatctgtaaatgttagagggat

SEQ ID NO: 32933 - DNA, 2502 bp, Bovine  19866880471594
  misc_feature (1)..(1): n is a, c, g, or t
nggcctggcggtgtcttaggttggggttggcttttcgcgtggtagatatcccacagtctggtttgctagcccaaattatttcgctcagatagcgctcagggtattcaggccagattcttactctgagcgatgcagcccgcgccgcgcctccctgcccagcccccgcttgctaatggcatgtgcaggcatctgcgctgcttctccgctgggggagttactgtagggctcgcaatctgcgagttttaattgtttattttttctccctgttatgttgccctctgtgcttccaaagctcggcacagattgggcagtgagaaggtttcctggtgtttggaaacttctctctttttaagactcccttcccgggacggaactccgtccctccctcttttgtctcttttttttgtcttttatattttttcctacctcctttcgaagacttgggttgcttttctgggtgcctgatgtcctctgccggcattcagaagttgttttgtggaatttacttcgatgtttaaatgctcttttgatgaatttgtgggggagaaagtgttctccccgtcctactcctccgccatcttggctcctcccatcgggatagatttaaagaaacaactaatttgtcttacagaagcattacagacattttcaccttcttgtctgaaacttgattattctctccccatgccttgatcaactgctatttgtaccttatgataagcttgtgcagaactgtttggtgccgaaatcagctaatgattagcttgatccagttcttcctcaggtcagccattttccatgggtattagttacatcctgaggttgcattaaatcatcctctcagtacatttgaccactgaggtcagtgttatccttaagatgtatttacatgaggtagctgagtcttaaccaacattaccactattacactgtgatggtatgatcctgacaccattcagttttgttccagaacaaatgtaagaatgatagagatgtttgcgttatgcatatgcaatatattattaaaaacacatagcagacttccctggtgctacagtggctaagaatccagctgccaatgcaggggacatgggttcgatccctggtctgggaagtttctacacgccatggagcagtgatgtctgtgcaccataagtatggatccctctagagccggcgagccgcaactactggagcccgtatgtctggggcctgtgctcctcgaagagagaaggcaccacaatgagaagcccccacacagcaacgaagagtagttcctgctcactgcagctggggaaagcccatgtgcagcaaccagcccagtgcaaccaaaaataactaaacaaataaagagaagaataatttaaaaagaacagatgccattacaattggccataactcatatatgtctggcttcccagttaactgaggacaaaataaatcaccccacctcatctcacaggcttgtgctaagactgctttccattttgtattgttacatagcagagctcacctccctcccatggggaggacacagggtatttaaaatagtttctattcctactaactatatcccaggatatgtttgattttgacctgttcctggggggcaggagcaatcatagcatattgatgtaaattatagtaatttccaagagaatttccatagacttggaagtctatgagtcccataggtgtgccccttgagccccagcagctaggattgaggaccactaccccatggccactccagcctacatttgtattataatagtcaagtgacctcattaggttaacatacaggcctctttcatgctgagttccagcattccccagcattatttgttgggtaatagcgttgattctcagagaaggcaatggcaacccactccagtactcttgcctggaaaatcccatggatggaggagcctggtaggctgcagtctatggggtcgctgagggttggacatgactcagcgacttcactttcacttctcactttgatgcattggagaaggaaatggcaacccactccagtgttcttgcctggagaatcccagggacgggggagcctggtgggctgccgtctatggggtcgcacagagtcggacacgactgaagtgacttagcagcagcagcagcgttgattctaatatcccttaaactcacatcactctccagctacttcccatttctctactcttcctcacagcaatagtcctaaaaatcgtgcttaaaatatatacttacagtcttcatttcctaatcttgcacttttttcttaacttagtatacccaggaaaacagccgttatcagtcagtgttagtcacgcagtcgtatccgactctctgtggccctgtggaccgcagcccgccagtccccggccgtcggtcacctgggccctggtgccatcctctgaatatcctccagtcttgctctcctgcatcctagtttctaaccagcagccagagaaagttttctaaagatagtcttatattact

SEQ ID NO: 32934 - DNA, 1849 bp, Bovine  19866880492771
  misc_feature (1)..(1): n is a, c, g, or t
nagttacattaagtgaaggagaagaatattaatagaaggaaggtgaagtacaagtgagcaaaaatccatcttccaaattgcagagtgaactgtttaagtccagtcagtcaagaaattaccaaggtctctaccaaattgcctaaaataagaacataaccttaaaagatgcctctaggagtaagaatggaatggggagtatggagtagagcattctggtttctcatcggcagaattctggtgctacctggtgtgtgtattggcatgcaatacttttataatagtagttatgtgtgtaatacatttcatagtaagtactgactgcattcaatttttgtgtgtgcaacacatgaattgcattaggcactactacaaagtgggatccttgtttatttcatagactgcataacttttctatatagggacctatagaaatttatatatatatataaaacatatatattatattttttaatatatattatatatcctttacatgtagacatttctcttgagttatagttttcagtatctgaagtttcttctttttctatcaaatttcaccattagcaattcaatcatctggattaaatacagtccttccctatgtttattttttaatgcaaacatctataaaaggtataaatactgggaacctaaggatgaggtgatattcaccaagaaaaggataaatggttccaaaaggcagggtgaggaactataaagatattttgcttacttcgctacttcaataaggtctttcatcttcatagactcttagttttcgatgcagtaagtacttgtcttatacttacacagaaaaagtgaaaagttcagaaagactgaactgatacttaaccccatgacctagaggacagggcatgtttaccaaaccagtctcttgaagttggaaatttaagaaacaccgaggggccgagtgggaagtggttaaaatctctaaccatgaaacatctcagtcagtcagaatttgttttgacaaatccacaccctgtggccggtattaatgaactagcaattaaaccccaagcctagtcaggagctgaaggatgactttaggactaatgtttactgttccaggccatgtgcaaacctttgaacctttgtgaagtgcaaatatgcaggatttggtgtagagcatcaggccatttcccactgtagggctcaaaacaaaataaatatatgggcaaaggaaatcaataactgatcaagtacaatgtcattacacagatacagtttaagaactccagattatcttaatctctgcaatataaacacatcctttatttaaagatctactctcccaagtactaaatacttgtcatattggattaggaaaataaatcaatcagatttggtcatgggtcaaagataacatacaattattcaggttttggccatctttattttgaagaagttgacatctttgagggtgggtacatggacactatattggctgaccctcagtgtatatccagttgtttgaggagatagcagaagattatggagccatctcatgaatacttccagggggtatttgatgtcaatctattcatttatgctgaaaagtgtcagtaacgcctaacgcagctcccgaaaaagtaccctcaacccccaaatcatctcatattctctttataatcaccaaaaaaggaaagtctagtttttacttatttggcatttctttttttgattttttgaaaataagcctcaaactcattttaatttgtattaaatatcactgacaaagaacaatattattcccctggatctcacaatcccatttcttttgccattttggaaaatgtagcaaagaaatagaagtgtttttaag

SEQ ID NO: 32935 - DNA, 923 bp, Bovine  19866880534347
  misc_feature (1)..(1): n is a, c, g, or t
naccccatcttgccctgtaggacaagagatgtgatgaaagttgcaaaatagtaatttatggagaaagcctgtgttccatgctttatgaaagtaaattgtagaaaattaatgttgtgacaagatgattctattttgatgaataaaatcattgaaaagctatcaagctccactgtttctctactgagggaatttctttctctttattctccatttgtattcttggctttcttcccaattagtctttagcaaagagtgataattagggggagagaatttttgacctaccttgtgaacaataaaaatacttaccacccatttttccatttgctaattctatgtgtactaatattctgtgctttcaggaagaaaactccatacctctgtgacctctgcttagtgaagggataatgaaatgcaaaaataaaaataaatgtaaaacaattgtatgagcacccaagaacaagctccaaaagaaggacagttgcttattgcacatctgatgactgggttcagaaacgtcttatatgctaaattcagtgtataatttcttatgtcatttcaaattccttagaataaaattaaatttttatctttgagtgctttgcataggcaatggtctcacatatttaaaaaatctgaaagagtaaatgagtatatactaatatatactagatgtataatatatataatatataaatatataatatatactgctgctgctaagtcgcttcagtagtgtccaactctgttcgaccccatagacggcagcccaccacgctcccccgtccctgggattctccaggcaagaacactgaagtggattgccatttccttctccaatgcatgaaagtgaaaagtgaaagtgaagtcgctcagtcgtgtccgactcttagcgaccccatggactgcagcctaccaggctc

SEQ ID NO: 32936 - DNA, 1864 bp, Bovine  19866880540327
  misc_feature (1)..(1): n is a, c, g, or t
ntagtcttggaaagttcagatgggatgtaaatggacacagggtgcctctcccatggtgcatgtgtgcccctggtggacagagcaccacgtgcacggtgaagaagactaggcagtcattctctctttgagtttcaaaagaagccgtttacttgggacttccctggtggcccagtggttaagacttcgcttcctaatgcagggggtgccggttcgatccctggtcggggagctgagatcccacatgccttgcagcccaaaaaaccaaaacacaaagcagaagccatattgtaacaaattcaataaagacgttcaagaaggttcacatcaaaaaaagatctttaaaaaaaaaaagccagttactcttagcgactcaataccttcctctctgaatctgaagagcaagcatgatatttcccacctcagatggagactaagccagttgaccggccgggagtcaacagaaagggtacacaggatcttctttaggccagatttaccgtccgccttcaataagtggttcggcgtgcctgtgtgacatggtttccttcctgtaatggttcctgctggcaaatctgcgatgggtttccctatgcagaccactcatttcctctaattgcttccaatgagaggtgggaggcaggagggtgggtgcctcgctcagggctgctggtctccccatcagcctgaccatccctagaagcagccttcatgctcgacatggtatttgggggagaaagtcaggtcacacattctgcgattcaaggataaaggtggcttgatccctaaagatctgacctccttcctttgtttttgttttgagtttttttttttttttttttttttaatttgcccaaattaggcaagttaaagtttgaaagtgttagtcgcttacttgtgtccagctctttgggactccatagactgtagcctgccagcctcctctgttcatgggatttcccaggcgagaaaactggagtaagtagccattcccttcaccagggtatcttcctgtcccagggataaaacctgggtctcctgcattgctggcagattctttaccatctgagccaccaggaaagcaacttaggcaaactttagtttttcttaagattttttttatatggaccatttttaaagtctttattgaattcattacaatattgcttctgttttatgttttggttttttggccatgagacatgtggaatcttcgctccccaaccagggattgaaccacaccctctgcactggaagacaaagtcttaaccaccgaaccaccagggaagtccctttattatgagtttttaaggaattttctttctgatgataagaataatttatactcattatttcaaaagatgaaaaaatgcagaaaaggttacaaaaggaaattgaaagtaccctccaacctgttaatctagaaagaatcctattaaaaattttgtacctccctatgttacttttaaactgtcagttgagaaaatatcatatatacagatttgtatgttacttaactctgtttaacataaaatcaaaaaacctaatttttgaaagctgtctaaaataccattccctagttatatgttttggagtacatgtggtttttatcataaataatgtatcatgacatcctataccaatttctgtctttatttctgatatgattttaggtttgagtcctagaaaaaatactggactaaagggtctgtgaccttttaattttcctggaagattagtaaaacttattatacaaattttaaatgtgccacatgacacccttacttgcaatgaggattatcctcttggttaatatgataagtgaaaagtggcattttagttgttttaatttgcattgctttgatga

SEQ ID NO: 32937 - DNA, 1509 bp, Bovine  19866880642177
  misc_feature (1)..(1): n is a, c, g, or t
ntgcatgggccccgcccccaccgagtctcaacactgtgctctgcagggcttagccttcctctggtccagggccgtcctgctggctctgggaagttgtctggtctctggtcaccactggcccaatgcttatatacacaccgtgcatggaaatgtttgttactttttgttctcagtctcatctgcttctatcttttttccctcaagtggattgccctgtagagctgggagtgaatctgtttttccctttatgactcctcattcacttcctgttacagatccctacacctggttactgctaaataactgctcataagctgaatgatcagcccgagatacaaaagtacgttgctacctggccgattagtttgatcaagttacagataacaatgagagtagcagctaatatttgcagagagtttacaatgtggcctgattaagggtttttcatgtagtagtatagctcatttagtcctctcaacagccctgaacatagctattatggatttcatttttccatggggcaacaattgcttttcaggggtttgttgttgtcattggtcagttgcgaagttgtgtccgactctttgtgaccccatggataaagcctagtttcactactgtaagagcagaaatgtgcagaagtcgttttgctgtgctttgaaatagctggggccgagaaaataggattctatctctgtgggttggaggttgatttagcagacatatgtaactgaagtattctgcttcttagcagaactgtatcagtatcttccacttaactctctctgttttagatcctgggaaaggccagggcctagagagtgtactctctactgaagaacgggagctgtattttgttgatactcttcaggaacattttagcagagcagagaacgtcagtgttgaattttccatctactctctgtttgatcttggcagatgacgaagatctctgaacctgaatttgctcatctgttgagtagggttcactgtaaccatttctcagggtcgtgatgaagtttaagtgagatgctgtgtgtgcaaaggacttggttagtgaggatggcttggagcccacactcaataaaacttggctgtaactatgttgctggcattacctaaataagccataggtttgaaatgagagtcaaaagtcttgaactggtgaagtattctgctagattgcagccttcccgctgcattacacagcagtgaaattgcttgttcagagacagcccagaacagtaaagaaaaaagaaaagaaaacaaacccaaaacacattctggaaaggctggcgttttatacaacgctgtaagacatttatagttattgagccaaaatttccactataatagaaaaagcagttgcttttaaactggctggtccaatttagcaattatgggtgagttaaaatgtgggccatttgaattggatttggaggataaagtaagattgtatccttcagtggggagtactcacagaggagggagctgacagagggaaacagc

SEQ ID NO: 32938 - DNA, 2614 bp, Bovine  19866880652503
  misc_feature (1)..(1): n is a, c, g, or t
nttcctggaggtcaaagtgtgccttcaaccaaatcgatacaggaaataacggcttctgtagttcccagtcttccagtgagtacacaattaagtgaacataaaaaaagggggctgatttgggtgtaggtgagagcacactgttgtctttttttctgcttagtggctgcgccatcattgggatagccagacctggtttaagaacattccctcttcctttctcttcctctccatcagcagtttttgatggctcatctaatgaaggatagatacgtaaagtcatatagtcagaggtaatgtcatgataagattcttcttttccccaatccctaccctgtaatgtgtagggttcttccaacctgagctcaagatatattttcctccacttggtggcgctgtgcacatatgtgcttgagggacagggtccagcctttgccagacactctccgccagctgttgagtactgagtgatttttccagtacagcattctgtctttatacagtgatgacttccccatgatggcaggatagtttttcgttagtgggcactgtgcacgcctatagcatagagggcgagaatatgacatgtttgtggtctcagtttcattgtcaaccagctgtgtgattcgcatcaaattattttgctgtgacagttggtgccaaggtagagtaggggagtcattcctgtttagtttatctctggagtttgctggaggacaaacataaaattagatgtgaaagtgctttgggaatttaaacaatggataacagaatgctacttgaattctatccattctcccaatatgcgggctgctagtgtccagtcttctctcaccttccaatccattttccgcgccataatcagaatgatccttctcagtttatatgtgatcatagccatccccttactaaaatgcatatgtctccctcccatagaatgaaagttgcaatgccttaaatgtcttataaagcccttggccataggcgctcttcgtctctggccggtctgtctgtctcctgatagattaaacagtgcattgaacactgaagcctctcttgctcttcagattccagtcacgtggttctcctggtctgaaagaggtttctccattcttctctaggcgaactcccactcattgttccagatttcacatcaggttagtgtcacagggagctcttccgtggtcctctattagaagcctctgattggtgctcctacaaatatgtattgtcctcagatgttttatctgattgcttttcctccacaaaggcacattcataagctggataactcagtactgtaagactctggcagctaacacgatctcaagcccatacaagatactcgagaaataatgtgttgaatggccaactggatggtagattagattcctaggacggccaaaacaaagtgctgcaaactgggtgtcttgcaagaagataaatatattttctcatagttgtggaggcctggcgtctggaatgaaggtatcagtagggccatgtccttctgtgcctctcgcgagcttctagtcgtggccagggagccttggtgtttatctcatagctgcatccctccagtctctgccttggccttcacatggtatacttcctcactgtctctgtcttcacatggcattttcctttttctataaaagcgtcaatcttgttaacttcaggccaaccctaatgacttcatctaaacttaattgtatctacaaagatcctgttttcaaattagatcaccttcttagatagcagaggttagacttgcctcatatcctttgaggggacataattcaagccataacgaatcagaaaccaattaattagtaattaattaatacaggttatagacagaaaaggcttcccctatgacaaatatatatatagatataattaatatgctggcttaaataatatgtgtataatggatatgtgtatttgtgtgtgtgtatacacacatgtgcattaaacattctatattccaaaaaaattctgcaaggctcattaccccaaataagaaatacggggtgatttatttaaggactttatagacatcagcttttttcagatgtaaatttttctggatgacaagaaatgatttctttgcctgcttttagaatcctcaattatgataatccatcaccttgtaaattctgtgttcttaccatttaaaaatttaagaacccaaagcttggtagtaattttagttatacagcaacagcctaccaggctcctccgtgcatgggattctccaggcaagagtactggagtggggtgccgtggccttctcccatcatttattcagatttccaaattaagggactttctgtggttagaggttctcctctttgtcactctccggttctgcagtcctgtcgtctgtcctttcctgtttccttacagatgattcgtggatatactaggtcttttccctaagcctcagattacgagaagcaaaattaaaccaaaaaagcaaatgatctgttaaattacgtcctaatttacaacatttggcagtgcaaaaatcaagaagaaaatttcacagatatcttggatgaagtgccttttttcagattaacattgggtaaaaggaagtgaaagatttcttttt

SEQ ID NO: 32939 - DNA, 1020 bp, Bovine  19866880691471
  misc_feature (1)..(1): n is a, c, g, or t
ntaaaaataagccttacaccccaactgcaattggagattcaataaatcacatccaaagattcatttcaagccaaagctttttccctgactaggagaccttggattgtataagatggatgtctctattaaggcattatcacagagacaactgtacagcaatgtgttaaggagaagagtaagagaataagacgtgccctgcgagaaagtatcaacagactaaaaatacagtcatcattgtcatccttttaaacagtatgatctgaacgtactcaggtcagaaacacctcctagctgtcactggtaagcatacagatggcctctgagtatatgcatcactaaagcaccgagtttgcatgcccatctcaaaacaacatagccatggggaactacgataaagctgaaattttcttatgggaggagaggcactctcagctactattctgagtcttccttcccacctggaaaatattccaaactgccaacatcaatctcagaagaaccagtccttttaacaggcagagaatgcccaaaattaagcctgacgcttgctccagatgtttctccttgtcattagcaggcaacgtttcacattttatgactattacagtaataaatcaattacttctcagaaatcctaaaattgtttcacatctgtcttaagaactgtttgaagctctatgacattctgaacagagctcaaagttctgtgctctgtaatttcccctgaaatccgaagctctttgagaataacaagcaaacgatatactatttttaaaatgaatctttgcagaggacagttgataggttttgactgtcttgtattcatgatacccaaatcatcacttcatgcatcccttctccacttagtgtttcaggggaagctgaactcaagttccagctgtgaaagatggaggtatctggggtggaagtcttgggcttagactaaccagattcagcccatcactaaccacagtcatccgttcatagacaggcatatgacctaaaatggcccaattagat

SEQ ID NO: 32940 - DNA, 1504 bp, Bovine  19866880743959
  misc_feature (1)..(1): n is a, c, g, or t
ntagcttctttgaatgagcttgagtaagaagttgtccatcatgtttcttgagcctcagatacatttgttctagaacttctaaaaaatatatatactgtcaaaatcttatttcccagtataaggattaaatagttggggttctattttgttttgttttaaagaacgaggtcccttttttgtctgaaaaggttgtgatccacctgaaaagttgtctgtctttgagacaatttaaccctagaatcaaaccaaaaaaaaaagttcaatttattatgactttcaagaaaatcttgttgaatttcagaattcctttatttcctgatctctcccaattctttctaaaaataacatatctgctctaaaaacagaggacagataatatgaatattgagcaaaatgaaaaggaattttaacttctttatccttctagactgaggcagatgagctggccataaagcaaaagggagttcttttggttcatgtgccatgaattggagtgtggatattaagggtggaaacaggctattagatcatccattcactttactctccaagcagcaattaaatttgttttctttttctctgctcactccttgctcaaggaaaaagaaagaacagcattttagcttcttacagagaactcactgaacgtggaacacttttctgtccacatgtatggtggctgagtggaggaggcaggaaggaaaaagggtagtggggatcatagttaatctacaggatgattttggctattccctttggctaacgggaacagcttggcagtcagatgcagctctcaaagaaacaaccgacatctattatccatcctaagtatgtgctcctacttccagtttttggttgtttgttcttgttttttaatatttttttggcgtggaccatttttaaagtctttactgaatttgttacaatattgcttccgatttatgttttagttttttggccgcaagacatgtgggattttagttctctgaccacagattgaactagcgccccttgcaatggaaagggaaggcttaaacactggacccccagggaagtccccctactccttgttttaatgcacagtgtactctgagatgagagtgctgttatcacagtgctagtaacagatgcaccatgaattgctttccaggactcaagatgggaatgagaaaactaactgcccccacccgcccaaaaaatatatataaaaccaaaaacttagaaaaaaaggaacaaaacaaaccacactataactctagccttgagggatcatctcctgaaactggtgtatgaaatcgctcaactctttttctcagatagagaagacagatccactatagtcatgatttcctgcctttctttgagggatttctctctttgtcatgcacttaatcttttcccttatctgaatgttaactctgtgtgaaggtctccctattttccaagttctagagatggagcagaacatcacagagcttgatgagtttcctgttagagatgtttt

SEQ ID NO: 32941 - DNA, 1813 bp, Bovine  19866880793663
  misc_feature (1)..(1): n is a, c, g, or t
ncggaaaggagatcattttgatagttatattctatataaatatttttacaaaactcagaatttgaaccatagtttccttcacttatgctgcatacatttatgtgaatacatttctttcaatttcacccttcagtggttcagttattcaaataattcatgcatgggtttcttaaagtaaacacatttttaataaggtctttttgtgtatttaattttcattcagactgtatttacattaacatactctcaaggggcgtttttgtgaattgtgtgatttttttttttttaactatttggtgtgtttttccttttcttcctgtttagccagttcctagtccattctgaaggagatcagccctgggatttctttggaaggaatgatgctaaagctgaaactccaatactttggccacctcatgcgaagagttgactcactggaaaagactctgatgctgcgaggggttgggggcaggaggagaaggggacgacagaggatgagatggctggatggcatcactgactcaatggacgtgagtctgagtgaactctgggagttggtgatggacagggaggcctggtgtgctgcgattcatggggttgcaaagagtcggacatgactgagcgactgaacagaactgaactgaacttggaatgtggaggaggaaggtccttggatagagaggaaagcaaagagtgactagagattttgattcacaggggtaagtctgcttatccagtgagctttccttctgcacctacagggacctatttctaacacttggccagacaaggcaactctctgtcatttagtcacccttcattttgcaataaattcactctcatcccactttcatcctcgtcattactgttcctcacctttttctccctctttctgtacccacggagatggtggccatagactacaattatcactctggcatttttttttaagtgctaaaccaaggtatttgtagtctttcttcaactctcagcccctctgaaatacctctttcctctgctgccatttacagaaaagtttatctaaaaatttaaaaattttctacataaacttttcaattttttcctcatattcattctgtttgtctaaaactttgtaatggtgtgaaatagtattcgaaaagaaaacatatttcactgaagaaaatatacaaatggctaattaacccatgacaagatgctcaatatccttagtacctggagaactgcaagtcaaaaaccacagtgaaataccacttcacatctactagaacagtcctaatcaaaatgacagataatagcgagtgtccacgaggacatggagaaattgaaatcttgctggtgggaatagaatgtgatgtagccactttgaaaaatagtctggcagtttctcagattaaatgtagaattaccaaatgtcctagcaattctagtcctaggtataggcccgatagaaataaaagtgtatgttcacacattgatgtacaaaacttgtacgtcaatgtgtacagcagccaaatagacaaaaaatggaaacaatcaaatgtctaccaagtgatgaatggaaaaataagtgatgaataaaaaaaatgtggtaaaaccatacactaaatattattcagtaataaagaaggatgaaatactgatacatattacaacatggatgaaatgttaacatattatgctaaatgaaaggaaccagacccaaagaccacatatttaatgtgctgtaaaggcgaatctagagaaagagaaaataaattatcggtttcacaggcctggagggtattaacgatgggggaaagtaagaacagtt

SEQ ID NO: 32942 - DNA, 1313 bp, Bovine  19866880796824
  misc_feature (1)..(1): n is a, c, g, or t
ntgaaaatgatttgatcctcatctttaaattcaatccagcaaaagagatggatacgcgaatgaccaattccaatacattaccaattattattcattcaccagacatattgagagcttactctgtgtcaagctgtcaggctgttggcgaaacaaggttgaaaagaaatatgcttactcgcaaacagatcacaggataaaggttaacatatttgcaagcaattattgttaaaatacatggcccaggtctcacagatgtaagaaataactgcctcatataattctttcagaggccaaaaaaaaaaaaaaagaagcctcataaagtcagtttccatcctcaagaatattttgtggttggtctttttaacaaatgcaaggagacagaccattttttccagaatgaaacctagtacaatataaaggggaaattatgatcaagaaaagcaaaaggacctataaaatacaaggaaagaaatgtcaagaggataaaaggttagagtaaaagcacacttaaacttttaataaggtcgaacaggaaccaattaaaaacaataatactttctctattcagttccacagctaaagggctgatgggaccttgccaggtcacttggttcaattttctgcctctaggcgatactaaatttcaactatcctgtgatgttcccacctgcatcccttggcttctacacaatagctttattttcaccaattaaacaaattcattttttcaccttggcaaaaggaatcaacagaaccaacacttatttgttattcattgcttcttctagctcttctcacaggcagtatttaatacataattcagtaacatatttgcagcaagatatggactatccaaaacatattcctttaatcttcattataaaattgttgggaaggatagagtatgaaaaccagacacagggatatatcttagccaagttttgataccttggtgaagtgacacttcgcaaacgttagaatttgtttgtgctgagggtccaaattataaactgtgtgatattcaaggtcccactcagggtcgataacctatgaatctatatattctgacattttatttgaccttacaaggggaacccaaaatatcaattgtagtagatactgtggtgctctgcccagatcccacctcaatttttcaatagcaagagtctttcgtgcttgcgtaacagtcactccttgttacatttcttgaatgttcaacttattaaataattgccaataagatgtataaattgtttccttaactatttcaatctttattagaacttagctatatttccttaattaatttaaaa

SEQ ID NO: 32943 - DNA, 2351 bp, Bovine  19866880816709
  misc_feature (1)..(1): n is a, c, g, or t
ntacacaattgaagagcaattgaagagttactaaattatttttccaagattcccaccacctcaccaccttctaaactacacatcctttttgtctaagaaaatacttcatgacttcagtcaacacaaagccttcaaggaagtcaccgggagtgatcaaagaggacagatgagctgagttaagctgtttcttgcgtcagtagtctcaatttccagtcattctccccacaacatgccatgcagaaatgctaaggagctgtaaaggatgtccgaattggttatcaggagctggaggggtgttttcctatctctgcttaattaacgggaggcaagctccttttgggtggatgcttccctcccaaatgtatatggactcaagacctctaaattgagattaatgaagattgaactcattaacttgaaggcttgagcagctggtactttgttagagattttatttttgtttcatgagaatcttagatcaggtaattgagtgatattcatgtcagtgggaggccccagagataatggtgcacattcgcttgttgaaatttatctgcgttctctgactgccactatcgatttgacttggctgcttcatctttctaatccctgcagcattttgccttgggcagagctgtagggcttgaagagaaaaagaaaataaaaattggaatacgttctcaggttagaaccaaaaaagaggaagacaggagtaggggagaggaagaaagagactggacctgagcccttggcatcatggaaagccccatgtgacgtgaggtcaagctgaatatcttggtctgtgtgatttacaaacatcagtatggttttgtagcaaagaatttccctgaagctagaatgtacattctacatccactattcacagatggggatggaaagtagtcttccctggcatccttaagacttcatggggttctttatttcctctcttaaaactggaaacctaactgtgctgccaaaaaaaaaaaaagaattataattctttcccaaacatttcatggtcataggaccttatttatcctgacagcttttcattgtaatttttctccccccatgtactcagtataaatttaaaaaaaagaaaaaagacattgaaatctttaaagcagtgaagcaggaatggcttttacttcaccaatattggtatcctttaatctcaatgatttactacataaaaaatagttttaaatcatagggaaaatcttttcatgcaattcattgtgggccagaatgaacattttttggtaagtattttatatgaattaaaatatataagaattttgtagtcatcttaaaaaattacccttccctctagaacaatggcaacccactccagtattcttgcctggaaaatcccatggacagtgatgcctagcaggccatagtccacggggtcacaaagagttggacatgtaggcttgcttgctaggacagcacaagggggaggagttcaagaagaaagtgtgtgttaggaagagggacacacacagagggggagagttagcttctagattatccacaccagcattcctgagagcctgctgaaggccaagttcaagaggcttatggattctctctcctctgactccagctctctgtatctttctgtttatgagtcttggtgctcatgtcatggttatttatcagagagtgtgcccacctccactgtctcctaatgactaaaacgtcctgatatttaacctctagctgatctttgatgtctgactttatacagaacacaattaggcaagatggaagtaaaagtttacacaaacagtagctaattcatgcttcttagcaggaagtctaatacattcaggataattagaataaattattgtgtaagtacattttttactgagagttatttataatctcccaacacattactcagaataagtgtctcgtgaacaagtaatattccattgtcaggttataaatagaaatatttatttgtttgctggtaatctttagaatatatttttatctaataagggaattcattttttttttccaattgtatgttcataaggtattaaagtactttgaagacttggttacaagtttacaactgtgacttcatgagcaattacgtatctatcaatgcagaataaaaggttcagacttggcccaggaagaccgatgaaagcacacctcttgttaaagttcaatgcttgtatactgtgccccttgtagaaatgaataaattaagtgcaagcccttctgttacttgtgatcggggtaaacttaccagaagctaattagggttttaattcattaattaaacaaaacactgattgagtgcctacagtatgtcagacactgtcttg

SEQ ID NO: 32944 - DNA, 1986 bp, Bovine  19866880924491
  misc_feature (1)..(1): n is a, c, g, or t
ntttccaggcaagagtactggagtgggatgccattgccttctcctaaaatggtgctaccacatagcaaaggttcaacaaatgacagtgactctgtttcacagggggcatataaccacgacccatttcccaggtctactctgaggaaagctactttataatgaggatagttaacagaaccaaagcaaggatatgggtagatgggatcaagtagttttgagaactacactggttagaaaaaaatgagctcctctattgatgaatttccaagtcttaaatattctattgttaggattcctcttaagagaaagagtgtataaggcttcctaaacttgtcagacccacagcaccttttttcaagaagcatattgtaaagacaatgctctgtggacatgttttggggaaacaatttactggagaatgaatttcaaaaattctcaatgaaccagactaagattattctgaaagaacatcctacgcttataatatggcatgagtatgcagaagaacactaattcatatttaagtaaaagctatacttctatattcttcatactgtcttcaaaaataagtctagtgagtcactaaacagagtaaattttgagtccatcatgaatttcaaaaccaaatcgttattatagtatttcctgagtaaccacagtgttagagaaccaagaatcaaggaagaagaaggaaaaggaggcttggatacaatcatgactactttgattttgatggagagcatttctgatatctggatatagttttcgatccaaaccattccaggcagatgaattaataagcacatgtttggaaaaagaatgcctggaaagtaaattcaaaaacaacaaaaccacaagaggaaaagaagcatgaagtcaattatggctaacaaatcaagctgaccacaaattcctatattaataagaatgtcatgtgcatatcacgagggatctcccttagagacattctgatagctaaataatgcattttggtgatttcacagttatattaagtccatagggtttagctaggatcccatcttcaagagataagacaaatggcacttaaaacgtagaacaaattataaaatacagttctatgaacttggataaaattgatagactagcaagctagaagaacatgctttaattgtctttcccccctcccatttttatacaaatttgaggaaagagaggaggtatttaaagtaagattccctcctcaacatttgaagatgaatgtatgtttttatgagccagctgtagaagggaaagcaaagattctctctgacaggcacgtaagaataaacactaacagttgaataaaggtgagccaattaaaccacttactcatgcctaatatagttctggatggtccaagcacctggcttgggataaacatttactttctgcagcatgatatttaatcagctcatcagatggtggaaggttccatccagaagggcgattctctctgaccttactcttaattggaaacactgtttagggtcctgcttcccccagtacctcctcagtgtgtatcactctcatatatgaatcccattagaccctctaactcagcactcccttcagggcgagggtgacagactcagggatttccaagctttcctgggatttcctgccaggtgctgaaggaggaaaggcaattttaggatggagaggaggaaacgaacatagacagggacccagcggcaacactaggacccctcacttttaattcgggaggggatgagtggaaaattatccccgtttggacagtttggaaaagtagttaagtgatgtgtctgaaatagttgggggtaataaaatacattccatgaattaatatgatccctctgaacactataacatcaagaaacgtgaaaggtagcaactagaagggattttcaaagatccagagaaatgcctttattttatggttgagaagatgaccttacagaggggttgatttgcccaaccaatcag

SEQ ID NO: 32945 - DNA, 1146 bp, Bovine  19866881047072
  misc_feature (1)..(1): n is a, c, g, or t
ntttcattagtagatataaaaaggaaatatctagaacacctttcctaaaaagaactctaaagatatctaatttagtacatgagtctttaggaaaacattagtataaaataaaccaaagtcagatattaacaagttactcaacataaaatctcactatacaatagtatctcttccttaaaacttcaaatattaacaaataggacagcactgcaaaatatcaagtgtcagatgcaactagaatccaaaatgttatgtttttagttttgaaatatcattattgctaaaatgagaattttataagaaaaactaccatcagtttaacaacatataatttatttgtaaaagtcaaccaagaaaaatctatgaattcaatcggctcaggaagcagattccatgccattttctccctcaatgctaaatgacacaagcagcaataaaatatgcagagaaaaaaacatgtcacagaagatgtgacaattttgataaatgatgataaattgtgatgtataataaccgtttgtaagctgctgttttcaaaaacatttattttaatgatgattttcaccaaacatcattttaaagagttattttgtgtaaaaccactgacaaactaaattggtaccttattaaaagttagaagagaaacaactgtattttaaattttaaacaaaattgtaattttactttgatttagaatagtttttagatccagtcacttccttaaaattttcaatgtagttatgtgatctagcaattctacacccaggcatacatgaagagaaattaaaacatattttcacacaacaacttgtacctggaagttcataaatgtagcattattaataaaagccaacaagtagaaacaatccaaatgtccatcaggtgatgaacagatacataaagcaaggtatatcaatggaatggaatactactcagcgataaaaaggaattgagtactcatacatgctataatactgatgaatcctgaaaacggtaagctggggaagacagtcaaaaaaggctacatatcctgtgattctatttataggaaatgtctaggacaagcagatccatagacacaagatgtagataggcagttgcctcgggatgacagcacaaaggggatggagaatagctgctgataga

SEQ ID NO: 32946 - DNA, 1458 bp, Bovine  19866881047618
  misc_feature (1)..(1): n is a, c, g, or t
natgggatcaacggttgaatgcttttggcatttagcaaaagctatgggggcagggccctggtaggagacagggaatcaagttctaaagggttattgaaaagaaggtactaaatgaataaaatagggagttaatgttgatgcaaattaacttcagaaacgaagagaggctcatcacagagcactgaaaaaggagaactggggaggagggaaaaatgaagactctcaggaacaaaagaacagatgattgagacctttggtgtctatgttctacaggttgctcctgatcggagatgaagtgtggaatggctggtacagccagatactttctccaaagttgcatatttcatcgatgaccccttcttaagtgaaataaacttatgttactatacacagggtccaaactaagtagcctgtgacctttggttttcccaaaggattcctgcctttgggggacctctttcttccctctccagactttcccctctgtgagcttctcttctgatgtacctttcaaaataaaccagcacaggaaggatatcgaggtgtttgagcaatcccatttccatccaaacaagttcaggcagttgaaggctacacacccaggtttgggggtgtgcatgacaatggtgtcccaggatcactcatcttatcaagttggggcagataagtacacaggggtacgacatgcgttacaacatgttgggagcttatgaaccatctaattacccactgcaggatgcagttgacagccaagtcccagaacttataaaagaggacaaagacaaagaaatgaatgaaatataactcctgtataaagttgattacaagaggttgataagaggagagatgtgtgtggggggaaactttcccgtaagtagtttggaatgtgattatataaactggaacaagagtaaaaacccacaggctttcgcatttgacagaaatgagagtttagggaaaagaaaagttagtgtatctttcctatttatatttccctttcctatttatatttctactgtagctattctacagaatagctactgttcagatagctattatttggtagtcctgtactggttggaaaaaaaaaaatcctatatatctgtttttcttaagggaggtaattacgtgcctctttttttaactgcaaaaagtcaaaacttttttctctttttggtggtttctacctggaaggtgagtcccaggtcagagtatctctgcgacccatattagggtttgggattggaatcagagggatctatcaaaactgtagtcctgagccctgtgtttgtttatttttattgtttattgtttactcttattgatctcaagtaaacaataagctgctgagctaacttacatttcattttgcactcctatactaaaattgttcgttctgagctttcttcattgaagaggtggtctgtggcagtagttatgaggcggagtctgaggcta

SEQ ID NO: 32947 - DNA, 1893 bp, Bovine  19866881054637
  misc_feature (1)..(1): n is a, c, g, or t
nataaggatctcttccaatgagtcggctctttgcatcaggtggccagagaacagcagcctgctgcatggtatgcccagtttctccaagaaagctcatccacctttgcctgatgcttctccctcagcctgtccagccctcccttggattttatcctcagagcagctgccttcccggcttccaaaccaaatgccgcctgtacctccatctgctcctctgcctacgctcccagagccatcctctttcctggctacccaccaactcacccacaactcctagatagtaaacagatctgcaccaaaaagtaaggtggtgcatctcaaattaaaaagctgacaaaaaaagagttatcaatgataaacacatcagcacattttatttcaaggtgtttataagttaacaaagcccttttccatccctgattccatttggacctgtgctaactcccaatacatttctaataaaaattaaatgctgttcactgagtgcctcttatgtgtcttaagccatgttattttaacttttatgacaagtctatcaggcaagtctagttttcaccattttcagatgaggaaattggagcttgggtgctttggtgatattcctgggtttgggcaactgggtaactaatggacctacaatccaagggtctgaattgtagttcgatgctctcactccttaactagaaagtaggaaatcatagatcaataagtgaaatctaaaataaatcctcagacatcaagacattaaggacagttgtttaacttgaattgccacccaatgtttaagtatggtctcacttcagttattctttgcatgttcttctcattatcaggggacacacaagaaatagcttcatcatttttccaaactcaactactcttgaaaaccaaaccaaagacttgggggtactgcttgagcccactggctgcattttgcttccaaggctgacaacctggatggatcttcagattcctcatgaaactgagcaaagtaaggcaaagagaattgcttcaaaaattactaatgacagtatttcatgatgatctttgaatgacgtgataattatcatgccagctctgttggtcagcctgcctaggctatactgactttctcagtatcatccaagccagtgacttactccttcctttctaagaaatcctttactcatggacagaagaaaccctcttctctgtgacaaccccacttcctctttcttcacctcccccatcactgactttcctccagttttactttttgtcctactgtaccatattttatctttaaaattagagttttctgaagtttgctcctggcagatcgtcttaaactgatgtatccatatatgcccagcatccaaaaatgtctaaacttttcctagaccgcctcttggaggtctggagaccactccagacttttatatacaaagaagaaagtataagtgttagtcactcagtcgtgtctgactctttgcaactccatggactatagtccaccaggctcctctgtccatggaattctccaggcaagaatactggagtgggttgccattcccttctcccaggcgtcaaaggacacttcaaatcttcttagacgtctcttgagcatctcaaatgtaacatcgctgtgttagaacccttgttaaaccctagtatcaacagtaatctattccttagcccatctttccatagtagtcaacggtgttggcacaagttttgccaatcctacttcaaaaacatgttttcgtttttatggtcttttctccccaaaagacacccccaagtccagttgcctcttaagtggtctcttttctgtcttttccacctatatcaaatagataatcttttaagattatgtcagaataactcatggccatgcttaaaccctttaatagg

SEQ ID NO: 32948 - DNA, 2586 bp, Bovine  19866881081285
  misc_feature (1)..(1): n is a, c, g, or t
nctgagagggttttctctatcagcatggcaccgaggtgaaaatgaaggtattagtcactcagtcgtgttcaactctttgtgaccccatggactgtggcccgccaggctcctctgtccatgggattctccaggcaagaatactggagtgggttgcaatttccttctccaggggatcttcccaacccagagatcaaatctggtctcccacattacaggcagattctttaccatctgagccaccagagaagcttcccctgaccctgaggtaggaaaactactgcctgcactggggacttaacaagattatttcaagggtttaaataaatttttttccttgcttggttttttagctttgccaaacaacttgcaaacaactgctacatttgctataattattttagatcattaactctgaaaattactgtttgtattatttcctacctcggccttgtgcccattgtgagctggcatctgataaacaggtggatggtactggccttggaggtttgcccttgtcaaacacttgacccagaccaaaaaaatgtcatagttgccttcataagagaagcctcatagacgtaagcctcagtaatgatgttctaatgatctaatatgccatgttgtcatctgtcgatttatgaaatcatgaagcaaatgcaaataggattgtcactgtctccttgaatgaagactaaagactggaattttaattttatgcaacatttactcaagacaactcctatacatttgacaatattgaggtctttccttctcctggtcttacctaaactcactttcatctagatcaggcaataatttgcaggttttggtcttcaatttcagtagcaagcaattagcccctcaaatccacagaaaacaaagagtttgtatcttacaattctataggatatgaagtatacaaagatttcatgttgttggtaaaaaataatgtagcatagacatgcatgtggaagtatgtaaaggaagaggggagatgtatgccttttattttgaatgtatcaccaagtggattaatggatggatagggtgattatattataaagcaagtatagtacaatgttcacagtagaattgagatgtgggaacatgggtatggattatacaattattttaacttcatggaatgtttgacatttttataatattggggggcggataaaatagcagagaccaaaattggtagaggtatttggataaacattaggtgactgaaaatgaagataaatttttctgacttactaaaacacagacataagtaaatagctgcatctctgagccgatataatctttcttcaccattagtatatgaatctgtcagataagaaaaaaagggcattttggggaaagtctagctcagtaagtgctcaatcttttgtccactcagcaatatataagtggatattttggagttattttgcattgtaaaatgcctgaagtcttcacaggtaaggcagtttatgccttctcagtcatttccacatatactgaatatttcatatactccaaccatggtgcttggcattggggcttctgagaggaagtgcttcagaaaggttagtatcaagaaatagataaagataataagtaatgcgataaagtgaatggaggtcttaaagtgctttgagttgctggacttaggaactctgtgatcttggggtcttgggcaggttacctaacttctttgtgccttggtgttttcatctgtaaaatttggcaaataaaaactgataacccattgtctgttaaatagcaagacttaatgaaaggtcactaatatcttttcacctagagaggaagaaaaaagtggcaaatcaaaaaataaattaacccatcaatagccataagatttgcttgacagagacccttggtgattcagttaaagaatccgcctgcaatgcaggtagaccctgggttagatccctgggtcaggaggatccccttgaaaagggaatgactattccacttcagtattcttgcctgaagaattccatggacagaggagcctggtgggctacagcccatggggtcccaaagagtcagacacgactgagaaactgacactttcactttttctacagtcataagatttgcttgacagctgcctttctctcttcctgccctctgcccctactgtggtcctagtacagttctagcatcactgtcttggagctgaaacagagcttgccacgaatttgggacagcttctccttctcacactttagagaagaggagactaagatggattgaaagcagtgacatagctagtccatggcaagtgaggaacacgtagggtaataaagcttcgactgcagagagaggtagaaggaaagacattccctgggaaatatgttagcatttctcaggaagtaagggagaaaatacttaggtatatgctcatgtggttagaagagaatgtgttaggggtacctaagtgctgcagtccatggggtcgcaaagagttgcacgtgactggccgactgaacagcaacaacaaaggtaatgcacgagaagattcccaagaagcacgtgatgcagaaggttgcatcacaccactcccgagttaca

SEQ ID NO: 32949 - DNA, 1339 bp, Bovine  19866881106702
  misc_feature (1)..(1): n is a, c, g, or t
ngttcagcaatccttggccaaaactcagctccgtagtacatgattggaatagactggtgtcagttctgcccttatgaaagaatggctttctagaatacatgttcttttaattatgccagtgtatcctttcttgtctgccccttgggttgccatcattttctctagtaacgtcctgatttgcagatcagtgccccacgtggatgagttctgtttcggctacccatcctgtgtagtactttgattaatcttaaaattcttctatttttcagtggaaagaaataaaccacatttctggaaaatgaggaaagtatatgaaaaatgttgtgaaccctgtactgactttagattaaaggaagcgaatttgagccaatttgattgagatacctgtgtacttgtgtactttgaatttcttcagaaattgtcggtgtgttcaagatgccacatggcgggtggaggcttcctgtcttaccactcaagggttcatcatgctgagaactcagcagtcagtttatgcccctcatgggacctacatgaccttgtgatgtgcatgaatctctctgggtctgctttctggagaacacctgtcactgagttgtgtgtgagaaaagagaggtctttggtgtactttaccagttttggaaggtacttgatgaaagtagtcatcccttttgtctctcatcacttgattgcctgccattctaaatgattccttccaattattctttagatctcactaaaagaattctgctggtcgttcattctggttctgtctctgtatttaacacagacacagtcctcattactttcatcaaagtcatttgataatctctttaatgggaaatccctgattacagttgcattcttttggcaaccctcaggggttgaaattgctctaatttttttggttctgtgcattaggctgagatgaaatcccttgaggacaatctcttccttattgaattcttggggaagaaaagactatgtgtgagcaaggtggggaaatgtgcaacattaaatgtagtggaagctgtgccttttgcatcttttaatagaccattgtaaaaatgtaaatgttctttaattagttttacttgttaaattcatatttcttgcaaatgtaattcaaggctgagatcatccaaaagatggccagatttacactgattaccctggcagctcagatggcaaagaatctgcctgtaatgcaggagacttgagtttgatccttaggtcatgaagatcccctggagaaaggaatggcaacccactccagtattcttgcctggagaattccatggacacgggagtctggtgggttatagtccgggagtcacaaaga

SEQ ID NO: 32950 - DNA, 1272 bp, Bovine  19866881159443
  misc_feature (1)..(1): n is a, c, g, or t
naatgaccagcatgagctgagaatggaaaacccaaaacctacaaggacaagagaaggacaaggttgggaagggcaggaagtcaagaggtcaagagggtgcatgccatggagtgtatcagtctcagaagcctggacccaatatcaaggttaaatgatggacaggggccaaagatagccagtgcctgaaatcagaagtaaacattattattattattgtcatttacttttatcccagtgcttcttttcttgaccttgttgcttcttattcctgtgttagggaagactctctctgagtggattctacaaaactcaagtcatcagtgaaaaagaaattcaatatgctttgcaataaattgcccagccacagaagcaacataaatgctcactgatagatgaatggataaagaagatgaggtacacacatacaatgagatatagactatgaaaaagaataaaatattgctatttattatagccacatggatggacctagagactattatactaagtgaattaagtcagacaggaaaagacaaatattaaattgatatcacttatacacagaatctaaaacatcagtagaaatggaattatttacaaaacagactcacgttcatagaaaacaaacttttggtttaccaaaggggagagggggagaaagaataaattagaagtatggaattaacacaaactaccatatataaatttgggtgaataacaaggatttaccttgttaaatagcacaaggaactataggtaatatcttacaataacctataatggaaaagaatgaaaaatgtcatgtatatataaaacaaaccatttaccatacatcagaaactaatatattataagtcaattatactttgatttgaaaaatacacctggcatctatgttagccttttctggcttttcactttggcttctgctaaaggcactgcatctgtagcaacatatatcccagctctgatcttcctcagaaatgaggtaggtatacatcctggccagacttttccttgtctatatggtgggatcaaccgtctctttaagtgagtttcaagccagggttcatacaacacttgaaagcaacatgattcaaccctgtgccttctctgtaccctagaaaagctgccaaacattctacaaagaatgggcatatgaataggatatcagataaaacttgtgttgaaacaagttcttttttctctgcgttccattcacaacaacagaacccaaagtcaacccgtcatatattatctgaaaattattca

SEQ ID NO: 32951 - DNA, 1555 bp, Bovine  19866881180895
  misc_feature (1)..(1): n is a, c, g, or t
nagtggaagtaaggaaaggagaaaaaggcaaagggaagacttgaacatcaatgcagaggcagctagtccttcagagaagggccgaagttggggaagcagccctctgcctgagggagctttccacggcgttcagggagtcagcccaccagcagtcagtgcttctgacaactgatgagaccagagccttggtcctgaagcaggctacctgggagctacactccagcattcattgcaggaagtaacagaatgcatagatgagtggcatagcattgagaattagctgggctggtttgaaactggtttctaccacactagacatcagatatgtcaccttgagcaaactacttaacttctctgctcctactcattggggataagaactctgcaggcatctcatggggttattgtggaaatggatggatgagttaacacacatgaagcatacagtggttcctggaatattgtgagccctttgcaattgtcagctattattatgagacgttgctataaaacaatgaaactatttttaaaactaacttacccgtatgaatatttgttcctgtataggtcagagggggctattaataaataaactccaacatctctagttgcttaaaataacaaggatttatttcttggccacgctacatcataggttggctctaggacccaagctgacggaggagccattagctggatcattgccagtgtggcaggaaaaaaagatagtattttaaatgctgactcttaaaacttccacctggaagtgatccatgtctattccactcatattttcactggtaaaaattaaacatgtgagtacacataactctaaaaggtgggaagggaggtataaccccacacttgtctggaaggaaaacctgaatgacttcataacagcactaatgaccatcaacagtttaattttttaaattacatggcactagatacacttattaatgataagacaacttttcttgaagacttactgcgtgccaggtactatgataaacagcagtactatgaaatagactcctattaatatcccggtattatacattaaaaaagtactgagccttttttagtgtcagccctaaaaacttagagaaacacaataaacagcatgaatctagttggtggctaatgtgaactcaaactcaggtctgtctgactgcaaagcccacatttatatctaacactctatgtcctcataagaagaacagtgacagcagcatagctcacaatatcttcaaaacacatgctctatttttttaaaggaattgctgttagaagctattatttagagggtcctaactcccaaagtgtatgaagtctcaaacactgtgggagatttttgcatgctcccatgatggtattccctgttggctcagctggtaaagaatctgcctgcaatgtgggagacctggggtttgatccctggactgagaagatctcctggagaaggcaaaggctacccactccagtattctggccagcagaattccatcgactgtatagtccatggtgtcgcaaagagtcagacatgactgagcca

SEQ ID NO: 32952 - DNA, 1244 bp, Bovine  19866881250561
  misc_feature (1)..(1): n is a, c, g, or t
ncattagtctgctgctgctgctgctgctgctgctgctgctgctaagtcacttcagtcgtgtctgactctgtgcgaccccatagacggcagcccaccaggctcccccgtccctgggattctccaggcaagaacactggagtgggttgccatttccttctccagtgcatgaaagtgaaaagtgaaagggaagtcgctcagtcgtgtctgactcttagcgaccccatggactgcagcctaccaggctcctctgtccatgggattttccaggcaagagtactggagtggggtgccattgccttctcccattagtcttctacttactcctaatttccactagaaactcaaagggcaggatagaaaaataaagacaaatactttgggaaataagctgatggaatgcatagatacaagtaaaacaaattctctaagaaaatttaatttctatttcaatgtatattgcttgtccctatctctacaatttgacgaagatgcctacctactcacaaccaaattcaatttaatagaaacaaatttataaagaatctttatttccttagacagcaagaatatagtcatcttggaaaatttatcaaatgggtcctttttattgggaaattgtgtcattatttgttgctgtcacaatgataatctaatagaatgccatctgccatataaagaataattatcttccaaagaacagaggatttatagatatgtagctaatactagaaacttgctgtagaaactgcaaaattgtgaaataccaccttctgctctgcaaaaatcaatgaaacaaatgtttgcttttatcctggagcaaaactggaataatttatttccttgtctctactggacttgctgctgaaacagaacctgatttcacctttgtgggtggcctggtccattctggttcttggttagctactgcccagtgaatcccatttttaatccccatgggctagcagactctaggaccaccccctagccgaaacagagaatatccagaattgcaaatgtttcactctgtttcaatcaagcaggaaaacagagtctcacaggaaggtgctgcttagacctgtgaacccgattttaaaattcagtgattcttaatttttcctgaaaagttagctagtggaaggtgcgtcaagagatatggggtattactcagccattaaaaagaatacattgaatcagttctaatgagagatgaaactggagcctattatacagaggaagtaagccag

SEQ ID NO: 32953 - DNA, 1183 bp, Bovine  19866881258699
  misc_feature (1)..(1): n is a, c, g, or t
natggctgagataaaaatggccttggcattcatgataagagctggtgataaacgtctctgaaaggaagtcacctaccgcttggaattctacctgaacccagattcccctactgatcagtcccacagcatttctaagtacttgctatggacaagtctcttgcaacaatagcttgagaggtattattaattactctacatcccaaatcaggtagattaaatatatttttgttattatagaaacaaaaaagtgaaagtattagtctctcagtcctgtccaactctttgcgagcccatggactgttgcccaccaagctcctctgtccatgggattctccaggcaagaatgctggagtgggttgccattccttcctccagtgagtcttcccaactcagagattgaacctggttctcctgctccgcaggctgattctttaccatctgagctaccagagatggaatcacatcataattagagtaacacaaattgtcatgaaagatttcagtatgtatgatgatatctgaaaagaagacaaggccatttatgtttattataatatacactgaataaagcgttaggttatgttgcgacctcatccaggtgaggctggtaggagactgacgaatcatcttcttcttcacttcttttctccccatcccctatctattagtttttctaatacctagaaatagggcaataaagaaaagtacagtatacagtttttgctttcttttaaactagccattaatttcaggcaagagtagcacatacctgctatattttttttaaccttcacatgatttaacagagaagaatggtgactttatcatgtttttagtgtgatttcttattgcttaaaaatgtcaaccggtgaaattgaaataggtcattactttgttttctcctttatttcaatgacttggtccacccagcagtacccatcattgcattgtttccatctgatctgttttatttgaaaacccccttatcccttaacattgataatgctatagaaacgtttgacattaaatgtacctgatatcatcttcagaaagttacagttgacagagtaaaaggaatatgtgtggtgttttatttttcaaatcttagtaaaatgatgtcctacaatgttttagagggaagcatgatggaaattttttgcaaccagaagctgaatattcagtt

SEQ ID NO: 32954 - DNA, 1547 bp, Bovine  19866881339070
  misc_feature (1)..(1): n is a, c, g, or t
ntgcatttagtgcactgagtagactgcgtttgactctcctgcagaatgcaacccagaattcattctcgggactctgctgacacttctcccaggaaaccaccttaggctacaaagcacaggtcattttgatacatccagcttcagtgatggttctgcttttgctactcatacttcccagagacgggggcttttttccaaatgaatttaaaatgaaataaactgatataattttaactggcttggctggatgccacagatacatttggaaatttaaaaagtcaagacattggacctcagtataggcagtgttttcttttctccagaaaacaaaatgattttaaagtaggatataaaactaagtatcttattaattacatattattttttagtgtttatgaagatataacaaatttgaactatgtcaccctccccaagtgattcacaggacaacctactgattctgagtgacattctgatcaaaataattgcctttgaaaggcatttgctgtgactcactcaccacggcagcctttcaaatctctttgagaacactgagtcatgcattttcacaatatgtcttgaggtaaatgggaagccaatattattattcctactctacctaaggggacaaccatgctctccaaagatgctgtctctatttgggatattctgtctctacagaatacttctttgtgctgacttcttaaggtcattctgtcgtcatgttttatccttttcacatcatagatttgaagagtggtaactggttcccaaaaatccgaggtatttcatcctcaggttagttttctaatcaagaccaatttggtggcttttttctctcttccaaaaaaagtagtatatatagtattatgcatttgttattgtttggtcgctaagtcatatccgactcttttgtgactccatggactgtagcccgccaggctcctctgtctataggatttcccaggcaagaatactggagtgggttgccatttcctcctccaggagatcttgctgacccagggataaaaccacatcgcctgtgttgcaggtggattctttactgctgagctgccaaggaaaccaagcattatgcttacatattacactatattgacattaatgacaggaaacccatggcctcttacttgccccatttctactgtgttttaactgttacaaagggcttcaagatgatggcctgaaatctgcttttcagctttcattttaccttccaggaaagcaaagaacaagactctcttcacctatttgaaggcatttgccattcctctactttagccaagttaaactttctcagaggattcaaccataactcacagggatggtttccagactctcaataaaccagttatcctttctgatcaggataccaagtgtcagagtctccttaaaacatgttatctaatattgaaaccagtctttaagacacagtctaagcataaaagagcagaaagagtctataactttccctagcagagacactctaagacccaagatactaaagcaatagacgtttttttccccct

SEQ ID NO: 32955 - DNA, 1415 bp, Bovine  19866881362602
  misc_feature (1)..(1): n is a, c, g, or t
natcaagacattctttcaaattccatccctaagtctccaagtaagagacttagagtttcaaatttagttagtcaaatcccagtctcatccgtttctaactttccctaaatatttgtggatgaatattctttaaattttagaaatgggggggaaaagtgttgggagcaggaagggcccaatgaaggaggaatcaggccattgcattgttttaaggcagtttgcaggttgccttcctagatgaaatatctaaattagagccctttaaaaggtggagttgctaaaaaacatttattaccaaagaaggtcagcaaataaatgagctaaatccttgtaccaggtacaaatcagacctttaatttccaaatacaattgctatcaaaagttaatgataaattccttgataaagttgttggtacctacaagtgtatttgatgggcatggttccccattatgaaatattaataccttgaaaaatcaaacatgcaagtgaaaaacgcacctgtgggcccattttcaatacaggtatacgtgtggctgagtccctttgctgtccacctgaagctatctcaacattgttcattggctatacttcaatataaaataaaatgttggaaaaaactatatacaaaaaaaaagtgtgaagaataagtataaaaactcttaaacaattggaaattagggctgtgtagaaatagactgcattactgtctgtgtatgttcaacttatgaaaaagcatcccttcttccacgattccttttatcaaccataaagggctttaggatagcaaattgcatatttatctccatgttgagtgaaatatccctaaagtctaatgcccaggggccattcaagagtgatgaaaagagcttcagagaaggatctcctgttttactgaacctctctctctagttgcatcaatttccatgttgatattatgcaaacctgtggcctattgtagttcatttcctctaaggctagtacactaatatgtgaaaagcatttagaatccccaagagaaaggtgtgacatgaaagatgtgtgctatttgtgttaatgcctttgttgttaattgctcttattgtcttaatcccatagctatgggagaactcaatgtaaatgttgataaagcacataatagcatcctgtgtgatagaaatatcataaaatggtaattatttccttccttttgcataattactgaggttgtctctagtcaggaacggtgaactctcaacttattttctgcagccatcttattaaaagagcttccagattttttttccccaggctagtaacaaagaaaccaagcaaggtcactgaaagggatactttatttaaagcatagttgttgttgttgttgtttaaagaataatcaactccacatgaaaataaataagattcaaataaaatcccc

SEQ ID NO: 32956 - DNA, 1083 bp, Bovine  19866881441965
  misc_feature (1)..(1): n is a, c, g, or t
nttatatcacacaaactctaaagggctcaggctctcattgaatcctctgctatcaccatcctgaaattcaaaatattgtttgaacagagtcctgcatgttcattttgcagtgggcctgtcaaccgtgagacccttctagcacacagcatggttattgcaactgtacagatgagaagaccatggctcaaagatttcattcagtttactgggggtttcggggcttccctggtggctcaaatggtaaagaatatgcctgcaatacagaagacctgggttcaacctctgggtcaggaagatccgctggagaagggaatggctacccactccagtattcttgcttggagaattccaaggacagaggagcctggtaagctacaatccatggggtcacaaagagttggacatgactgagcaacttacacacacacacactgggagttttataaaagtgagtaaagtgaaatttgaagccagcctcgtatatttgagaccaaagttcacactatttctagtaagccaaaggtcaattccatctcccagaacagtattagaaagtagagggcgaatcatgcaggtaaacctcttccagctcaggaaaggactcacattttctgccactgcaatccagaggataattcttgctattccctctggccaccacaattccaaataaacattaactcagcctttgggggcttgttaagagcagctgaaaagagtgtaaaagtagtgtaaataggatttatcctgtttctctgctgaagaagcagcgcaattcacaatggagaaattcagcattctttttttccttcaaaatttgccttataagagagatgtaaaggaaaaaatatatgcagacttgacttcagtggccaattcccttcccaacccttactaagaaatgaattgaaactgtaggtgccaacttttcttccaaatagcagccaactctctccccttattcctttgtcctctgtcaaaatttagacgttaggttttcccacaataaaatcttcttagcctcactttctgatgtgatccggtcttactaacagctacaccaggaattcagccaaacaaatt

SEQ ID NO: 32957 - DNA, 1704 bp, Bovine  19866880347393
  misc_feature (1)..(1): n is a, c, g, or t
natgtcaaactaaaaccacacaaggaggcatgatttattagagtagacaaccaaaaaatctgaagaccacccaccccaaaatatgctatatatatttctacctacagaacatttttaatattttaaatgtacttggctgcagtaggtcttagttgcagcactctgagatctttagttgtggcacaagaactctgagttgcagaatgtgaaatctagttccctgaccagggttcaaaccgggaacctctgcgttgagagtgcggaatcttagccactggaccaccagagcagtccctccacttacagtattttgtacactcattccttctgccctccagaccccatcttcaaaactcaaataaaatcctgatactccttctaaaaccatttttacgaccctgccatggagacctcttcctcttgggaactttgtacatcacttacctgtactacccatttggtacatgcacattcatccttggactattgtttgaaatcggtaattgtatctaaaccctaccttgaatataatgttaatgaaatcaaagactatattaactatcttaatattacccattgtttattacaaacactacactactcatagatacacagtcacctaggagttcatcaccattgttgttgttcagttgctaaatcatgtcctactgtttatgaactgcatgaactttgtgaactccatgaacttcaggcataccagacttctctgttctttactgtctcctagagtttgctcagagtcggacacgactgaagcgacttagcagcagcagcagagtttgctcaagttcatgtccattgagtcggtgatgctatctaaccatctcatctcctgctgccctcttcttttgtcttcaatatttcccagcatcagggtcttttccaatgagttgactctttgcatcattataagccaattcatgtcattgttcattaaatacaaagaggtacagggtcattgttaataagatacatgggagacaagttcacgacagaataaagtacttgaggtcttgtttaagaaacaaacacagatcacttatttccagtattctatgtatttatatctaaaccttagcaatattttttaaaatatttattgttcacatgtctgtgaatacagggatgggtgaaaagctgaagacaaaatttaatctcccatccagcataagatgtttaagaatgtaaactagatatatagagtttctttttttctctcttccttgttcaactgactaagtctactgtttggccctttactagaaatttagggccataagtacttttcatgaaaagtacttttggtggggcaaatagtgagaaggagttaattctaactatacaatcagccttgagaaagatattactaaatcatttccttaacttgcctttcattaagttgagctataatgttcatcttctttgtagattcaaagtttattaagaatgtgctgtttatataaagatgttgttgttaactaacccattggaaataggatacttttccaattatttttcttgcattagcaatgggtttactatccaaaccctttgacaaattgctcttgaaaccaacatccagatttgtaatccagctcattggactcagggatgtggtccagagcaatagcttttgcttagagttttgcttagagcatatttatgcttttgtgccaagctaca

SEQ ID NO: 32958 - DNA, 3162 bp, Bovine  19866880348567
  misc_feature (1)..(1): n is a, c, g, or t
ncatgaaagtgaaaagtgaaagtgaagtcgctcagtcgtgctcgactcttagcgacccacagactgcagcccaccaggctcctctgtccatgggattttccaggcaagagtactggagtggggtgccattgccttctccaatattagttgctagcagaactaaaacccaagtttccctgacagatagaaaactatgtgttttttttttccaccatgtaacctaaccctctttcttcccacattcccctcactacccacatcattcctcccacatcactacaaagcccataagtcaactccctaacttcaaagcataactaatcttagaaaatgaaactccttaagtagttatttattacccaaatatttgaattaagactgtagagagtagtgtaaatcagtaattaatatttaacaatcgatttcaaaatagcatgctttgttatatcaataatgatggtattcttcaataccattgatgttacatatttatgtatcaatactatatatctccattatgcttatatggggctatgggactatactgaaatagagataataggaataaacaaactaatcatagctacatgcttataaactctccagtttgaaaaacctcaccaagtcatatcagtcatatacagtcagattcttttacacatgaaagtcacaagcactcataaattaattaaatttatagttgttttcatttgaaggactctcatttaaattctcatgccaggagaattcacttgtatcacaaatattgcagcctcttggtatctgagattcttcagaagtgtttaagggaaatccccaacccatcttgcaaccattggaaaaaaaaaaattcaaaccagctgtaaatgatgtgctatacacaaggagttacttctgtgtgtgatctaagcataacaccacttctgtggagcgaacctactcttcggctcacctggtaaattggaactgccttgggttttaggtgcaggtgtaaaaacagccatctccaaatgctgccaaagaacacatgctttttatttcccaagcgatgacattccatccatgagaagttttcatgtttcttggcagaaagaaaattggctcattctagactagactgtctgtctctgtagtggtggagccaagtcaaaaattttgaaacatttcttccctagcagtcctttagtctgtggatcagcttcattgtaactttccaaatggatccagccaactgggcaatttgctgttccatagaacaaaacccttcaaactgggataatcttactgtggggtgcaaaaagacttttcgggggggggggtggcgataggtgagttttacaataacagtttccccaactattagttacttaacgaatgtaactaataataaatcttaaattccttacatacagatttttaactgataagcttgaagattcaggatcattcatttagttgtcaaatccattctcctgtctcacctcttcttttacaatctaactcccacttcctaaaagaagagtacatccctcacccatctcatatttccctatgagatagaaaaaccaagaaacaattccaaattttgtactcagttgtacttagactctaaggccttgtaaatcaagtggtctccaattctttttaccaacagcatttaaaggtcctaatcaattatcaggtaatggactataaaaataacagttaactaaagactagtctgtgttctttttttggcataaaactcagaagatcgagtaattgagtgacattgctatgacaaaattccttctattcttatctacttatttatgtgcataaagtttctcagcagttacatctataaaaatgaagagtagaaatgaagtcaacactgctatgttttttctagcagtaagtaatattctaacatgggtacagttcagttcagtcactcagtcatgtccaactctttgcgaccccatgaatcacagcacgccaggcctccctgtccctcaccaattcccggagttcactcagactcacgtccatcgagtcagtgatgccatccagccatctcatcctctgtcatccccttctcctcctgcccccaatccctcccagcatcagagtctcttccaatgagtcaactcttcgcatgaggtggccaaatagtaactaatcaactaattaaaaagaagccccattcatttcactgagagatgcttttccattaaaaattttatgtttattaaatattgctaaattttaatttgtttaaatgtactactaaaaatggtaactcaatccagagaatttattaaacacttaggccttatggtcaaagaatatttaatgtttttaaaacttcaattagtatcttttgagtacataaaagtgtgaaaaagtgatcaattaaaacttccatgcataaaaatccattacattagggttaaaattctatagcagaaatgaaatagaaatatagattaaagcataaaatggagtgggggaatatgggaactctattatctacttattttgccatgaacctaaaaatgctctaagaaataaagtttattttttaaaaaagaagaatcaaaaggaataccataaaacaaccagctgttaaagaaatataaacattgtcattacttaatacctgctatcactacagaatttatatgccatttgtttttaaaagaagcacaataattatattttaaagtgtaaatatttacagcatgctgggaaacgtatcctttagttcagttcagtcactcagtcgtgtccgaatctctgtgaccccctgtgctgcagcacaccagcttccctgtccatcaccaactcccagagcttgctcaaactcatgtccattgagtcagtgatgccatccagccatctcatcctccgtcgtccccttcttctcctgccttcaatctttcccagcatcagggtcttttccagtgagtcagttcttcacatcaggtggccaaagtattggagtttcagcctcagcatcagtctttccaatgaacacccaggactgatctcctttagaatggactggttggatctccttgcagtccaagggactctcaagagtcttctccaacaccacagttcaaaagcatcaattcttcagtgctcagctttctttagagtccaactcttgcatccata

SEQ ID NO: 32959 - DNA, 3308 bp, Bovine  19866880492084
  misc_feature (1)..(1): n is a, c, g, or t
ngtgtctgtctctcaactagagaacttgctggaaacagatataggaggacctaacaatgcttcagaggatgactctctttaattggtctaagggatcttctttaaatgtcattgatacccatgtaatgtgtggcacaagggctgtcagaatagaatttgtcataaggtcattgctgattttagaacaatagtgaattattcccagaaagtttgaaggcacttggaagattatattaatacttcttgttttatctgtatactttatgtttctgggaataggggtgagagtggtggagatctccgacagaccagaggagggtaggaaggagctttaagagaaaggaaaaaactaatactaatcagaagtgatggggaacaaagggaagaaaatagattaaaatgctgataaagatgctttgtctcgcttcaggctgagccgttagtcattgatctgaaagaccttttccaagttatctataatacaaagaaaaaggaagaagaaaagaaaaaggcaagtactgtcccatacaggccttattaaacttgatacaatattcaagactgtgtctaacattatgtgaacatatgtcctctctggaaagttggcttctatgtggctcttcaacgtgtagaatgtaaggaaatgtatttctcttctttccaaagggcaatggatgggtgttatagttaggcctttctaatttccagtccctgactcttgtcttttatccttataagtttcacattgattccaaggactgtacatgagtaccaagtctaatagctctatttaaatccagtattgatatgaggaggggtggggaatgtagggtagaaatcaaatgcaagactctcttatgccttatgcctgtgaacccataggtatatttattctccttttgaactccctttgggcttccctgatagctcagttgataaagaatccacctgcagtgcaggagacccatgttcgattcctgagtctggaagatccgctggagaagggatagggtactcactgcagtattcttgggcttcccttttggctcagctggtaaagaatccgcctgcaatgcgggagacctgggttcgatccttgggatgggaagatcccttggagaagggacagactacccactccagtattctgatctggagaattccatggactgtatagtccacggggtcgcaaagagtcggacatgactgagcaactgtccctttcactttgaactcactttaccgataatttattaagatcattgaatttgtgtctctctttttagatggaagaagccaacaaaacagtagaggtaaaagagcatcttttgttcttgtgaattgcatgtgtcatatatataagccctgtttgccatctacccaagcagacttccctcctggcttattactgtgtgttcatgacccctcatcttagaagatgtacagttgaatgattagcaccaaaatcttaactgctaataagttaatacactaggaaattaaattgcatagagaaaactcgccaactgactctttaatatttgccatcttttcagaatgggagtgatgccctaatgaatcttgatgacccaccttgcaaactgaaattggtatgtatgtgaatttttatgattcttacttacctaaacacaggttttacttcctaaagatgttgctaataccgaatatgtatggaatctgtatgaagatccaattgtgacaactctttaaccatcagtataacatttatgtcagtatacaaagtaatctttttagtaaaaaacttctgaatctaatccaaatacttttttaaaagtatacatcaggtggatttgtctggggacctgtctacactacctgacctaactaacctaatatcaaatctatattggataagtgaaaatccaattgtgacaactattttcctaaactttagcttaggaaacaattacaacaatatacaaaataatcatttttaatagacacatctgaatctaatcaaaatacttttttaagggtgttgaccagatggatttgtttggggacatgtctacacctccctgacctaagtagtccaacagtaagtgtctgtttttaaatttgcaatgtaatagaaatggcatctataactcaaattggcaattcaccagaaatcttgagggtttcattgaaacttggaaggtgactattgatttttctgcataaagtgtaaatggctactagaacaaatttgtatcttaagtcaccataggagcctatcagcactacaacagatacattaatattgcttagaagttaaatctgagcaataggtcaggcaatgtagtccatcttggtattacttaggatcagaaggaggagctgaatattaatccttgatgtaagccaacttgaaggaaatatgtttgttaggtgactgattgtatagactcctggcctcttcttgttttctaattcttttgttgtaacttggcagcataagcgtggtataaagtgagaccaaacagttaagaggctcatttatgtttaaccaaagcttgtctttgtttaaaaaaatgctcattctttacaggatattatagtatatcgaatcttcttattattgatctgtaacaactctgagaatggagtgatattttcctttaaaaacaaggaaatggtgattaataaacctctcatctacccaagcagaggttcagtttcaatgcttaagcctaagtctcagaccttccaaaacaggcttcaagtgaaattacattgtaattttgaatgcttcttaaaacttttttgtttatttaacaatttcttgagtatcagctgtttgcagggcacagaaatgagattcataattcagtgacatcatggagtttaatgtctatcagggagatcaatgttaaaataatcacaaagcctaatagttgatgttacttacaaggattttatttagtttagaggttcagataatgcctctgagtaagtgagtttctggacttgaacataaattatgagaaagcacctagacataacttaagaaaaaaggtgtcggtctagaatgatgggaagaatgtttatctgggaacctcctgtagaactgtcaagcaaacctctgggatcaaaaaggtcataggaactagagcaacagcggattgagaagtggtgaatgtccttcttggtggagtacagtagagaatggcatgcttatgaaacttcacacaaatacctaggcccagtgagatgggaaggagcaggggctgcagatattcatctctacccccacctttatgagaatcaaaatgcataacatagca

SEQ ID NO: 32960 - DNA, 754 bp, Bovine  19866880617866
  misc_feature (1)..(1): n is a, c, g, or t
ncctgttcgatcagttacatatttgttttctactttgaagctggggttttatttaagatgtctgacttcagaggcaaaggtttaaaaaagaaatcccaaaatgaaactccaaaatcataccaccaccactcaatgctgatgtagtaaagcacagctgatattttctttgaagggagatttgagcacctactatttgtaccattccaatttctgatcctttggtctacaagttaagttatatgtttcccatcaggattaacgttgtgtcccaaagacagactggttcagcaatcttcacaggactatgtgaaccctctgacaaatattcacacacatgtggcttatttctgctgcactaaatggtgacaaagagtgtgttagaatctgcactacatattatagaagattagaacaggtcttgttcccttaataggacacttaaaatatgaagaataagtgaggtcactgggtgaaatgtttatcaatagaacaaggagggcagttgcacccagcacagatccattaaggaagttattcttcactttccagttctttgggcatagattaatgttaacctcaggaggacgcaactgccctgcccagagaacatttgagaggtgccttaagagttaacatctgtatgcctggactggtctacgaagcgttgccacattttcttgcttgatcctcacgtttaatagtttcacggtatgtaagaaagatgggcttctcgtttgcagcccgaatccattca

SEQ ID NO: 32961 - DNA, 1442 bp, Bovine  19866880650147
  misc_feature (1)..(1): n is a, c, g, or t
nagtcataatcccatggactttcacatatcagttaactttccagaaagagccacataaaacagacacaggaaagggagttaaggagaatcaaggacaaagcaacatcgacgtctttgctagtgtccagcactttggaagggtcagaagtgtgcttccttgtcctttggaaccttttgcttgtctcagctgagatcctgaactaggacatgtgaaatattaacctctagggcacatctgggggtccaagagggcagcaaacagccttcagcactatcttcaaagtagccttttgagaataagggaccttgccagaaatgatgcagccaagtttctgacatttggtgcaaaactagtctcccttaactgcttgaatccctatgcttttaggaaaactgattctactttgcaaagaccaagctgagtagacagtaagatttttgcagactatttaattggggaaatgagactatgttaacacacattgaaaaggagtccttaggagattttcttgtaaatgctgacactgctgtaggggcctcaggaacaaaatgtgcctgagttgaggaggtatgcactggttaggcatttacagagagcacatatcattgtctgtaacccgtgggaaggatgctgcagaaagataggacttagaaagctctgaactggaaaacttctcccagcctttgaaaccaagtcagaccagagttaaaagttccccagacagttaatttgggaaagaggccagatagtgtagcaggtcagagttcaggctaagaagtctttcacattttcactactttctagctctatggtttgagtcaatctatctaatattcatttcttcacctgtaaaatgggaatataatttgtagtgttgttataagaaatcagtaataactgatgtagagacctcagtgcctcgaatacagaaagctctcaacaagtggcaactatgattaaatcacatgtaggtttcatggacagttcagttcaattactcagtcatgtccaactctctgcaaccccatggactgtagcaagccgtggactatgtgtcaggtatgcagtcttgtgttgtagttgacattgcttttccacatcaaatgcttaaatgattttagaacaagtgggaccaataagtaaatcgctaataagtagaaacactgttaaaccacctcctgtccaactctggctttgtgactgtagaaggtaggttctgacaggaatgggcttccctggtggcttgatggtaaagaatttgcctgaaatgcaggagacctgggttcaatctctagatcggggaagatcccctggagaagggaattgatccactctggtattcttgctcggagaatcccatgggcagaggagcctggtgaattacagcccatggggtcacaaaaagtcggacatgactgagcgactaacacacacacatctg

SEQ ID NO: 32962 - DNA, 762 bp, Bovine  19866880693574
  misc_feature (1)..(1): n is a, c, g, or t
ntaatctgaatgcaagatgttctctgtagaacgttgtcactgcctttagtgataaactatttagagggaaggaaagagaagaggaactctctcttgactcagcaagaaactatgaatgaatgaaaattaagtttaagaagtaaacaaaaagaaaataaagtattaaaaactgaaaaaagagtaaagattagatcatgaaataaataattttattcatatgatctgggagagaaaaagagacgaagaaaggacatatgcttagaggttatggaaagactgaaggaggaaacaggttctggaagaaaccagaaaatttgtcagttcaagacatggggaaattggctccaaaagctgagacagagaaagagaaaagagataaaaaatgccttacattttattgcagagtatacttcccagagcatctggcaaaagctgtctttcttcattcctacttccaacactagattttcaaatgaacctatccccttccttactggaaaatgtctagaatctaaatataaatgacctcagtgatcccactgacctccagtcaggcattcagaaggccctctctggagaggattactgagaatgggggcaggagagcatcatggcctaggagtgtttccagagttggagctcagtgttaggcttgaaagaagggcaaagtcagggaggaggtggacattctggaagagtaaacaacataaacaaacactgagatggaaatatttcaatgtgcttacaagacagtgatggcgg

SEQ ID NO: 32963 - DNA, 2910 bp, Bovine  19866880718817
  misc_feature (1)..(1): n is a, c, g, or t
nacttgtggtgccagagggtgggtcagggaagggctggactcggagtttgggactagaagatgcaaactattgtacatagaatggataaacagcaaggtcctcctgtatagggaactatactcgatatcctgcaaaaaactatagtggaaaaaacatataaaaaacggaatcgctttgctgtacaccagaaactaacacaacattctaagtcaactatacttcaacaacaatgaaaagaattttgtaagtggctgctgaagttcacagccgtacctcactccagggagtcaccctcaacccgaaggaacaatgttcccccgagatgcatttgagaatgagattgggagaggaggaagcctctggtagccaaagactgttgacaggggaacacaagcccagatcccttgcttcagcgagggatgagcgctgctccagcgcttccctgtggcatccagctgagcctgggctgcacctgtatccgtccatgtctttgcctgccttcttttcctgcactatcctgtttccttttcccttacagatttctcctgggagatctccctcaacagaaacctcacagaagaattccagtctcaagttctgtttccagaagacccaacttaagaaaccttcctagtaagtctaccttgatagccatgttaggaacaggagagattcttgtcttctttctcttctagacaaatgcacaaaaaactttatatgtccttgaacggtttggggttttggttttccagtcctgtatgtttatttagttcttggaggtcagtaaccggcatagcttagcatacctcttttacacctatgcatattaaagacgagaaaccaaaagaaaactttggtcccctgaggtgtccgggtggcaacagcatttcagtgcttttcttaatgcagcttctaccatttagggtgaaactccgacaggcatagcatattaaagtacaacaacatgactttcatcataactttaaagtttactttcaatagttctgctagcaatatgatggtgagggaagcttcagtagctcatggcatgtgtttgttaaatcataaatttgaaagggaagagagaatttacatgcctgaataaaattcatcaacttaaagttttggaaaaatattaacaatatttcaaagatctgtttccaagaactgagataagagggttgacattggtggtcatagaaagtatttctttgctcacctttgtttataagaatctgaccacaaatgaagaaaatagcttatattaacaattgaatatcattctcagctgggcaaaccccaaatcacaactttgactagatttccattccaggacgtggcatttgcagtatatcagaggctaaggaatttgtatgcggcagcattagtttttatgattgtattccaattagacctctcagtggcatttggtgttaaaatggaatctggctgtaacagacactaaataaatttagttcagcatttacacaaaaggactcattactggcaagttgggtagctctacagtggcctgtgttccgtcttgttgatttcccatcataaatggctgacattgcagatggaccacatgggtcaaatctggcccataataatttgggataataattagggttaatttgttaggtctgaatagtgcttttaagaaaacttgaatcaaaagtaaaaaaaaaaaaaaaaaaaaaaaccctaggaagtatataaaccttgacatcacttcttttgaaaaattgaagactgttgacaccagactcacaatccatgagatttgagtcatatatcaggagcgcccaggtgaggatcagatgttgctgttcagttgttcagtcatgtccgaatctttgttaccccatggactgcagcatgccaggctttgcggtccatcaccatctcctggagtttgctcaaactcatgtccattgagttggtgatgccatccaactatctcatcctctgttgtccccttctcctcctgccttcaatttatctgaccatcagggtttttttttccagtgagtcagctctttaaatcaggtggccaaagtattggagcttcaacttcagcatcagtccttccagttcagggttgatttcctttaggcttgactgttttgatcttgcagtccaagggactctcaagagtcttctccagcattacagttcaaaggcatcaattcttcagtgcttagccttttttattgtccaggtctcacatctgtacgtgactaatggaaaaacaataactttgactatacagacctttgtaggcaaagtaatatctctgctttttaatacactgtctagcttttcttccacggagcaagcatcttttaatttcatggctgcagtcactgtccacagtgattaaactcaaattgggaaattggaggaaaacaaaaaatggattgattacacatgagtggacagtgtgtgtatgtgggggaaccataaagcaaggagcagtaccctagaaccagtcatcttagggagtgactacagtcttggaggaaggagagggagaaacagtggagccagggaggcagcatggtggagaagcctgtctggcagagctgtgacttctcatgaaggacacaacgagcttgtggacaatgcctcagggaggaaaccacaggaataaatcgctaaagttcactctctttccctctgagtgtctgctagtgctcctcatgggctgaatgaagctacaagtcaagggagcagcccataaagggtagtcctgagggacacagagcagaatggagaagattggagcagggatctggatgtccaagtaggagatactcggtataattagcaactcacccctgtaaacaggggattcccctgtagctcagtcaggaaagaatctgcctgctattcaggagacccag

SEQ ID NO: 32964 - DNA, 1676 bp, Bovine  19866880739837
  misc_feature (1)..(1): n is a, c, g, or t
nttctggcaggaaagaaccctggcataagaatctgttgccccgtctttgaagtctaatatcatatttttctgtaggatattattgctgacaagaaaagtcttagctcattaaacatggcaaattttattcaaaagtgagtattttaaaggaatttgagaaatgccacaaagcattttgagggggcttgggagagggaatggtggtgtgtggtttagtcataaaaatgatacaagacataacaacattataactcaagaccaggcattaaatctggtgtcagcagacagctttcaaaatggaagaggtctacagtgagtggtgctgccatggttttatggcaaaaacttcttttgttagacactgaagttcaacattcatagcattagggttattttaaggtacttggtattctttgactatatcctttcacggtttggggatgagcagttacaaggagcaggggagaaaaaaaaataggtataaaacattcctttagcatcttagcatatttttttgaagaaaagccatgtgtctgttgggttgtaataggcaaaggcaagtctctattgcaggccatacaatttaaaagttatctgtgctccctgaaatgattggaaggtagattttgcccacaggctccaagactcaaagataaatctctttataaagaaacattaaaggtttaccgaaaaatttttagccaaagcgtacaaccagttatgtgtatgctgctgctgctactaactcgcttcagtcatgtccgactctgtgcgaccccatagttggaagcccaccaggctcccccgtccctgggattctccaggaaagaacactggagtgggttgccatttccttctccaatgcatgaaagtgaaaagtgaaagggaagtcactcagtcgtgtccgactcttcttgaccccatggactgcagcctaccaggctcctccatccatgggattttccaggcaagagtactggagtggggtgttatgtgtataagagagtgataaacactcacctttctccacagctttaaagagaaagtccctcatcacagatctcccaaatgcccaagttaccatttgacctgcgggagacagaggaagtcttgcttccaaactgaggtccctctgtacgaataatcaacttaaatccagtgtttaaaattcaaatgcatactccttccaacaatgttacagaattgtcaactgtgctcataaaacctctaatagattttataatgaattgatttttgggaaggctttgggcctgaaaaaggaagctgaggacgagaagaggccctaccattttctgtgactgctttcccaaattagggtattgtttaaaaaaaaaaaaaaggcatctattttaaagctctagtaaggtaaaaaagatttttaacttttatttttaaaggagaaccactgggtgtagtacaaccagcaaggatagtccttctgactgaggaccaaaagttaatcaggaaacatacacaaaggatgctatcataaaacatggattactaataaagtccaaaaacataatcaaaaagtcacatggactgccccactccccccactccatctaaacctagctggtttgttagtctagttcttaagaatgatctgtttacttctttagatgcccgagaagagaaataagacgatacatctg

SEQ ID NO: 32965 - DNA, 1398 bp, Bovine  19866880774324
  misc_feature (1)..(1): n is a, c, g, or t
nttttctcaaaaaacctttattttaccactgagggtaaattctacaggtgttatcagttatattttacagacaggaacctaaaaacagaaaattattctgcttattcaaagtttgacagttagtagcaaaactgggttaagaatttctgtctcgccactctttcttgctgttatttaattgctaagtcatgtccagctcttttgtgacccctgaactatagctccccaggctcctctgtctgtgaaattctccaggcaagaatactggagtgggttgccatttccttctccagaggatttttcccacccagggatcgaaccctggtctcctgcattggcaagtgtattctttgccactgagccaaagctacactttcgcttcctctcttatgctatcttttctccccatctcaaatcctctttgaaataatctaaagaatcatagcttagtccacagtttatggatgtaatagtctgatgattgttagacatttagagacacattaagttaataagggtatatttattttttaaatatagcagctctatgtgaaggtcagcaattaggcaatctagttcttgcctgaatgtatttttaaagcttatattcaggttagccatgaagttcacacccaaatgaactttttggccaacccaatatataaatgttgtcaaattaaacaaaactgaaaattactgaaaagtgtgtgaacacctgaatgttttgccttcattgcaccagatacctggatatttagaggcaaaataaaggtagggcttgagggaattattaggaggaaataacagattatgtaagaggaatgtgttattgaaatgaaagcactccataagtattaagaaagaaggtgagtaatcttggatagctccttttgtgcccagtaccccctccccagaccctttaactcactagacagacaatcttttgtagcacaaagactgtgtctgtacaaagtctaccacctgcctttcaccctgctgagctattaggctgagtggagaagtatttataatgcactttctggattcttagatgaaatgtgtttatcaagtaaagcctacttccaagtgtttcaatctcagcttgaaagtcatttcctagatcaaagagatgtacatcaacttggcagggggtctaaatctggaccagaaatgcagtaaatgaagagccactgaggtacacctggtcgcatctccctgccatgaagagaggtttccagcttcagaaaatgaaaacctcaggagagtagttcacacccaggacactttgtggtgggcccaggcaagaaaacgcctgctgtagcaaggaatccttttgtcaataaataagacaatgtggctcctttgaatgaagaatataaactaacacaggaatgcatt

SEQ ID NO: 32966 - DNA, 1813 bp, Bovine  19866880779658
  misc_feature (1)..(1): n is a, c, g, or t
naatgggcttaacagctgcagcacacaagctcagtaattggggagctggggctctagagcacaggctcagtagttgtgacacatgggcttagctgctctgtggcaggtggtatctttctggatcaggaattgaactgtatcccctacattggcaaccagattcgtatccactgtgctaccagggaagtcctagaattcatggattacaaagtgtttgttggttacttctttgttttccacttaacaatgatttattttttttagaactattcatagatatacatcaagaaccaaacaaaatctagacaaaatgtaaaagatcagaaaccttaataaagtgatggtgaaagcagtcagaatagcaattaaatttgtcccaagttaagtagtatagattactatatgtcctacatcgttcactgacaaaggttattgatggaagtgctgcttatctggaaatatatactattaatttgctcgcaaattgccaaaatatatatatttttttagcctaatcaagtatctaatattattgcaacctgccaaaactaaatttcagtagtggctcaatggtagggtattttcctcatggactgaacattttgctattcttctaaaaactactttctaaatattgtctgtcacttgattgtactcagccagaattggtttgggactaggttttgcaaaatcaggggttttgcccaacagtggctaatttgggttttggtttggcattgtggcctataagaacatggagggtttccactttccaagttttcttaactgactgatgacgcatcctgaaacaagaatcctatttttcttttcaataacttgttctcctttctgggagggtggcctgtgaaatgtagttaaaacttgttattttaacactactaaacaataagtcaacctaagctttacaacttactctatcatagatctaggtgactgtattgaggtaaggagctttatcaacctgtaacatatcttttttatttaggaaacccgcacaacttctctacactgctcccattcttcatctgtgactctgtttcctcttttctctctgagccaggaaatgttgatagctccaagttcttacagtcctcattcctcacgctccgtaagtccaccccaggactcccattctattccttcccagacttcatttacatgtcacatgtgtgtgtgctcagtctcttagtcgtgtccgactctttgcaaccccatggactgtagctcacctagcttctctgtccattgaatttcccaggcaagaatactggagtgggttgccatttccttctctaggggatcttcccaacccagggatagacctcttatctcctgctttgacaggcagattctttaccgtctgagccaccagggaagccccatacatgtcatacatacatatatttaacttatatgtgccatgattcatgaactctatgactccttgattggaatatgcaccattttatctaccactaaaaagatcaataatactaccaatttaaaaatctatccaagctatcaaatgtatgacatattccaacttcagaaatattaaaacatgaaaaaagttgtcttgggatcaatgaactatatatagtaatttaaggcaagataaaaaggaaataactttaaatgaccttataaaggcagaactactgtctttcattttgatttcctgattgtcttcagccctacctatctcttccttcatttgatttttacattactcaaacaaacaaacaaaaaagtgcctaccatatattgcatgtcctcagtacctacatactga

SEQ ID NO: 32967 - DNA, 910 bp, Bovine  19866880810572
  misc_feature (1)..(1): n is a, c, g, or t
nttgctgcctggcttccctgaaagttgactttggagtatctgctttagatgtccctctattttctcatattctgaagctataatattatctctgcatcaccaatgtttactccttctctgctcatagatgttatatttctggcttatattgatttttattttaaaaatgatgattgactcaaagcattcactatcctttcaacatatcaatcagttcatatgagacttttctaaaccttgagttctagtaggacttcctttactcctatataagtttaagtatattttttaaaaatgtttagcatttgaagaaaagaaattcaattattgtcttctggcccaatacactctatcttagaaacaagaaaggtactctgtaagtatcagcttctgacaaaaaacttttcctatacactgacttttttccttttaatataatattttgtagaaggaaatggcaacccactctagtattcttgcctgggaatttccatggacagaggagcctggtggactacagtccatgggatcacaaaagagttggacacgactgaaagactaacacgcacagtgccctacttgcaggacctcagctgcctgaccaggggtcaaacccagggcttggcagtaaaagccacaagtcttaacctctgaaccaccagggaaatcccttaacctttttaaaaaagaatgattcagaagtcagcaatcttcagtcaaattactgcctgatttgaatttcatgtcattttatgaactgaaaataaataaaaacatttaatgcttcatgattacatcaaattataaaaataactacataaattatgaatatccaacaaagttattgggggaagtgaatttttaagaattaaaaaagattcagagacattggaatggttaaaggttagat

SEQ ID NO: 32968 - DNA, 787 bp, Bovine  19866880905892
  misc_feature (1)..(1): n is a, c, g, or t
naattgaacccatgtcccctgtactggcaggcagattctttaccactgagccaccaaggaagccctcagcaagactctttcaaagcctagaatttaggaggaggtgaagggggcatcaggtttcctctgcttcaaagcaattgatagatttctttggaggcagcaatgtgcctttgtatttgagggacttaaatgtagatgttaacccaagaggataaatgtttattccaaaaaaaaaaaaaaaagctgcccttagccacactttgaaaaaaatccttgctacacagatgctggccagtgggcgtggatggagcaatgttcctctccagaggggacagtgagctcctctgggggtagctgtgctgccctcatgcgtggttgctggcagcactgcaagccatttggctaatgtacacatggcgccctgccacagcccagcaggtcagctgcccagttatgggggggaagtcattctcccacccactcccaatctaaaacagttatggttgttctgggccttgattctatccctttccctcagcaaaaaagagagaagtggagaaggatacagttagtaaaaaaaatacatctcaagctgagaagtgcatagatgattcaacagtcttccaaattctttctactgccttgctcaaagtaaagggcacagatttatttttcttctgttaaattcaagcgtgggttatatgactttctgggtgggcagtttattttttcgtccacattcagctttagttcataccttagtactggaatacatatgtgtgtt

SEQ ID NO: 32969 - DNA, 1663 bp, Bovine  19866880928757
  misc_feature (1)..(1): n is a, c, g, or t
nccccaaaggttccagcttggtttcagatttttgaaaaaaatctaggattccattgcatacaaatagtgaaaataactgtcactaggctacaattttgatgaattgcttacataatctgaatcatgagaagggatccagatgtgaccttgttaacttagaccagtaagtttcatttttcatactgaccattgatttctcaaactcttttcaaattctcactcctccatgaaacttttgtttccccctactctcttgttaactcatccaattggatctatacctgtcttatgcagaaattgcactctttcacgaactgcttcctgcttgttccagcccctgtctcagacatctgcaggcactgagagcgtgctcttgcagatattgtcccaccagctccaatgaagacctcgcctggcacgatttctgtttcttttcttctaatgaggacgtgtcttctgccctcagcctggcgtgaacagtctttggatgtctgcaggaacactgagttgagtcttcttgtttacccctccaagggcagtccagacgaaagacgtctggcctgggttgttggttctcacgccggtttccttccaggattgcagcctgcccctggagcctatttctcagccaaagccctgaccccttacacagtttcaaaccaccctttcttgcagtattgcttatcctgattcaaatgactctcttttctacttgttggccagtctctgcacttgatctcaggtggcctcagccttcagcagcctgaaatgggtctttggttcccggccagagattgaggctggattgaagtggtgaaagcaccagatcctagtcactagactagtcactagaccagtggtcagtgacaaggccctggcccttcagctttgcagaaaagaatttccacaaagacagaaagtagtgaaacaaagtatttattaggaggaaaaatagtatagtatgtgtggataaagaaaagggaaaagaaaagaagaaaggcaccaaaagacagatgaatatcttttggccagattcaaaggtgatgatgtgaaatacaaggccaagctaactggcattgatgatgtgccagttgcaagagaggataaaatgagccaagattctgtgatgaaactaaaggtaacagaggaaagcataatttatcactatgttaagcaaatctccaacagaggaagttaatattagaagtttgtatttacctatggctacctatggtagctcagtgataaagaatctgcctgccaatgcagaagactggggttcagtccctgggttgggaagatttgctggaggagagcatggcaacccactccagtattcttgcctggagaatccccatagactgaggaaccttgcaggctacagtccatggggttgcaaaagagtcagacacgacttagagactaagcatcatgtgtggatagacacaaggacagactcagggaggacccctgaattgtgctcgcgtggtaattcaaattacttttatggggcatttcttctgggtctccttggccaatcaatttgatttgcctggttcagaggccatatttggtatacatctggatcctcccatgtgtgcacacacatctcttagccaagatggattctactgaaaaggcctatgggtagagcatcccttag

SEQ ID NO: 32970 - DNA, 1133 bp, Bovine  19866880989528
  misc_feature (1)..(1): n is a, c, g, or t
ntgaggcagccagagtatgatttgaggggaaaaaaaaataaaccaactagacattagaaatggaaggttataggagattcacacccatccacagagagatggatgatttttgaaacctcactttacagaatatgtggactccttcccccatacctctttcttctcaacccacttctgttccatttcttttgaacatggaagaaaatgcactcactatttcttaatcaggattaaataatataatcactccacagtcctgacttcacttgctttcctctcctggaagtcacagcagcaagactctgccatgaaatgagcaatttctctcacctttgttgtcatggggctctttgctgtcggttgcaccttttctcattaaaactgtgatgttctcaatttcaacctttccatggtgtatatcctgctcttaatacctagccactctcttttctcaggcgccctcaattttcaaggtgctgcatgacttcagctgctctgggttttcacataccactcattcatgcatttctttattttctccagagggtcctcgtgattccttgctaatgtgttagttctggtatgtggcactttgccactatctagttcaaattctgtgctttactaagattgcttattccagggtacaaatgatctcagtatttttctttgtttttgtatatacggcaaaaaacattctggagtttggtattttatactcattactaattctattattagaactaataatcacacttaaaaacaaaaattccacgtaaaatatctcatttgatactcccaaagcctggtaaattcttcttgttacagaaaggtatacggagttcaagcacatagtagaacagagatccaaacccagattttctaagtctcgtgttcttctcaatacatcattgaatcctgactttctttccttcttgtacagttagtatttggagtttagaatctcagctcacatacagaactttttgtttcttattctaatccaaaaaatttcccaccaaaccctagtaatttaccttcagttcaagaacccctcatcattgcagatgatgtgttaacatctgttctatcaataccctgacatggacacaggggatgtaggtctcggccag

SEQ ID NO: 32971 - DNA, 870 bp, Bovine  19866881264367
  misc_feature (1)..(1): n is a, c, g, or t
ntatgtggtggcgttattttgattttaagaaaagaaatccatcttgtttttacccttcaaaggaaagtcaaggccagataactgaagatacaggattagaggggcacatccaaaatacagtttggatgaaattcataaacagtgttcaaagagataaaaaggaaggacatgcaatggtaaatagttttagaggaacccctggagtcaagaatcccaaaagaagacaaaaaacagtgaaaatgcacttcttgaagtttgctttaagagccacactttttcccccttgatgaactttggccttctgttaagtaaaaaaacagttttcattgttctctcatactggctaactgttctctttctaccattttcagtagaagtttctttctcccaagtaaagatgtcatagtgaaaatctgaatcctactgctaattcataaaatttatgaattttcagtagatgtaatctatcatgtgacatgctaaaatacaatgaattcacaacacagtttgatattaactacacttaagtttcttgatgtccacttaatgcaactatatgaaccaaatgtagtgtgttgaaaaagtgttttgttttaaactgctatacaagggagttagggatgacgtcactataactgtaatgactatagtgtagaacgctggtaccacagctctttaaaattcttctgatgtttttttaacatctggtgcatcgttctaagagttgcatgataaacaaaaatggtagatcaattaattcattcttacttaaagttgctccagaaagagcttcatagaacttgatatgtgggggataagagctgctgagggaaatgagggaaaggagaatgagaagcaggcgaaggcaag

SEQ ID NO: 32972 - DNA, 910 bp, Bovine  19866881632628
  misc_feature (1)..(1): n is a, c, g, or t
nattttccttaagaatgtaaagaattggaggcaggtgagaatttaaaataataaacatattttaaaagaaagtagttgaagccaaggttatactgcattttaaattgtattgtttccccacctagtggtcaaaaagcagctagctccattttctattttattcagatgtttgtagaggaactgaaatgggtcagaagagctcgtttatcattttcagtgttcaaatcaacttctttagggtaccatatttcttggtgccactttaaaatattaattataattttaacaatgtaactgattattcatatgaatatagaaccaatagttgaatattttagtatacaaagcaaattacatggttgttaatagtaatgagacaggaaaagtgaagtaataagaaataagaaataatggaaattactatggttgaaaaaggaaagtttaaccagatcttactttgggatcattcttagtgtaagatttttctggctctaaaattagaggaaatgtaagaattcaccattgtaaccttttttattagttagaaatatttaacattttctggaatttgagacttgccatatcagtcatgcactcccagacagacttacctaagtccattggcttaaacaagtcatcataattgtataatttctcatgcgttaaatacaggaagacgtgttccagagaaaaattcactggatttcattttcagtgagggcaggcatgggacagagtgtcacttagatttcctctgtctttaagaatcaaactgacaaatgctaaagtcacagaataaaggtcatgaatggcaaataaggtataaaggtcaatagcttcccatctttaaaagtcaggatatagagctctaatagctttctgagcatgacagtcataacattaaattaat

SEQ ID NO: 32973 - DNA, 1420 bp, Bovine  19866881641117
  misc_feature (1)..(1): n is a, c, g, or t
ncctagatgtggttatttcgcctgctttctgaaacttcctctctccttgccctgcttatcaaattcaatcaatgtttgctcaggttagctaacttttacatctatggagaattgaaaccatctacttttcatttgtgcagtagctacaggtggactttgcttagaaatcagaaggtacaacaaatccgccttcacagtctttcctttgtatgcttgataattaaggacagatagtttggaaactcacccctcccccaaccccatcccttagggaactaattattagacagtgtgtatctcagccttactgtgttgggatagctagttctgctattaaaaaaaaaaaaaaacagaatccacccaggcctgaaatgctgtctcatgcagttgtgagtacatgtgataaaattaggttctttcgggtgaatgtccttttgtgataaagtcaactcaactactttcaaagttataatgaataaaattgccagtagttcttttggagtatgcctgtacactgacaaaccaaaatgtattaatgtaagttaagcctcctaaacctcccattagagagtttttactagatttcacatgaattctttcaactaaatgtctgtcatagatcaaattcagcagatgtttatttcaacttcttttgatctctgccagtacttacataaggattcaatttattgttggcttatcagtttttgtagttaaaatctgactagaaactagcgattctgagctctggttttacagttccactagctggttttaaaaggtatatagtaaaattctgaaaaatgttaataaaattagtttttactgaattaatattttaaagagcatatagtagttttttggggaaattagtcatataaagtaaaagatcctaatatgaaaaaaaggagaaaaaaatttgaatgcttttaaaattcccattctcaaaacacttattttgactgaattttgttttgcaagttctttgtacattttacttatgagacagataatcgttttagaaaaattttgtatagcttttgttatgcaacaggcattactctattcatatgtaaaactacataagccttataacaaccttaataagtagtaggtagttattcatctctttttacacacagggaaacttaggcacagagaggataaactgatcaaaattgcatggctgaaaatgggcagcactgagattcaaatccaggaagtccaaccccaaaccacattcactttaaactctattcactaaaaatttaccatttttcacttagggttcctgttatactgggttagacttggtgtacatgatcatcaaaatgggttaagcagtaaacaaataactaaagcaaactttggatgtttgaatcttttgggggagcttacaagaaaaaagtacctagcccca

SEQ ID NO: 32974 - DNA, 1026 bp, Bovine  19866881951924
  misc_feature (1)..(1): n is a, c, g, or t
nttggcccctgatgcgaagagccactcttggaaaagaccctgatgctgggaaagactgagggcaggaggagaagggaatgacagaggatgagatgtttggatggcatcacggacagtggacacgaatttgagcaaactccaggagacaatgaaggacagggaagcctgacgttctgcagtccatggagttgcaaagaatcagacttagcaactgaaaaacaaaaacagcaaaaggatgagtggtagaatttagaacttattcctgggcctttagccagaaggaagtctctactcattgtccagcagtagaagtgctgccgactgcctccaagcatcagatgaggtagaaactttgaatatacatagtcactgaagctcgttttatcactctttcttttatatcaatatgatgaaacagatctgtaagaactgaataactgtctaaagtagattgggaaatagaatttttataatattaggttgctgctgctaagtcgcttcagtcgtgtctgactctgtgcgaccccattagatggcagcctaccaggctccctcatccctgggattctccaggcaagaacactggagtgggttgctatttccttctccagtgcagaaagtgaaaagtgaaagggaagtcgctcagtcatgtccgactcgtagcaaccccatggactgcagcctaccaggctcctccatccatgggattttccaggcaagagtactaggaaggggttatagctattgttcctcactccctatctggaatgctttccttccaagaagctttccctgccatagttgatgctacaggaaaaatgtcatattgcatgtggcatttttatactgccttgaattccaattacctgtgaatatgtcatctacacacatacatgtatatgaatttctggaaggaatcactgaattgtatttattctggaattccttgcatagtgccttgaatatactgtttgttaggtgtgttgaatggatgaataaaactatcaagtttcataaatttaagtt

SEQ ID NO: 32975 - DNA, 752 bp, Bovine  19866881970756
  misc_feature (1)..(1): n is a, c, g, or t
naaggaaggtcaatccagggtacaaaggggagtaagataaggaatgatctgagtacaaccacaccaaggaacagaatgaagagggaagggaattcaacttcttcttgtgtgaaagcctatggtaaatatataaaagctatttgcctcttaactgctttgcaatttactttcggtaaaatgattaaataatcttaattacaaccacctataacagagtctggaaaaactgtgaaaaatgaaacataaaaacctgagccccaaggcacacctcttaaactgttccaagcaataaaaataatgttacttttaaatatcaaatggaaactcttttagaactcttcatacttctaatttgcattctgtgctaggacatatgtctcctaagataaacatgaaagaaatgtaagccatgaaaagtcaaaaaaaaaaaaccaagaaatacagccaatgtcaactgatagattcgtattttccaagaggtctacctaaagtgtggcttgatttttctgttgaagacaatataaactgtcatccaggccacgaagagttgaaaacaacacctagagctaaaaagataagggaaaaagtaagtaatgtcatggaatgtgtatatgagaaagtgacaaagtacttgccaattgtcagttttaagctaacggggaatttcctataaacctagaatagtagattcctgacatcaagatatcctaagtattgttccactgctactatttttcttccctacttactat

SEQ ID NO: 32976 - DNA, 1335 bp, Bovine  19866880124880
  misc_feature (1)..(1): n is a, c, g, or t
nttaagtgaagttgctcagttgtgtccgactctttgcaaccccatggactgtagcctaccacgctcctccgtccatggaattttccaggcaagagtactggagtgggttgccatttccttcttttagacccttgagttgactcattggaaaagactctgatgctggaagggattgggggcaggaggagaaggggatgacagaggatgagaaggctggatggcatcactgacttgatggatgtgagtctgagtgaactccgggagttggtgatggacagggaggcctggcgtgtgcgattcatgggggtcgcaaagagtcagacacgactgagtgactgaactgaactgaactgagtaacattttaaagatttttttacctttcacatttttttttaagtttattcctgggtatatttttttgcacagatttctctgttactgtatcagggagggatgctttctgctacaggttcagaaaacccacaaaagtggctaaagttgataggagttaatttgtctcacataacaaaaatgcagaagtatgtggcaactggtatggttctacagctcaatgttgttggacctcgcatccctgcagttttgttttggccttttcttcaagtgctcattgtataaggggtgctgtacctctagccatcacattcacatacaaggtaagaaacgcagggagaaaggccaagattatttttctcatgttaaataaattttcatggagagctttcagggctcatgaacaggatcttgttggttgcttggaatgtgggaacatcccttcaactggatttttggttttgttttttaaatttctgcaggaacctcaggagtttcaccaactgggagcaatttttatgttaatgtagacctcagatttgaaatttttaatcacccagaatttaagaagagagacatgctaccttatcatctttcagtaatagtggacagaactttttctattctatatttccactaagaatggcatctcagttccattttcctgctttccacctgggcattacaatcaagagccagataaatggccagttggccttctcaaaggccagttggccacagcatcaatgcacagctttatctttcaagtttatcattctttcattttttcccactgcctggagttttctctttcttttttgtgaactaagctatgtattttagacaatacttttctattttagctttttgagtcatctagtctaccatattgcttagcacaaagtttagtacatagtatatattcaaatgtattcttctttccttcattcaggatgtggtagaagggattgatgtcaaataca

SEQ ID NO: 32977 - DNA, 3428 bp, Bovine  19866880159748
  misc_feature (1)..(1): n is a, c, g, or t
ntggaaaaaccatagtcttgactagacagacctttgttgacaaagtaatgtctctgcttttgaatatgctgtctaggttgatcataactgtccttccaaggagtaagcgtcttttaatttcatggctgcagtcaccatctgcagtgattttggagcccaaaaaaataaagtctgacactgtttccactgtttccccatctatttgccatgaagtgatgggactggatgccatgatcttagttttctgaatgttgagctttaagccaactttttcactctcctctttcacttttatcaagaggctctttagttcttcttcactttctgccataagggtggtgttatctgcatatctgaggttattgatattttgcccggcaatcttgattccagcttgtccttcctccagcccagcgtttctcatgatgtactctgcatagaagttaaataagcagggtgacagtatacagccttgacgtactccttttcagtaataatattgcaaggtgagtttaaatcccagctctgtactcactaactatatgacctcagttacttactatttctgtaacttttttcattcatctatgagatgggaatatagtggtatttacagcatataattgctggcaagattaaatgagataattagataaagtgctttgattggtgtttggcacatacttgttgttctgttgcttggcacatacttgttgttctgttgcttggttgtgtctgactctttgtgcccctatgaactacaacactccaggctttcctgtccttcactatctcctggagtttgctcaaactcatgtccgttaagttggtgatgccatccaatcatctcatcctctgttgccctcttcttctgctctcagtctttcatctttcctagcatgagggtcttttccaattggagcttcagcttgagcatcagtcctccaatgaatattcattgtttatttcctttagaatcgactggtttgatctccttgctgtccaagggactcctgagagtcttctccaacaccacagttcaaaagcatcagttcttaggcgcccagccttctttttggtgcaactctcacattcgtactggaaaaaccatagctttgactatgtacataaacacatagtacgagattaataaatggtagcattgttactatcactttcattttgtaaatgagaagctgaatacagatttagcaacctgaatagattcacttgtaagaaccaaggatgtgtttcaatacaggtttgtgcaatgccattactctatctttttatcagactgcattttgtagttaatgttttatttgttggaatatgcattctgaagtgctatagagtgtttggaagtagtttgtgactcttagatatttaaaactatctttctgtgatgttttactaatagtttacataaactcagaactaaattggttagagaaagaactgtttggcctggttttcctgtgattagatgcaatttaagggcaaatatcctggggtcgtggtcagtggttagtaaaaagaacaatgtgtttttttcctgcctaaacaggttattgaggtgaagctgacagacagtaaactacacaaatttaatacagtttgctaagttttagcatgtgtaaacatctgtgaaaccatcactgcaattcaaatagtgagtatatcacacaaattgtgggaggaatcacctcccacaagtttcctggtaccccctatgcaatcccttcctcctgctctccctgatccgtcacccacacaaacattggtctgccttctattactttttacttctattattcttatagattaaacagtggttttgaagttgtagcaatcaggatttagatctcccattctgtcactgtgttagttgggtgactttggagaagtcattctctctctcagcctggtttattcacctgtaatctagggattctagcaccagcccaaaggaccacagggaagaggagaacagtgcctagaaagagccttgcatggttcctggctcacagctggtctttagtccctgaaaggcaccagaccagctttcagttggtggctcagagtacatttaggtgttcagagctccaaaatgcttttctgtcacctagtccttgtgttccctcttactgaatgagctttcttgaaataggaaagtttagattagacaacttgaggccctaaagggctctctggtatttcttccttccctcctgcatgcccagtgttccacatgctattaattataaacagatgttcttcataaataagcaaagaacttcaccacagatttctgagttctttatgcctatgtttaagtctgacgttgtgataaaactgcatgcgcaatgagtttgtagtcagagttctagattttggttcccatgctgccctgggcaaattgtaaaatctttttgagtctctgttttctcagatataaagttgaagagtatcataccacacaaatttgttgggaggattaaaggagaattttgaaaatgaattgtatgatgacatcatagtttatctgcattgtcctgtgactggcttgcagtgtagtatttaaacttgatattctagaattttttttgagtttattttattaggttttactaataggtagcgcaagaaagcaaaaaccaaaggttaaaagtgcttagaatttaaagtcagagaaactttaattcagatattaatttagtagttgtgtgaccttgggcaagttatatactttctctgagccttaataaggtatatctggtcttcctcagagggttgttgtgaggaatagaaataaaatgtgtacagtgatgggcaaatagcagatacttagtggtgctactttttcccttccattcccaaaattggtagatttgtggagttcagtgggctatcactgaagagattacttctgtcttccccattccataatacaatttggcccaggatagccattagatggtgtctcagatttcccatttaagtctgaaaatgcgattcgaggtttatgatgccaacagttattgtaaagggatttcccccccctaataataggaggaactgatgccatgtttttgtattttctcgttaattctcattgctgtagctggaggtactttgtactgtgggagccagggaaattgggggccatattgttttttctgtttgtgtttatttggattggagaattgtctaaaggattcttagtgaataaagtagatttgctaaattcaaattcttccttcctgggtgaacccaggaatgacctcctgagagaaaaacataggaaaatgtaggggtaactggtgagttctgcttgtgaagtcaggatctttgagttgggggcagtggagaagagttgattctccattctcctcttaccctccagagcgtttacagcccaacacaaa

SEQ ID NO: 32978 - DNA, 1474 bp, Bovine  19866880173004
  misc_feature (1)..(1): n is a, c, g, or t
nttccccatctatttcccatgaagtgatgggaccagatgccatgatcttagtttcctgaatgttggctttaagccaactttttcactctcctctttcactttcatcaagaggctctttagttcttcactttctgccataagggtggtgtcatctgcatatctaaggttattgatatttctcccttgctgtcctgtaaataaattcttcagtaccatttttatagattccgtatgtatgtgttagaatactatatttatctttctcattctgactcacttcactctgtataataggttctaggttcatccacctcatcagaactgactcaaatgtgttcctttttatggctgagtgaaactcctgtactttggccacctcatgagaagagttgactcattggaaaagactctgatactaggagggagtgggggcaggaggaaaaggggacaacagaggatgagatggctggatggcatcaccgactcgatggacctgagtttgagtgaactccgggagttggtgatggactgggaggcctggagtgctgcaattcacggggtcgcaaagagtcagacacgactgagcgactgaactgaactgaacagggtattttcctatctcatttctccttgctatgacttcctgttctccttccttgaacccctagaccccaacactctggccactaggccactcatttttattctatgttgctgtgtgtatgtgtttgctcatagggctcccacaggctggaaggtctatctttgctggaaaaaaatccttatccacaaggcccaggtccaccagatcttctcttcccaccctgacaatgacctcccttagcactgtttcttgttaatcttacagataaggacacgcaggctggatatggcccatagctgagttctggaggccccagaagataatccttgggtatcttgatcttctgccatccccggcctcttagcatcagagcatagacacacggttcttgatgtacacatgataggggtcactgcgcttgtccactttgcgggagcgggtgtatccgaggatgagactgcccacagtggcagcaaagaggaacatgacgaagaggatgtacatgtaggagttatcattgcggccaggcaggctggcccgcttctcctcagtcaggttgtctggccctggccggcagagcaagttgctgtgaagagtggcatttaaagcctttagcacagcgtgcaggctctcatgccaggtctcagccccactggtggtctccatagcaacagggaaggtgggggaagaattggaggatgttctggcagtgacagaaaagagagaagatggtttctgttacttaaagcttgaatgacccttccatttcttcagaccccagctaaaatcccagcctcacagtttattctaattacttgtttacctatcttctccactagaccgcaagcccgaggaagttagggactatgt

SEQ ID NO: 32979 - DNA, 1623 bp, Bovine  19866880359122
  misc_feature (1)..(1): n is a, c, g, or t
ntaaagtagagagttgccatttccttctctagtgcatgaaagtgaaagtgaagtccctcagtcatgtctgactcttagcaaccccatgtactgcagcccaccaggctcctctgtccatgggattttccaggcaagagtactggagtggggtaccattgccttctctgatgtatgtgtgtgtatatatatatatatatacatacatacatatacatatacatatatatatatggtatgaaacagcttgggaaattttaatatcgacagggtatataatggtaataataagttattcagggacttccctggtagaaaagtggttaagaatctgcctttcagtgcaggggatatgggtttgatccctggtcagggaactaagatcctataagccatgtggcacagccaaaaaataaaataaaatgactggtggaaatgagtcattcatttttaggtatgatagtgctctttctgttatctatttacaagtctgtatatcttgaacaaaattgttaatcttagaggtatttcttaatgaaacaatattgaggtctccagatttgcttcaaaataactgcaaggagatccaaccagtccatcctaaagaagatcggtcctgggtgttcattggaaggactgatgttgaagctgaaactccaatactttggccacctgatgtgaagagctgactcatttgaaaagactctgatgctgggaaagattgagggcggtagaaggggacgacggaagatgagatggttggatggcatcaccgactcgatgaacatgagtttgagcaagttccgggagttggtgatggacagggaagcctggcgtgctgcggtccatggggttgcaaagagtcggacacaactgagcaactgaactgaactgaactgaatggttattacaaactgaatagaatttgatagtgtgttcatttcttagctatccatgggaaacttgtaagaaattttgttaggatatttcagctgtaaataacaacaaaccttaactgttatgaccttagaggaatatactatttcccacaactagaagctctgcattgagaccacaacagcgttgattcattcattcagtggctcagaactctgccatcctcagtgtgtcactcctgtcctcatagttgtaagggactaattcatttccagtcgtcacatctgaatccaataatgtctaagagcaaaaaaggaccgtgtatatctttttattggcctgagaaaccttttccagaggtccttggcagctttctactcatatctaattgcccaaattagatacatgcctaatcagtccctggcaaggagaatgagaccacatgaatgctttggatcaccatccttcactcttggcataggcagaaactggagagcctggggcaggaagatggaatctactcaaaagtggaggtctgctggcatgagaaaaggaagaagtggcatatggaaaagcttcaacaatatctgctaaaggcaggaaaagtaacaacaaggagagagagacagagacataaaacagagagcaagaggcagaggctatacaatcctaagctcttgaatgcacagtaacatcagcattcagagaaggcaatggcaacccactcca

SEQ ID NO: 32980 - DNA, 1334 bp, Bovine  19866880456329
  misc_feature (1)..(1): n is a, c, g, or t
ntccaattggtagagttcagatcagtggactagcccagctttctccaacccatcacatcgatggattttttaccattgtttcaccaacatctaagaaacttggagaactccaggtaaaaatatcataattgtctgctacatagagtaaaacttcaggggcacaaatatttgagtctgtctgtagaattggaaggtacgtgactcccaaataccgtgcaaatacccactccatgcctttgttcttacccaatgactgttttgtacttatttcccacttatctatatcctctcagttctttgctgcccatctcaagttccaggaatccttcacagctcctcctgcattcattcttctctgtgctctctattaattttataacatgaattacataatcattgttcagttataatcttacatagtctccaaaatcatatatctgtagtttccttttaatttcctttccttttagtttatagattccttgagaaacaggacagtattttctacttttctttgtttttcccacagctcctaaggtagtgccaagcagtagtagcttgtttgactcatttaagtggtatctttgatgttcattcattgattctgcctacattttttttttgatagtctgttatatgccattaacttaggatacggagataagagatcgtcctttcagttagttttccaaagtcaggtaggctgaaatagaagagagtatcaaatagaacacagtgtgatacatatatagtaaatatacgtactggatagtgggaaagaacatagaagggtccctttctgagggagactctgggagttcttcctggagaactctgaatattcaaatccttgagaaatttggtgagtttaatactttgtcaaatatattctaaaatatggatagaaatttaagcagatatttaagaaagcagttcaaaaaagaagaagaaagaacatataacattaccagatttaagaacttgttataaaaccacaagcacataattgtgtcaaaggaagagaataaagtccagaaatagatttaactaaatgaaagaacttgggcttccctggtggctcagtggtaaaaaatctgcctacaatgaaggagcctcagaagactcaggttcgatctctgggtcaggaagattctcctggagggaggccatggcaagccactctagtattcttgcctggagaatcccatggatagaggagcctggtgggctacagattgtaggatcacaaagagttagacacgactgaaaaaactgattttgcatgcatgcaagtgaaagaacttagcattttctatactctttatcatattttt

SEQ ID NO: 32981 - DNA, 3129 bp, Bovine  19866880508281
  misc_feature (1)..(1): n is a, c, g, or t
nttctacacccccaagggatcggaccgtgagtgctgaggggtgggtcaaggcaggatctaggctgtgggtcaggagatcagggtggtgcagactcagaggcagagctgaggcatgggaagctgaagcatgaggagactgagcctcatgtcgaggaggatttggaaccctggcctgggagaggtgggcatggggcaggggcagcccccagagaccggcatcaggcccgcagaggtgcggggtagtacaactctggcccgcttgctctcctcctctccagactccagcatcattacccggattttggcgggctgtaccacgggggccatggcagtgacctgtgcccagcccacagacgtggtgaagatccgctttcaggccagcatgcacactgggctgggaggcaacagaaagtacagtgggacaatggatgcctacaggaccatcgccagagaggaaaggggttcggggcctgtggaaaggtaggtctggactccaggcttgggggtcttgggcagcgtcttctccaccctagggctgggacagggaactgagcaagcagggagctcccatcacaagtattccagcagttctaaaggaacatcctaacatatcccaatggaccagctgactggccatactgccccaaattcagttcagtttaccaacctttcaccacgcgcagggctctgagggagacagaaatgaacagaggataccctcacggctcacagtcacagaggagagaggcatgtcaaggagcagccattccacagggcaggatgtgctgggttcacacagaggtgcaggccatgagggcttagggcgttcgggggcagaggtgatgtgaaagttgggccccaaagttccagtgagctcctgctgtgtggagagggaaggaaggggccccccccagcaatggcctgtgaggggtgactgatgcgcatggagaagaaacagaggccactgcggggagcagtcatgagaagggggcttccttgggaacaaaactttaaggttctctatgtgtttaagtggtgatgaccttgacaaataatgttgtctctaccacatgtggccagggctcacatgaatcttgcagaagaaaacaatgacccagtgatggttaaaggcaggacacctgagtcacagccttgcttgctgtgtgccttcctggagcccagccctcatctgtgaaaccagcgggtggtctcgcaggtcgcatggctgcaacctgtcactgtttcaaaagcccaccattcctctccgaggaaaggcttccttgtctggctctagccaggtctcagggaggcatattttaattttgatgggtattgcagtttatcctctgaaatgtggcccaaacacacacaagagggtctctctgctttttgtctctaatatggacatggataatctgagagcttttaacatcggaaaggaaagtgtggaatctgcccatccagggtggactcttctagaccactggaacgaggcaccatatcccccacctgggcctgtggccttgcagccagggggtccgcttcttctatttcccactcatcagccccacccgcttcctgacaggaattctgcccaacatcacgaggaatgccattgtcaactgtggtgagatggtgacctatgacatcatcaaggaaaagctgctagactaccacctgctcaccggtgaggccctgggctccaggcagatagccctcccagtctggaggggcctggggctccacagagtgggtgccacccacaagcaaccgggctttaaaaggagtggagggaggcagggtgcccagcatcattagggtgagtaaggaggaaccctagacgggaggccaaagacctgggctccagcccagcaccatttctccctgtgcaccttcaagcaagggtggccttctctgaccagtttcctctaatgaggtggttgggccggattagcttccaactctgggacagcccagttttgtgagtcctcatcaagagctccatcttggcactgcaagagatttggaaaacactatcctcatacttgggcttccctggtgactcagaccgtaaagaatccacgggcaatgcaggagatacaggttccatccctgggtcaggaagatcccctggaagaggaaatggaacccactccagtattcttgcctagggaaatcccatgggcagagggacctggtgggcgactgtccaggggcttgcaaagagtcagatttgacggagcacaagcactagactatactaacctcatgcccagggagttcagtttcattagggacaaacaatgaacacatgtgaaacagaaaacaagggccctcttcgtctcacagcccaatatctgctcttcccaccctgcgacagacaacttcccctgccactttgtctctgcctttggagctggcttctgtgccaccctggtggcctccccggtggacgtggtgaagacgcggtatatgaactcgcccccaggccagtaccacagccccttcgactgcatgctgaagatgctgacccaggagggccccacagccttctacaaggggtgagctcccctcctgccaccagcaccccctcctagagaaccaggcctccctccccgtctcccttcctcccctccatgtagagtgtgtctgccatgggatcacctagaaatacagtattgaacagcacagatgtaaatgccacaaaggaaaattacaatataaagacctaaggaaatgtttttttgaaagagaggaccaaatctgaattgaagatcagggaggcctatctgagaaaaaaaaaaggagtctatgcatagatccaagtgcatccccaaacacacaggaagaggaggaggagggaaaggtgcttggtaatcctgaggtttttccctgacccaccgacatcactgcgggtcaccactgccgacagcccgtatgcttcacacgttcctggcatttactattccctctgcatggaagccattcctgcgtcatccacatgctctccaacttactgtccttcaagactagttcaaataccaccttctccctaacactcgcagatacaaattttccccctctgtaacttcagcaatacttccctataccatttttacggacccacca

SEQ ID NO: 32982 - DNA, 1204 bp, Bovine  19866880519942
  misc_feature (1)..(1): n is a, c, g, or t
ntgagatcagtataatgggctgcacaggtcacaaagaaatgaaggactgacagctgggaagatcaaggaaggttctcattcctcatttcacacatgaaggaaaccaagattattatcaaattagggagatgtaaaatactcagaaaaggaacggcagtggggttttaggagggatagaaaatctaggctccaatctcagcattaccacaaaatagactattgacctataagcaaggcattcattcatataggcatttggtaaagcatttgagaactattatgtatcaggtattgtaccagtaatttccatctctttatttgttgtgcctgccaagattatctcatagcgagataaaatgaaattatgaaaatgaaagcagttcattagctgcagaataatgttaacattcctatttgtatagttattcgcacaaaatactcttactgacattattttctataatttttataattccatatgatgggcattatcacttgcattttacatataaaaaactaaagcagagaggccaaattacctgcctaaggccacacagctagcaagaggtagaacacagctctgatgcaaatcccataaatgtaaagtattaactaacacttccagacaaatacaagactgcatacgattaagtgccaaaaataataccagctaagagttcaaaaaataaacaagcactttggctagaatggtctgaaaggttttaaggaaaagattagatctgagctgcgctttgaaaaatggagcatttggaggtggtgaaaaagtaagggcattctgagaaagctcctggagatcaaagattaggaattcagtattgggtaaataaagaggacactacctggtcaaaagcgacaggtcagaatagaagagggaaatcagtaacaaaggaatctagaagggagaagtgacatcagactcagaggggccctatataatcttataccttaaggtgatagcctatgacagatttccatgggttcttcaggagtatgtgtgttgtgtgctgtgcttagtcgctcagtcgtgtccaactctctgctaccccatggactgcagcccgccaggatcctctgtccatgggggcagaatggctaaaaacagtacaccttgaacaatgatcgctccctttcagcagcattcctcagattcaaagcttttagagtaggagcttaagtcaccaat

SEQ ID NO: 32983 - DNA, 2148 bp, Bovine  19866880602766
  misc_feature (1)..(1): n is a, c, g, or t
nagagaagtcttctcacttttggtccacaatatcctggtcctttccctggaggcagtgtttggaatacttgctttagcagcaaataaaaagttttcaatattttcatgaattttgtttagtatgttcattagtttctatttatttttatagaagtaaatggtgactggcaaaaagctgatgctgtctggaataaaatgcaagaagaaaatattattcctcgtgagaagacattaaggttattagcagaaatccttaggaacaataatcaagacgttccatttgatgtacccgaggtaatttgtttttaactacaagcataatagattttgttgtcgatgtaaatttaggttatagattaacccagctttacattgaaaaggttgctgtatttaccactttttctttaactgaataattttatttttaagttgtggtatgaagaagaaaaagattccccaacttcattaccctcacctgtagaagttaatctccagaaagagctattgaatgcctgccgcacgaggagaaacaaaggtaaacacgtgccctggggtcttcgtttagatagcagcgtgggatctaagcccagcaagtcagtagtgatttaggaagagatggaattctctgtatatattagttattttctttcacttaacaaagacattttggtacaattgggaaaatttaaatgtcgactcagtagtaggtaattaaggagtcactctcatgtttatattagatagaataacagcttatgatttatagatgtcattgagtttggagatcagtagtgaagtattgagaaatgaaaaaactgaagatttctgtaattcattttaaaaatcttaagctgtaagccataaaatatttaagtcaggagctatgtgtttaaaggttaaacagatcaggaaacatgttgcttattagatgtaggcagtgggtatatggtgggggtcattatactattccttatatttttctgtacacttgaaatttttcataatgaaaactaaaatacatgttattttatcaaaattgcactttgaaaataacgtgatcgtgaattttttggcaaatgtatttgttacatgttttgattttatgtgaaagcaaaaaacgattaggactttacgcttcatacagtatctctgcttaacatctcaaggttgtaggctggatatgagacccgtttcttgctcttcttcccttttttcagtggtgatatttccagaaggtgtgcctacctctcttaaactactttaaaatttctgtgactatcttgaaccctctgatacaagcttgcctttcacattctagatgttttcattcagacttcatcatactcttcccagatcatacactacttccattttcttcacttaagttttctctgtagaatgcttctgttatctctaatttctccagtttttatctagatttccaagtatgctttatgataatttaaccattatgcagcagatttgttttcattctagtattgacagttttgagttctcttccatagaaagccatcagtttaggaatttatagaacctcttaacttttttttcttcccaagagggcattaaattttttattgattacacgtgataatagatgatacacaagcttcattcccatctataactttattggtaccataattcattttaaatatattgcataggatatgccaacaatcattaataaccaaaaaagaactccatgacttggcaagggtgacccttttaacggtgaactccaggtcacaacaaaataactgtcagttcaactacaccaaggttctgaagacaatagcttctccaccaaagcaggttgtaaataaatttcaaatggaacctgacgtcaccctgaaggaattctaacttcacactgttggagtagtttaccaaaatggcttcagagtagactaactttacacagcaccttaaaaaaaaaaaaagacatttattcagtatcatgaacagactattgcatttagcaatcaacagcatgggtgggaaaaaaaaaatctacattaaaaaccctttgttgaaatgctttatactttgcacagaacagaaactaaaataacctattacacaattagtcacaagtacagttctcaagttttttgcccatacaca

SEQ ID NO: 32984 - DNA, 1952 bp, Bovine  19866880626961
  misc_feature (1)..(1): n is a, c, g, or t
ncatgcttggtattggagattccctggtggctcagaggataaagcgtctgcctgcaatgcaggagacccaggttcgatccctgggttgggaagatcccctggagaaggaaatggcaacccactccagtattcttgcctggagaatcccacggacaaggagcctggcgggctacagtccacggggtctcaaagagtcggacatgactgagcgacttcacttcatttcatgcttggtataatctgctatcatcatcttgaaattctttcttcgttcattcatccatttatttggctacatcaggtcttagttgtggcatgtggggtcttcattagattatgtgagagcttttgctgtggttcaggctttctggttgtgccacatgcgctcaacagttgcagcgcacaagacaagctccagagcacacgggtttcaggagttgcagcatgaaggttcagctgcttctcggcatgtgggatcccagaccgaccagggatcaaacctgcatcccctgcattgcaagacagactcttaaccactggaccaccaggaagtcctttgaaattcttaataatttttaaacaaggggttttgcattttcattttgcactggatctcataaaataatgtagcaaattttgtagctttttctgtgtgcatgtatatatgtgtatgagacagagagattatatctctcatctttacctcagtctaatatatgtgtattagtatttgtaatatacagatatcagggcaaacattctataattctaagattcttttgttcttcaagctactactagatctatcttactgttcaaataacagaataactatattgatgccactcactgtctaagtgaatatctggctaaatgaattagtgaccaatggactagatgtctgtgaatgcttggctagatgaccgggaatgtgtgagtatagaagctagatagaagtggagtccaacaaatctgattctgccatttactaaccatgtgacctggggttgacccagttaagttttcttggtctcagcctacctcatcggtagagtgtgagggttaaatgtaatatcaggggtcctcaacctccaagatctaatgcctgataagctgaggtggaggtgatataataataatagaaataaagtgcataataaatgtaatgcaggaaagcccctttgcccctagttttgatgttctccaaaccattctccattctgccatgtagtgatttccatgggcatgattatgtcatgcccacaaaactccccgaatcctatttcttccaggataaaattttgtacatcttagatatcattcaaggacctcctgtcatacaatcagcaaaaacgaatagaggcaatatattcccaatcccttgggatgtgttttcacatttctacctaaactttttacctaagccttccttttcttttttgcaataacagtttctttttacctgttaaaatattttaaatcacagtttaaaatgcccatagaaaaacaagagtctaaaaaaaaagaaaagaaaaacagtctaaaagattgctctgtaaacattagtcccctgccatttcccctcttctcagaggttacaactttcactctcgattattttcacatattcctcatatctctaaatacaatgcttatgttactactcaattttaaaatttaaactttccagtcctgaagatgttgctctttcatacatacacacatactcacacgtctttcctgtgcacccatcttgccagtataccataactttgcacaaataagtgttcatgcaaatactaatccaatctgagacacgtggtatattataacaactttcccttttctgcttaatccccccatttccttaatttcctgtcagttttataaaactccttgcaccatattcagagacatcattaaaaaaaaataatttcatctccttctgctgt

SEQ ID NO: 32985 - DNA, 1143 bp, Bovine  19866880667772
  misc_feature (1)..(1): n is a, c, g, or t
ncttttaagtatctcaagagatgtgataggaacacctccacatgtccaactgaacatgtttaagttcatgtccaattgaacatttgtttctatatgtacagtttgtcagagaaaaagcattaagttgtttttgtatgaatgcagaataggatttatgcaagaattaatagaaaactagtcgtcacaggccttgccttaaggaaaccttcagtttccattgcatccattctgctgagggttgtacagttattgtgtactttaaaaacaaaggccccgggggacagtcatttgtgtagcgtctgtttcttctgccaaatggagagcagagggattgtccatagctcacctcacgggtcctagaacccagcaggacctggactcagtgtttgctggactgaatgaactgaggatgggtcatggggtatcagggagctcctagcccaggacagctcttattcagaccatgactctggtcggaggtggatctggaagcccgatcccttagctgtagacatttcgagactggaaatcttaacaggaaagggtaaagactaagagagcttcttagaactttacaaattcttcagaacagaggcatttttcattttgttctgtgccttgttctgtggctagccctgggccacagagggttaaacccagtccctgcacttggggcgctcacagtccggagacagtataggtaggggactggtgaggcccacaggtaaggacggtgaagtattgagcagtgctataagaggggtatgtgtgaggcactgggaacagaaaagagagctgctaacccaacttggtgctacagcaggggcttggggtggggagcagagaaaaggcagagaaggctcttttcagaaagggacacctgagctgtgccttgaaaaataagtagtttactaagcagccaggaatgtgaaggacattcccagcagagagaagagtatggacaaaggagggaaggataaaaagggcatggtttcttgagagaagggttcactgtgcagctccaacaggccacttccctcacccctggccccagataaggtacaggacggacagggcttggcccagggtcactcactctgtctccacagccagccgcccctcaccagggccatttcctcaaaa

SEQ ID NO: 32986 - DNA, 841 bp, Bovine  19866880694491
  misc_feature (1)..(1): n is a, c, g, or t
natgcattggagaaggaaatggcaacccactccagtgttcttgcctggagaatcccagggataggggagcctggtgggctgctgtctatagggtcacacagagtcggacacgactgaagcgacttagcagcagcagcagtgataaagaatccacctgccaatgtaggagacaacaggagatgtgggtttgatcctcggatcaggaagatctcctggagaaggaaacagcaacccacgccagtattcttgcctgggaaatcccatgaacaaagaagcctggtgggcgacagtccacagggtcgcagttggacatgacttagcgactgagcatggatgagcacgcacacacactatatatatatttcttaaagtaaacaaaactactcaaagaaaagcatcttctacagctacatccttccctagtaaggcagaggggcaggcagggcctcttaccattaaaggggttatctcctccaaagaactcatggaaaactttttctgggttgccatggaagacgtaaccagttgtccatggggtctgcgatccaaactccagaggaattccgcccttcagaccctcctctccaaacttgtcatagatgcctcttttcacagctgtggatatgtgtcaccttgagaaggggccagcatgggggctaagagagctggagggctgggaagccagaggatatggggcagggaggaagaagcagggtgaagacagccttatttctaaagtgcctgctgtctggaagtctttggagagagacactagaagttagggatttaatttcaccctgggtggacctatgtaaggccccatagcccagaggaaagatga

SEQ ID NO: 32987 - DNA, 713 bp, Bovine  19866880739882
  misc_feature (1)..(1): n is a, c, g, or t
ntcatggcaagagttatgaattgctgagagtgcaaaagagtgacctgcattgactatgaagccactaaacatttgtaaatgcagctgctgctgatacaggtgagaaaccgcctcctacattggagatgatgattttaaagtagtcagcgcattggaaagagtactgaggaagaaatagactcaggctctaatctgacctctgtgaactttgtaacaagttaggaattctttggagattcagtttactcacatgagaaatatggaaataataaaacaactgccctgcctgacacattcagtcctattgggaagatgaaataaattaagagacatgaaaatgctgaaaaagtggtaaagcagatataaagcattatgcttactgtgatgaaaggagtgggtctcttgcttactcccctacctggaaataggcgaaggccaggtgatccaaggcatcctcaagacttgcctcatcctctgtcttccattctccataagagcctcggaagagactgacggcctcctccagccatggaatggcatggtagtaatcccccatgtcataggccacctgcagggaacataagtaccatcactaaagttgagtccacaggtagagcaagaaaataacaatgcaaaaaatgtgaggggcctttgaaacccaggaaggcaagttttctttccaactcatttaagttaaatatgctaagcatcta

SEQ ID NO: 32988 - DNA, 1139 bp, Bovine  19866880769169
  misc_feature (1)..(1): n is a, c, g, or t
naaatgtgattttcaaattactgtattgccactattgttcatttgttccttccttactttcttatagctgaatcttgtgtgactgtagataatagagctaaatgtagagtgctattcctgaatgagtttgtttccaaaggctttgcactaaagaagaaatgtgtagaatgttttgctttatttgcttttaggaacgtagattgtcatttaggaaatggcctatattctacaaagtggtatgaacaatgctatatatatatatatatatatatgaaaaataatgtatgttctgttttagtatctgtgtttcagtgactgaagaacaaagtggagctaaaatgatacaacagctcattcataatcactaaagccatgcttgtcattctattataaagagaacagttttgaatgcaacaatataatgcaacaggagtcatcttaatcaaggtgaaaagtcattaaggcttggattcttatgtcaaaaatttaaatatccaaagttaaaatgttacaaatgttctcaaagagtatagattgagggaattatttgattctagccaagctcttgagcatgatatttaacaagagcttgacatagtgggtgtacacttgtctaacaaaataaattcagtagcacaagacaaccaagaaaaatagaagtactggccagtaggacccagccttaggatctacattatctttttctttatgtacagtatcatggaaatgaatgccctctcattaagtaagtgtgtagatcaaaactgatattttctagagctttgaggaaaagaaaagaaaagaattaatcaggcaagcttaaagcactagaaataaacagtagaaataaacaatagaaaagtcagtaaagtggcaaggaaaatgcttcatgtgaagagcaaacttaccacccgaaaagtaggaaatgaactggctgtgggcaagttgttgacttgttgttatgatgagcagatagtgatgcttttgtctccttttattagtgactgctaagaagcagccagggagacctttgaggtggtgagaaaaagtacccctcataggattcagttcctgttaggatgttgtgttttcagcatcatatgggaacggagaggggaggcatatagcataaataaaaa

SEQ ID NO: 32989 - DNA, 1375 bp, Bovine  19866880774465
  misc_feature (1)..(1): n is a, c, g, or t
nttgaatatgcaaaaaaaaaaaaaaaaaaggcaaagattgaatgcaatcatttagttgatagaaaaaagatccaagtactgagctttgggatacgctacagtatttagagcttgggaacgaaagcaatatccatcaaaataaactgaaaaggcacagttggtgagatagaaggaaagcaagagagtgttagctctctcttggaagaagaaatgatctttgtcaaatgctgctgagagatcaagtgaggtcaagactaagaaatgaccattaggattggcctgatgaaggtgaccttgacaaaggaaatctctgaaagtaagtaggagataaaaagctgatgtatgttggggatgttggttgaggaaaggacgtgaggtgacaaagtggagaaagtaagtaagataacttttttgagatagaagatcagagaagtaaggtagtatctagaagtgaatgtggggttgaaaatgtttttaaaagatgttttataatatccactagatgttttatgtaatatctactaaagggaaaaaatgacacagataagagacaggatgagtaaagggacaagatcttcatgaacaaaagaggattgaaccagtgcccaacgttgggcttgaatagaaacagagataacttcatatattcagtactcttcaaggtagagtatatatgattataatacaggtagatttgtagattcagttggtggtggaaaaatgaaatagtaattctgattgcttctttttatcattaaaataagaaacaaagtcattatctaaaggggtttacagtataaaattttatgtgatttttttttttaagctgaaaaatgagatttaaagaaatgtgttctgcctggcctggcttcaggcagtgttttcaggtcccctgggacaggcagtcatttttcttggcccttagtcaactccgagaagactattctatttaaagagtgagctcctaagcctctatatcatggcatgtaagaccctccagaagctaacccctgcctgtcctgctctgtcacactctcctgttatctcctctgttcctccttgctctcttccttctaagatcgtcatcctactgattttttcacatcacagtaccttcgttcacagtgtgccttctgcctgttttactctgactaccctcttttatcttccacttatcctaagtcctcagtttaggcaagactttgggaagttttctctgacttcattcaaaataaatgaggttcattggaaccttactctattaaaattatttgtttcatttctttctccccactaaattatgtgcttcttgagctcaggcatgggatatggtatcttcctcttggtaaatattgccaggacttaagtgatttca

SEQ ID NO: 32990 - DNA, 1384 bp, Bovine  19866880801570
  misc_feature (1)..(1): n is a, c, g, or t
nccaaatacataggttatttttgaggggaaccaatgcttgttattagaggacactgaaccctgtattataggaatgactattagaaacccatatattatgagtgtggcctaggaaaatcagttatatgactcagtcacaacttcagaaaagaaagtgctaagttgtgtcctacagactgtcagtgctatactgcggagggactaatataaactgaggtcagaaagcttcccaaggagatacaccctgaaagatgggtaggatctgatcagttttgtgtagactggtggtaggaaatgggagattttctcatgagataaatcacaggaacagaagtagaggtgagaaagggcctgatgagagagcagttctctctgagggtagggtaatactctacaaaatattccaatctgtcagagttataaagaagtgctttatgctttcagccagagccactaccttccagtaatttgccaaaatgaccaacacaaagagaaagaggaggggcaactgctacacgttctctaggcctttttgaaaacatggagttgttcctttggccacatacacgcaaatctactaagagggtgatactgtaaataacaaggggatgggtactgttcaaaaaggaatgccccacaaatgttaccagggcaaaactgggagtctacagtgttatccagcatgctattggcatcattgtaaacaaacaagggcaagattcttgccaagagaattaatgtgcgtatggagcaatcaggcactctaagagctaacagcttccctgaaatgtgtgaaggaaatgatcagaaaaagaaggaagtcgaagagaaagggacttgggttcagctgaagcaccagcctgctgcacccagagaagcacacttcatgaggaccaatggaaaggagcgtgaactcctggagcccattccctatgaattcatggcattttgggtataaaaataaagacctggattgtaaaaagaaaaaagaagtgttttatatcttatagttaatctaagtatctattataatagtatctttgtcccttaaatatctaatgatggacaaaaagaacaatgtcaccttcctttccccaccttacacactatcccatccttctaagaatactaactttcactcacctccatgtcatcttcctttttcctcttgtttactgactcacttccttcttcgtcttcttcttcttcctctatgattccttccactatagattttgagccttctggacttgtaattccttcacacctaggtattaaaaagaaaaaaaaagtgctatcacacacctctcttctacacacaaattaccttagagaagctatttatgggtttttataatcaaatactagttaaaatttaacaatg

SEQ ID NO: 32991 - DNA, 1743 bp, Bovine  19866880826631
  misc_feature (1)..(1): n is a, c, g, or t
ntttaagcacttaactctaaaatcgtcatggaaacagcgtaagaaaaatttatcctttatttttctaaatttgttcttaaaaaacagtaatattgttttctttgtgaaagtggtctcatattaaaattgctgaaggaaatggtaatgacaaggtaatatttaaggttctacctcatttttcatctgatgattaattcattattttagtaaagtattcagtgtgtgggtgttacccttcttgctatattatgtaattttgcattactggaaaatgaaatagaactgaaacactccttgatctttctcttctaaaatcatcaatacttatcagaagaaaaagatttgtttgaaagagagaggaggactttttgggaaattaatgataactgatgggcatcagcactaacaactcagtgaaaacttgtgtgctgttcatagtggagttgcatgtgtatatgaaaaaaattgttttatatgtgctgagaagacatacttactttaagcattggtagggatggtgtctctgccacaccaccatatcccatgtccaccatagttcttgactcatagcagatcttaatcttgtaatttatcacataccttattccacaagtatcaagtgcctacagtgtattaccactgttggttcttcagagaatataaagttctcggcttcaaaacatttatagctgaggaaaagaatcacgttctcatgaaatctgtgtagtgaaaggtaggtagtatatgataaaagatgcaaatgctacatgatagtaagatattattgagatgtgaagtgaatagtgacacatgaataagatcatattcagataggatgatcaaggaagactttgtttataaatgccgcaaaagggacttcgttggtggtccagtagctaagactccatgctgccaacacagggctctcaagttcaatccctgtctggggactagatcctgtgtgccacaactaagacctggtgcagccaaataaataaataattattttaatgctgtgaaaaaagttaaatccttgagaagtatatttgagaacttcctgatggtccagtgattaagactctgcacttgcagtgcagtggacatggggttcagtccctggtcagggaactaagatcccacatgctgtatggctcagcccccccccaaaaaaaggaacatacttgatttagatacataaaagacagatgatactccaagaaagaagagcagttaacatacagtacaagactgcctagtacacattgtataaatacttgtcataaatcataaatactaagtttaaaacatttctttgttgtcttcttaccaagtactttacatacagtatataaatgcttagatttttgttgaatacaagaatgaatccatgtaacagtgctctaagtctgctgctattgttgtcctgattttagaagatctgagacacagaaattatacagttttttccaaattacccagctactatgtgttagaaccacttaatataccaagtgttgatctcacttattctcacagtatccctgtgaagtagataggtatatccatctcactgagaggaaaccaaagttttagagggtaagtgacttgcttaagattatagctgaagctagaatttgaacccaggtctattatctgtgctcttaaccctacaccattctgcttatttcatatttaaccttacccctaatttatccttttgtgctttatatccctaacacagta

SEQ ID NO: 32992 - DNA, 1847 bp, Bovine  19866880871321
  misc_feature (1)..(1): n is a, c, g, or t
ngacccagtaggtagatttgaattgcctccatggtgggatctctcaggggctattagaatcataataaagacaccattgccaaatccaaggttgtaaaggttttgctatcttttcttttttcttctatgagttttatctttttatctgtctcatttaggtctttgatttggggtgctactcttaaccttgtcccttacttactttgtgacctcagactgttcatttgccatttttcagcctcacttttttcatcttgttacaataaaagttgatatttgagtatacaaaacaacaacagaaaacagattagaggttgccacagttaggatttatggggagggtgttgaccccaaagatagagaacttttggggatggtgaaaatactttgtatcctaattgtgatggtgtttctacaactatatacatttttcagagctcatagaactgtatacctaaaaggagtaagttttactacatgtaaattgtacctcaataaacctagctctaaaacaatacctacaacaactcttcaaagaatgtgttattctttcccattttgagtctagagggaactgaggctcaggaaagttagtggacttgcctgtggtcccacgtttggtatgtggcagttccagaatttgaacctaaatctgcctgataatagagcttgtgatcttcctactcatttttagcctgtccctgaaactattaatgtgtggattctgttgtaaaaggctgaccttcacttgaaagccaggaactctatctgcctatcgtattcttattccacattttgaacccctggcagatctcatttctgccagtcattagttgaggttggagtccacgctgttgtggagtgctgctcaggcatggtctccttctgaggctgtggttctcatttttgagcagcaggagaccagtttcaaaactgatgagtttctttggttatgaagagcaatttcagacttcatccaatcagcaacacagagtagcctctcagtaggagagtgctcagatatttataggacccgttgtgctgcttagcagtcttccttaccctggcttatttaacagagaacccgttgggtagaagagcgatccaaggctattaccatcattatttacatctgcattccactttgtagtttgcaatgtattttaatatctgtgaattctcttagcaccttgctaggagagtgcttatattaagagagagaatgtacttgactgtggacttcccagatggtgcagtggtaaagaatctgcttgctgatacaggcgatgtggatttgatttctgggttgggaaaatcccctggagaaggaaatggcaacccactccaacattcttacctggtaaatgccatggacagagaagcctggtggtctgcagtctgtatcacaaagtcggacacaactgagcacacacgcacgttcttggcagtgttcttggataactctggctgcgagtatgtttttttcttaatttgtgccggaatgtgtatatttcctataactttcatcaggttgttcactttcattttgtcaactgatgatagtttaatctagcctgttgccctggggtgatttgccagggctgcacattgggtacatttcaagaagttctgtcatctgaatttgaccaatggcattttcttttttacctgtttgccccaccttcctctctttgggaacccatctttcctccacctttcattccagaaccctggacaggctaattaatctcaaagcaattgtcatcaagccagctgttgactttaactgcttgtcttcagcatttgacttgtttcctttcctgaggtgctgtggaagaagttaatga

SEQ ID NO: 32993 - DNA, 1694 bp, Bovine  19866880886969
  misc_feature (1)..(1): n is a, c, g, or t
nttgagctgggatttgaacctgagtctgactgattgcaaaacctatttttactatttctgatgcttacaaaacaatttactgctacttttctaaaattttaagccctacaaaacaaaaactgttttcagctaaaagagcttgagactcagcacatacttaaaaaaattcaactactggagccctgctgttttattctttcctttacctgctctggcaaggaaaaataaaaagaacaaaccaaaagaaaaataactgaggactaagaagacctaagatgtggcctcatctctgggtgagacaggctgtctcattcagctttgtccattatctttcttgccaggctcctgtccagtccctctcccttctctggtcagtgaggctccattgtatgggcagggactttaggacctcagtggagagttttgcagagcttcctgcaagaaatgttcctgtagttagccatgacctcctggcagcagttgtattcatcattaggcttcaactttcccatcccccttttgaggttccattgaatctgccagtcacagagcagcttccattgaatccagtagcctgtttctggttacattaggcattatctgtattgcattttttggctcacctcattaataagctagttctgtgcttattttctacagaatatataagctgacagagcccttaaaagcccctaacccaaggaattccctggcaagtgaaggatgctggagaatagaggttggggctaggttttaaaaagcttaaaatttagatgtgaagattttacttttatttccattaatagcatggtttatgtttacttcttctttgaagatgcgttgtgggaaccctggatggcagctgagtaatgaactctctgcctttttacactgtacagattggaactttgttttaaacgtttcactttgacgaacttaccatatgtagctctagctgttcttgagtggcctcagaggtccatgacatgtcatcatttcccactttcctgaggtgagcgtttgaaaagtatttgatgaggcagtggtggcatttctaaatttgaggattcttaagccatctctggggatttgttcacaaatgatatggtttttaatatattcccttcccacatactttatactcaagtccacagttggcctatcctgggttctgatcgtacagctattccctgacttgtctgtatgaccactgataagtctctttctcttagttcttgtatccataataacaatgatgctgactgcataatctcttaagactcttgtggttctgatattttaggactccgtatatgggatgcagatcagccttttctttgacattcttcgtgtacacagatcataatgtgttaaaacgtatttgtaccacggtgactacacacatattggcttattcatcacatgcttataaaacagatcccattgatgatcatgctactgttttttgagtatttttttggtgtcctatcctttttatgttttcttctgccttcatgttctggctgcaccttctgtcatcctgtggagaaggccaggcccagataccactgtgttccagcagtatcagaaaagcatacaacagagaaacacaaccagcttacttcaatttaaactgaccttcctgctagctacagattatcaactcctgcacaagcagcctgtagggctggaag

SEQ ID NO: 32994 - DNA, 1951 bp, Bovine  19866880953313
  misc_feature (1)..(1): n is a, c, g, or t
nacacggccgctgctcaaccccgacaagaccgggcatcgaacaggtgactggcctgagtctgacgttcttcggtatttgggatcagtcccagcctgaatccataaaaagagatctccatgctatttgctgcttcccccaaagtattgggtgccccatacacacacacacacacacacattacacccttcgctgtaactaccagggctcgtgtcttggctttgagtgagaatcacatcacctctggtggaaacctagggtaatctccctcagaagctgcaattggctgttggtgacatcatagggattgctggcatccaagaatgaaaactgatgcgtcctgccagaacaaaggttgggagggagaggagagctggccttgctgggtagaggaaggagtcacaagacgtgccacacccccttcctcagggccgcctggagctgtgggtggacatgtttcccatggacatgccgtcccccgggacacctctggacatctcccctcggaagcccaagaagtgagctgctcggggccagcgcccttccctcccggctccccaacgcatcctttctgtaggagcctccaggcccaggtcaccttagtcagtcccatgtggccttgttgggggaacagagcaccccacgaagagggctgtggggcctgccctgggggaggtccccttgctgaggcaaggggtcgcacccccactgtgtggccagcaagggccatgagttcacactgacaccctccccgaagcctctgtcctcacagacccactcctccacgggcacgcactctcaggcagcatcctccctgggttcccccacacacatccacaagacgcagaaccgctgagagctgctctgcccccctgataaaagtggttcccactcgaggctgtcattcagctctgccaagttttatttaaaactgatgagatgtgcaggggtgagtgcccagaatgggcgggagggtgggagagtaagcagaacgctggatcatgagccaagccatctgtctctgttagttgacactggccaggtcactttttcctccatggtcctcagttttcccatctgtaaagtggctggaccaagccactgccagcactggactcggtgcctgcaatcagggccccacatttccatttcacactggaccccaccaatcatatagcccattctgcctggtgggctttctcaggtggcacagtgataaagaatctgcctgccaacgcagaagatgtgggttcgatccctgcatcgggaagatcccctggagaaggaaatagctacccactccagtattcttgcctgggaaatcccatggacaggggagcctgatgggctacagtccagggtcagatacgactgagtgactgagtgatcccatggaggaggaaatggctacccactccagtattcttgcctgggaaatcccatggacaggggagcctgacaggctacagtccagggtcagatacgactgagtgactaacctttcactttctgtcttcacagcttcactagaacttgtccctcaaaggtcaccagtgaactcctaatcactaaatttgtttcctgcacagaaacctccactgactctttgttttccaccaagaccagatccctgaacccagggtcctcagcttacacaacatgccccgagcctgctcttctagcctaatttcctgtcacttctctcatagaccagacgctttcacattgatatatattatgtcaccccaccacatctgcacttacgctgtttcttcagcctgaaatacccctatgttttttctatctattgaaattttatgcacccttcaaaatttggcctacatgtccatcttactgccatgccagtcaaaattaacatctccttcctctgtgctcctgaggactttaaaggctggttctcatttttctacttcaatttatactcgttgtatt

SEQ ID NO: 32995 - DNA, 1791 bp, Bovine  19866880953568
  misc_feature (1)..(1): n is a, c, g, or t
ntaagaaataatttaaatgaaggttatctctcttgaagagatggggactgggaaagtggtcagaaggacatacaatgtgcttttaactttatatgaaaaataatgttcagttccatgttgctgaacgttgttctgtttttgccaaataaatcctctacctcaaagtactgtctgaattctttattaaaactctgcttccggcttttgttttggactctgttacttgtgtagccacctcctgctcagtgtcctctgaagcttctacttcttttccgctgttccctgacacctcggttgtcctcacgctttcccttgaagcctcaattgccttccctctgtcctcagaagttgtaatatccttcccatggtccttccagctctggttgctccatggccacagaaagctgccagcaccatgaatcatgccacttttcctgtacttcagttactgatgcagtagggatatcaaagcaaataccctgctttcctttgagaaagaccattcccttcactttggaatcaatatcctcacccagttgctctttaagttctttacaagcataactaatgtttggcagttccattaagcactgcaagatcatggtcacaaagcccacatctcagttaaggagcactggtctaccgatatagcactgaaatgtgggccaagactgctgccagggcttccatggctcccttctcctcagcttctcagctgactgcttgaagtgactaatcacggtgggaggaacagagtcaaagtcctataaccctaacacttctgtgaaattacactgattggattcctaaaagagattttagttagatttgaaagagaggtgggtggtatcaaggcatgaattggtgaaatggctctagttggatggtatgacatgtgcttatgtgtctggttctccttacagtggtgaaattccagcagagatctgtgtttccagtacagtttggtggcccaatgatcagacactggtggaattccaatcttactttccaaatttacacaaagaaaaccccacagaaaaaggtacttaagtaattatgacttttgccttaccactttagtcacaccagggatttggaccatacttaaaattatgttcatatcttaaactagaaatttttccaggctcaaacaacagtaatacttatgaattattgtctattataattttaaatttatgtttagtatttatcataaggtagatattatgctaaagactctgcatggatactatcaaatttaatcattaaaacaagtctgtgagttaggtacctgttatcttcaatttgggcttcccttgtggctcagctggtaaagaatccgcttgcaatgtgggagacctgggttcaatccctgggttgggaagatcccctggagaagggaaaggctacccactccagtattctggcctggagaattccatggactatatatatatagtccatggggtcgcaatgagtcagacacgactgagcgactttcatcatcatctttagtgatataacttaggtctaaggttgccctaatgataaagctaataaaagacaaagccaggactctatcccaagtctttatagatcctaagttcttaagctctttgctgtgttacctgctatggagagttgactatttggattgatacagaaaagcagccttaatttgaggctctactttcttttttcagacagaatatataaggtatccaacccatatccaaaataatatattgtgggtagcagttttatcagctaattgcagctttataaaatcca

SEQ ID NO: 32996 - DNA, 842 bp, Bovine  19866880955882
  misc_feature (1)..(1): n is a, c, g, or t
nctatcatttaatatctgagctaatctgaaataggaattacttcaggattatgactccaaaatatcattaacgctcagtattagctctgaaatatatctgatagtttttgaagtcttctacttttgaccaaagtaaaagaaatggggatctgacttctgagcagtggcttctggataactggtctaatattctgaggagtactgttgctgatggtctgtattcattagtgagaagagccatagaaacaagcattgagtaatttcgtttggagctctgctgcatggatttcccaggtggtccagtggttaagaatgcaggggacacaggttcaattcctggtctgggaagatcccacatgctgcggagcaactgagcccctgtgctacaactactgaagcccacacacctagagcccatgctctgccacaagagaagtcacgcaatgagaagcccgaaacagagacccagtgcagcccaaaatagattaataaaattttaactaaaaaaaaagaactctgatataagtcacagggtccaaatcaagaaggctttcggactttttaagacattcagaagaaaaccataattgatttttctgactgtagttgtgtgactatattgttattatgatgcagagacagtgtgatgtttctcagcgtggttgcttgattaaaatacctctgcaagtttgcacttcttcttcatcatcagtattttgaaatccagtattttttaatcctgtaaggaagctgtccatagacttatgcgaaagtctgtcaacttttggtacaagatgtctcatcattacaaaggaaagtgtgagtcaaatacgaaagcagta

SEQ ID NO: 32997 - DNA, 796 bp, Bovine  19866880962483
  misc_feature (1)..(1): n is a, c, g, or t
nccaggtaatactttgtttaagaaatgcttggctactaaaattaaaatagaaatctagcaaaaaaaaaaaaatcgaaagtaacaaatactgagcactcatgtgcaaattatagtgatgtataatacactccgtgctcttacaaagattatattcataatggaaaaatttttgtatgttaacggagctgattaggatggcttgcggaatggaatttcttcttgcttataaaatacttagttacttttataataaaggtaagaactggtagcaacagtgattttactttgagatctccaatttacccctttaaatgaactatcttaaattatagcccaaagtattcaacttgaaagtttctgtggagagccaatactcagcttgtcatcatccccaaagctaattcctgtagctgtcactgcaatttaaaatgtctatttccccctaaaaattacaagtaaaataccatacacctggaggtccaagtggaattgataccatttttccaggaaaagaaaatgtcctaataagcgtcctggcaaggatgccccaaaatgtctgtagaaagtggattcttggaacttacctggtggtgcagtggttaagatgccatgcttccaatgcagggggtgtgggttcgatctctggtcggggaactaaggcccaacatgccacatggtgcagccaaaaaataaaaacaaaaaagttaaagaaagaaagaaagtggatactcagtaaatacaagtgagaggattttttaaaaatattaccaacagtaccgaccccatatttagtcaa

SEQ ID NO: 32998 - DNA, 1082 bp, Bovine  19866881047074
  misc_feature (1)..(1): n is a, c, g, or t
ntctgtgaagtcataggcagttgatgtctttggatatcaaccaaagaacaggacgtccaggggccacaatctctctgttctttatccccctagtgtcttctgcagctgactccctgattacagaggcctggttaccatggtaagggtagcacagatgcaggagtccagcagttttaagtggcaaatgcaagagtgtgtctgtgtttggattttaagcctctgatacacagtggaatggcatgcgtttggatttggagtcagttggcctgattcagattctgccacttaacatgtggcctcagcacaaatcacagttctctgagcttgttttcttgctctgcacctcctcacagggctgtcagcaggacctgatgaagtcaggtgaggggatctctctctgtgaagtttcatacagtatgtttttattgttcaatcctagaaagcaagtataggactccaggaagggactgtgggacctaggaagtgctagcttattcccagttctttcatcttcagattagggttaagaccatcataaacatttctgaagacaagagataagttttgtggagaatataagaataatattatagggggaaaataatctttaagaagtagaggattgagttgacatcaggttagtgattttctactcagactggatataagatcagtcccagtacaaagcagtggaaggtttacagagggaagatttccctgccctccaccaagctcacaatcgatgccctgctctggagcctcacagcacactgatccaattctcttttcaatctgttgtttaagtccttccaccccattgtgctatgataccacaggtagtgtgcaagagtgccatacagtggttaccagcagggtctttgtagtcagcattggctcagctccagtcctggattggagttatgtgacctttcgtaaactactcagtctctctgagacttggcttccttatccctagactgtgaataacaacaatcctaattaaggatgatatatttgttgtgaggaataaggatttagtatgatgcctaacatacggtcattgctcaataagtgtcaactat

SEQ ID NO: 32999 - DNA, 1382 bp, Bovine  19866881051335
  misc_feature (1)..(1): n is a, c, g, or t
nttttaagcaaaatacagcccgtgttttttttaaagtggtgaatgaatttccttttaaattattgtgtcatggaaaacacacccatgaagcacctttacagaggttgtctagtccagtttcattgtgtagagacccaaagaagtggaaattatcaatggtggtggatagaacctgaatcagaacttgaatctgccacctagttcaatacagtttttataatggcttaatcgctaaatcgtgtctgactcttgtgacccccatggaccccatggaccccatgtgaccctgccagactcctttgtccatggaattctccaagcaagaatactagagtgggttgctatttccttctccattttttttttaataatactagtctatattacactttttgttaacctttttctaatactttacataatttggcatttgatcaatgaagaatacttatcaccttgttaattttggaaaatattagtggttattacttgaatttatttgtgtagtgtttcaaaccttgatgatctaaataatttgatattcacagcaaccctgtatggtaggcaggttaggtgtagttatccccacttttactactaaagaaacttagtttcagacaggggaagatgacctgctcaaggacatatggcttttaagtggcaaacttggaactaaacctaacgatatctgatctttactctagctttcttatcactgtactagactctgtaactggagtgtttaatagatgttagtgacatcataaaccaagtttcaaggacctcattaaaaacattttattggtttttgtaaaagctgaagtaggctataatattctgcagaataaattgccatggaatttttttttaaagagctgaatttgctacttaacagttgctttggtttccttggcaacaacattctccctctgtccaagacatttagtatgtagaaataagggtttggagatatatatacacatatatatatgtaatatatatgtatgtatgtatgtgtatgtatatgtggtgtgtatatatatacacaaacacacatacacacatttatttgttgcttttgtatatttccaaatttcttacatttgctctttagtttctacaattttatttttaaatttatttttatttatttcaaagaaatacatgcttatgtttttttaaaaaatagtaaaaagagattgtaatggaaagcagtgttcctacttacctcttctcatcctcagtttgctccttagaacccatttttgacttgttagttactgtcatgaccataaaagctagtaccactattccttgatttattttacatattatcggtcagatgcatgctgtgaaaaatgagagcgcactcaccctgttct

SEQ ID NO: 33000 - DNA, 831 bp, Bovine  19866881187284
  misc_feature (1)..(1): n is a, c, g, or t
natgaaatggaataattaacacctccccagtaatttctgtctgcaccaccgtgaggagaatcagatactgcttcgccttgaagcaaaaaaaggagaggtgagatgtgaaaaattccaagtaaaacgatcatgacatagcatctggcagagattggaaaggcatgaacactgccgaaaggatcgtcagggatgaacgtcaagagaagaaaacgaggttttccaacgggccacagcctaacccaaggggcaaaaatcgccactgccgccgccactccctcactcaccaaccactccatcctcaagtcccctccaattcagatatatatcctccaaaaccccggccaattccccacccaggtgaaaacaatccaataatttcctaggaccccccccccccctacttcccaccttcggtaagacccgcacttctcgcggctaaacctctggggaaaacaacgcccagatcccaccctcatagcgctaggctgaagagggccggtcacccaccgtggggcttcccgggtgggcctcacagagcagaccaactgggataagagcaaggaacaagggtggggctcaagggagggagctggggtaggcgagacgacggagaacggaggaagaaagggatggacaggaggctggggctgggcggggtgaggagtggggagggcagatcgacccgagagggccgggctgcggggaacggagccggtggagtcggggactgaagggtcaaaatccgagcgacggatcatgggaagaggaacgggtggcgaagaggggtcggcgaaccgaatacgagcaggggctgcggggggtagaaccgag

SEQ ID NO: 33001 - DNA, 780 bp, Bovine  19866881320477
  misc_feature (1)..(1): n is a, c, g, or t
ncagcattactccacctgatgctggagacagatctaagaatccatcagcatgagactgataaacagcttgtggtgtattcaaacaacagaatactattcagcaacagaaaggaatgaactactgataaatgctgcagtccatggcgtcgcaaagagttggacatgactgagcgactgaactgaactgataaatgcagcaacatggataaaatgtcacagatacaaggtgctaagtgactcaagagcacttactatttggttcaggacagtggtcgcttggtacctgggcaaggggagaatagaaagggttggggtggtgagaaggaaaaggagtgggtgtttggctatctttacattcttttttaaaaatctggaaaaaaaatctgaaacaaatacagcaaaatttgaacatatatttcatctcaattatagataaaattgcttatattatgtgtacttttcttatatttgaaatgttttatttttcaaaataagtaaatacagaaatgatgattgtcagtgagactttcaggaaatgacttaactgaattttcaacatatggttttagtctcagaaaagcctcactaaggaagcatatattggtaccatacatggaactgttttaactgacttcattttaaattagccatgaacatgatgattgagcttgattctattaggatctcagaagaggaaaagttatatatggagaggcttagggcaacccactctgtgttaatttgggaggatgtagtctcaaaacttggatttagacacaa

SEQ ID NO: 33002 - DNA, 2582 bp, Bovine  19866881353570
  misc_feature (1)..(1): n is a, c, g, or t
ntgctgtgtttggggtaaatgcagtaacgtttagtacttctactttgtcttacgctgaggtggaaaccaagtgtactgttactaaatgtttgtctactaaaaggaaaaatactaatattaaaataatttcttataactgtgaatcactcatttatttttccaataattgatattgtacattcctagtgctattaggtatgtatgtaacttttgtagtttttcacctgattgttgtaagtatttcatttgatcagggctctttaatctcatttgctttgttcagattaactgtagttatttatttctgtattaacaagctaagcctatggtgatgacatgtacactaataaagcattgaatgtttgtagttggtagtgaaccttgttgttggtgaatttaaaacttaaaatatgggagtgatttgctgctatatttcctttgagggataatagaggaagaaatggaccctagtaatgatcatgaattttagggaaagtacaaaaaaaagcatgtggtcacctctggtttctcatgtgaatgaggaaagagtctacttccagctgaagacctcttatacttttaaagatggggaatctgcatttttagagctgttagcaaagtgtgaaagccactttatgctttactttgtggatttgggttttgttttattcatacattagctcatatcgagatgcattgcttaaatcttatgtgttgatcctattcaacaaaaaatgtaaaatatagaatttattatttgccaaagaaaatttatgaaagaatttttatccagtttttctgcagacatttaaatttcatttggctttgtgctccctcccctcttttttgtccttaatgtagcttaaaccattggcaaacttcagaaaccaagagaaaaaaagaaacataaaaaaaagacacagaatttagtatggtacaatttcacctttcacataggtctgaagaaatgtaactttatgttgttaagatcatcttacttccttgactcctttttttcttttaaaattgtaatcagatgcttctgggtttttttttttttttttccaggaatagtgctttcttttacttgtttccacttttctctgccatttgtgattctcttttatgttcagtgtttcaaatacagtttgtatttaaagattttaaaataccaaaactgtaactgagtacaggggatttttttctggtatgatgttaatattatacaatgaaatgtataaagtgttgtcaatttgattattgacactataatatgtttacaaataaactgtggtgttgatcaagttgctgtgaaaatgtgtataatcttctgttaagtccctttcataatttaaaatacaggcatgctttcagtgctgagacttctatacttgaaaagaaaaaaacaaaagcaacaacaacaaactaattttacaataatttcaaattagcagaaaaattgcaaggtcatctggagatattccctgtacccttccacaggcttcccctaatgttaacaccttatataaactatgacgcatttgtcaaaactcagaaattaacattggtaccgtactatttactaaaatacagattatgtttgattttcaccgattttccctctgatgttctcttctgttccaggaccgtgtccaaggtaccatggtgcatttctttagtcgtcactgcctccgtctcctccagtctgttgacagtttctcagtctttcctgaccttgaggctgtgaagagcactagtttgttctttggtgggctggccctcacagtgggctcatcttggtgttttatcagattggaggcttgtagttcactggggagggtgggcgcagatgccatggcccttccacagtgcctcagattgggggtcgcatagtcaacagacgttaccagtgccatctcttcgctggttacagtgatgctgtctgccggttttttcactttccatactctttttttttttttttttttggaagtgagttattcaacctaggccacactcaaagggaaggagcagtttacaaattttcttttaaagacttgttccatatacacacaatggagtattactcagccattaaaaagaaaacatttgaatcagttctaatgaggtggatgaaactggagccaattatacagagtgaagtaagccagaaagaaaaacaccaatacagtatactaatgcatatatatgaaatttagaaagatggtaatgataaccctatatgcgagacagcaaaagagacacagatgtatagaacaggcttttggactctgtgggagagggcgagggtgggatgatttgggagaatggcattgaaacatgtataatatcatatgtgaaacaaatcgccagtccaggttcaatgcagggtacaggatgctcgcggttggtgcactgggatgacccagaaggatgatatggggagggaggtgggaggggttcaggatggggaacatgtgtacccctgtggcggattcatgttgatgtatggcaaaaccaatacaatattgtaaaataattagcctccaatttaaatttatactaaaaaaaaagatttgttc

SEQ ID NO: 33003 - DNA, 1444 bp, Bovine  19866881442980
  misc_feature (1)..(1): n is a, c, g, or t
ntattcttgtaaaaatgtaatttaaatgtcagacttttaaattaaaaattcacagctccgttcttagttccagtatttttctttacttagaggctgtgctgacacaattctaacactgaagatccttagctagttactactgagcctgtttttatcaagatttttacttacattcataagatttttaaatcaacaatctattttaaatagaggagaagtacctatatagtttggaagactttaactgtctgcaaattaactgattaaattatactccatggaagaacactatttcaattcaaaccatgccttgagaaggcactgagaaagaaccacgccactgggagtgttgccaccaattgttttatgttcgataaatgttagacttttaaataaatacaataaatttacactgcaccaagaacacctgaaacagaggtgctgaaaccacaaattgtaacacctgttctaacctagaaatgctaaatatcctatttcaaatactctaatttgtaagttaatatctgcaatgcaacaatgacacttttccacagtattctgggagcagcgccactctcttgccaatcttatggattcatttccttaactaactctacaattatacaacacttatcttcctttaagaaaaactgtgctatacacaatcacaagaatatataactaagcttaatcacactttaataagaaaactcacatttgtagtttgtttctgttgaaggaagaatgacgtgttaccataatacttctaatgtaatgacttctgttcaggattatgaaaaaatttgaatcatttcttcccagccatttcatttcaatatttatagtttgtttagctagccaaccaaaaagaaagaaaataaaggaaaaagatacttggccagatgacacacagagagaatgctaacatgagttcaatgcatggagttcttggttgctctgttccatggaccggggcaaagcaacgatgttctggtgaaggctaaacagaacgccagggtcagtccatttttactgggctcaagaaaattctcaatcaaagcatcaatcagtttcttcaattcctcttctagtaaggcagtgtcactgaggaaaaaggttaacagttttgaaattctgtatttccatagccttaaaatgtgcttaaattgttgtaactttaagagtgcatatactttatgggatgattaaataactggtaaacaagacagaaattcactcgtgtaaaacaaaacaaggccacaagtgggaagaggggaatcacactcacagaaaacaccattctcacaaactgaaattgaactgcattaaaaggaggttaatatctgcggtgtaacaatgacacatgaaacatggatgagttagagtaaatctaaagactgctcctaaagcaggcaatttaaaggctcagaacaccaataccagg

SEQ ID NO: 33004 - DNA, 883 bp, Bovine  19866881458848
  misc_feature (1)..(1): n is a, c, g, or t
nccaatgtcagagccattaggaagagttaggatttaaatgttgcccttatcccataccacatgttcttaattactattctgtactgcctttcacacatgcagcttccgcaaaaggtgaacatacagagaaattagaaatgttttcaaaacagctttccaagaatcagtgtgacccagggttgccccagtgttcaaaggtcttaaaggaaccacttgccggctgcctgctctgcagtcccaagcactgaagtttcttatcttctcgggccaacagcagcattttcgactctgttccaacctctcgttcacctgcatgacagatgagctatgtcaataatgggctaggatgatcagctggcagtactcagaaagcatagctattgacagctctttactgaattactccgctagtcactcacttaatagtttcaaaaaacatttattatgttctatatcttgacatggtattgtttatatgactgtacatatttgtcaaaactcacagaactgtgtgattaaaaaaaaggacttttactatatgtaaaatatacctcaataaacccaattttaaaatattatgattatcaagtcctttgtaatatggaaagataccatacttggaacaatgtacagagtacaatgctaaacaaagtagggccaaacatatgtaacaatataaaaggaggctgctggaggagaggagggacacagaagagtgatatagctcaatttacatttttaagtaatttcacttatttttggctgtgctgcgtctttgttgctgcatgggctttttctctagttttggcaagcagggccatcatctagttggtggtatgcgggcttctcacggtggtggctttgtcttgctgtggagcacagg

SEQ ID NO: 33005 - DNA, 1413 bp, Bovine  19866881710430
  misc_feature (1)..(1): n is a, c, g, or t
nttactttacaacctttggaatataagcccatttttaaattggagaatacactgacatttttttccactgaatattgggaaattactttttaattgacaattagaaggtttgtacttttgcctattccctatccaagtcattgtttaataaaaatagtacttccaatttttatagcatttgatttaacaaaattttctcaccagatataatctttgtgaatccttctctcacctggttccatccccataagtgtcctgaacaagcttgaatgttccatctgtgagctctcatgggtaccctaggcttatttctgtcatagctgtagtatacagtgactgtttccttgcctatctccctccaaacattaggtctttgaggtcaagaaccaagttttcattgatgaaaatttcaggcctgctggtttccctcatgcccagaaagtgtatcagggcctgccatacaaggcatacccaaaggtctctttaattgaaattaagttagctgcttaaataagcaagttgtgactggaaaaaaaatcccttaaataattgccctaaagatatttgctgtttgtcctttatcctggatcgtcatggcatttagatgtgtctggggaaggggttatagaaccattggttctgaaatattagggttttctgtaaggattttattggcctttaagctctgacctcaaaactctttcttcctattgtgatatgcctaagcagaatggtagcttacttgtattttgatgactaagaatggccatgcatcagtgatgagagtgaacaactccagttgatttgtagaatctcataaagtgttctattgtctgcttttttggtttcattactgatgtctcagtgattgcgtttttgtttgaggccagatcactttatatccttttttctatttacttttagtgctttcgaaaatgttactacttatgctgttcttatattgggtgagtggtagaaataaaatttagaaaaatttctaacttgggtaaagcacagttctttattatcagaagtataagattagagttgttcttgtgctgcagcagttgtctttatccatccatttaaaacaaagcaggtttttgtgtgatctgactcagcaggttggaagttaccatagactaagtatcttatctgaaagtggttttaagtaaggtaaggtttcattcatacaaccatgtcgtatattgggccataaatatcctttcttgtctaatacaggacgttgtgtaaaatcctcctatttccatttttggattctgtgatgcccagttaataaggaacattttcatcactggccaacgcagagaagtattaggagtaggatgtagaattttcaagcacctggtaaatcagtgttttgtaagttggaactcttttaaaaggtttccc

SEQ ID NO: 33006 - DNA, 749 bp, Bovine  19866881810032
  misc_feature (1)..(1): n is a, c, g, or t
ncgttttacagcaatcaccagcatacagcctacaaagcattttcataagcatcatctgtcatgatcatgtctctgtaatagatattatcacctctgtttgatagattaaggcatttcctgtcctccctgcctgccttccttctggcagatgacatcatttgatcattcacagttagtcatttctggcatcagatcactaatgcttcaacttgtggtgtgttttagtgcctggctgaaggacactgttgacccagtgctggtgacccttgaccatcgcattgctgccctcacgggccttgatgtccagcctccctacgcagagtatctccaggtggtgaactatggaattggagggcactatgagcctcactttgaccatgctacggtaactatggggtcagtgaccatctcctgggggtagggaaagggggtattatttatttctctgaggcagagctctaatagggccctcaggggacactgaaatcttggaacaaaggttcatgttctaggtagatctgaaagtcttagtttcaagctgatagctgctgactcatctttttactaaaactcattgaaaaacactcttacaatgactggattttatgacatgtaaattatatcagttaaactcttctgtaacaaaagaatatgtctctttggcaaataattaggaattccagtcttaggacttggcatgtttacagaataattatctgtaacattttatatatatttctctaacaacc

SEQ ID NO: 33007 - DNA, 798 bp, Bovine  19866882025530
  misc_feature (1)..(1): n is a, c, g, or t
ncccatagtaagtacttaataatatttatggaaagaagagaaggatagaataaggaaacgtgtagtattgacatatctgtaatgaggagcatacaagttttggtagctgtgcaaataaaatgtgcatatctaactgtactgaacatgccttctccctctttttaggttcagaacttcaggagagaatcctgtctattctgcaggtaagcagttatttcctgatgtggtctagttgatttaagtgaccctctagcactagtataattttgtctgaaaagttgccaaatatatctttgggaagattggctgagaccaagtcctacccctcacatggaattggacaatgggcaagaacataaattgtgggttaagagcaagagttctgtagtaggtttagattccagctctaacacatactgttctgtgacctttaactacttttctatgacttggttttctcactttaaaaaatgaggggaatttatagtacaaactacagtgaattatttgaagattcagtgaggtaaaacatataaagtgctcaaaaatgttcactattgttattattatttttgctactattccagacctgtctttcatgtccattatctaccaggctaaggctttttctacaggattttatccaaaataaatccatttaatctggttaactcagtgaatttcaatgtttcaatcctattgcttgccatttttactttattatgtgacagatttcaaagcagccattagataatgacatctgttatagactaaagagtatcagaaacagggaattcc

SEQ ID NO: 33008 - DNA, 1952 bp, Bovine  19866880442717
  misc_feature (1)..(1): n is a, c, g, or t
naaataataaaattcacttgaaagcatgttttccaataagacaataagaattccaaaaaaatttgagtttcaattactcattaattcacaagaccagtaatttttcctatatattaactattgtttcgataacactgcattttgaaaaacattatatacagagaaagcaatggcacccactctagtactcttgcctggaaaatcccatggacggaggagtctggtaggctgcagtccatggggtttctgggagtcggacaccactgagcgactccactttcactttatactttcatccattgaagaaggaaatggcaacccactccagtgttcttgcctggagaatcccagggatgggggagcttggtgggctaccatttatcggtcgcataggtcggacaggactgaagtgacttagcagcagcaggagtatactatcttactttctttagcaattctaagcagtacactgaaacttaaatatttttttcagaaaaaatcaaagtcagtttccaacagagaaaatagtagatttgggttaaggaagcaaatggacatttttgatctttaaatttttccctgcaggtaattacagttcaaaccatggtctaagcctctggaaactatattaaagtgaggattctcatttcagctgctaaagtgaatattttgcataacatacattgccccaggtatcaatactatttttgtgaaaagaaagtgttgatacttttgctgtctgaaccaagttctctccaaacaggaattttcaaatgaacaaaaaagtttactttgatataaggaaagtttcttaaatgtacaaataaatgaagaacgctttctatgaaggttcatgtaaaaaacttcatcaaattattgggccacaactcccaaagaggatgacttgtcacagaatcttgcccaatgttaaatcatgttggctagtgacagaatgaaacgaattggaaactgcttccctggcattcctagcctagtttcattttaattatagacttttaaacatttgtgttgtgtttgataatgttctttgtgctttcacagacctcatctcctttgattctctcatttgatctgtttcattccaggcatttcaaaactagttctgaatcaaagccatgatcatttattttgctgcattgatttatcctgatgaagggtcaagtcagtgtccaggcagatcaaagtctcttcattgctgtgctttgttgagtatatttgcttcctaaaatctcccttattagcctatttaattctttgaaaattcctcactaaaagaaaaaaaaaaaaacaaacaacaaaaaaagtcacacatgcactcaatctccaaatatttactcaagtctagtttgacacaattcactccatttctggtcatggactagctaaggtattcagtccaactcttagtacttgtcactatagaacatgttgtgggttccctttttctctgcaagcaaaagtaacaaacccaaacccatctttttcttaaacaagaaaatacattactcaagcaaaaagagatttattataccagaaatactgtacccctcagcaaaaattaattccgatttttgcagattatcaatgttgcaactaaactcccatttttctgtttgctgcataattatcaagaatgtagcatccaatagccaaaaaggcaagaaatgggatagtaagcctgaagtatctttgacttgtaatttctatgataactatttctttgattaggggaaactttcacacagagttgaaaagctgttattcaagtaattcaaactattaattaggtgttcatacagatgctacaatggctcttccagttgctattaaacatagaaggaaggacaaagttatttattgctaggacttcatcctggaggaaaagacttgagttacctggggccatgtggagcactgttaggcaaaacaag

SEQ ID NO: 33009 - DNA, 3971 bp, Bovine  19866880449055
  misc_feature (1)..(1): n is a, c, g, or t
ncacctttacctgcatattgtccactatctcagtcagtgacagatggaaagggtttgagccctaatttcatctttaagcttaagaaagcccctgatcttcacctccaacctcaactctgatttaaagccagaagtcaaaaaaaaaggaaagaaaacactgctgctgctgctgctgctgctgctaagtcgcttcagtcgtgtccgactctgtgcgaccccagagacggcagcccaccaggcttccccgtccctgggattctccaggcaagaacactggagtgggttgccatttccttctccaagaaaacactaacctcagctaaaaaccacttaacagtccagtccattcaggatattccatgacttcatgtccctattaaacttctctcaggtaatatgatgtaataagagatgtagccttgactctacaatttaatgcaaaaatgtaagggccctattcattggtcagattaagttagaggaagcggcaggaaatgcaataatcatatccaaatttggaagtactgatagttcagttatccaacctagaccacaaagttaaacagccaaatggaaactggcctatgtaggactttgaactgggccttaaggagaatacatcaacaagctgtgcagagaaaatctcagtttcttcaagttttataatttaagatactataaaactttatatttgaaaataaagatgtgtgcttcactttttaaatcttgtaattcataattaattactaacaatcaaggaaaacacagcctgtaatgtttaaatttcatgcctataaattttattccctgaatttagtaaacagaaagacattctaaaactattaaatattgcttattggttaccctccccatcactccccatgaatcaatgactattaagaaagtaggttaggctaggagcaatgctgaacataatggatactggaaataataatgttaagaagcaagatgtggagcaaatcaataaatcaggaagggaatcacctacccttaactgataacaaagacaaggtcaataataacatctcacctctaataagttttaggcattgtgataaattctttatatatattagctcatataattttcacaacaaacctacaaggtagaaattattattacacccaatttgtaactgaaaaaaaaaaaaaagaggtttaaagagcttatgccacttttccagaattattcagaaagtgacagtttgaattcagttattcaggtctctatgctccctagcctgtgaacacaggcaagatgctacccagccttccatcgaacctcgcaaaattgctattatccttagatactgtgacaggcctgtttttaggagccagcaaatcctataatattatatttataaacagtagcaatgctttaccttcccaggagccatttcctcacaacagcaattacagtttgggtattcatcaggtagaattagatttgtcttcagagaacagaataccttgtccccaaataatagtagtttaagtaatgctgctgctgctaagttgcttccgtcgtgtccgactctgggcagccccatagatggcagcccaccaggctcccccatccctgggattccccaggcaagaacactggagtgggttgccatttccttctccaatgcatgaaagtgaaaagtgaaagggaagtcactcagtcatgtccgactctagcgactccatgaactgcagcctaccaggctcctccatccacgggattttccaggcaaaagtactggagtgggttgccattgccttctccgagtttaagtaatagaagatgtttatttttctttatattagggaaagttcagatgtacagagtccagagcttatatgacaattacacaggcacttgggatccaagcttagcctgtcttttatacacattaatctttagagctgacttccattgacaacattgcctcatggtccaagataaccgcttaagtgttagccatctagtttgagacaggaagaaggaagaggagaaaaatgaaaaggggtataccctcccaaatgagtccacatgttattagaagaaaaaaaaaattagaaacaccagcactacatcttgcactcacatcttactggctactcataattctaagaatgtatgagaaatgtagtccaactgggcaggcttctgttagtaaagtggatggggtaatagatactatatcaacatctagtagtttctaccactgacagtgagaaataatcatcatttaggctttttactatcatcttaagaaactgtttccaagtcaaagctactaaataaaagttggcatctggtagcaggaatgtttattgactccctcagaaacacataaaaggatgcaaatctcatcatcagaattctattgcttatttaataaacaaacattcttctaatcatttatagtaatttcaagtttgctaattcaatatgaaatacaaatgtgacacaagtaataaaggactaataacaaaaatcctaagctactaggtaatacacatctgtctaatttactctacttcatttggctctattccctggaaggatttcatgaacttatgacaaactctggtccaatgatcatgcccataattaagattcccaatctcatgctctgtgttttctttattaacttacgttatcttagatgtagcatcctctgctccacttctattaacctaaacagatcaaactataacctcaaagtatatttaatctaatttttaatcaaatacccttttttctctgctacttcactgagagaaaatcacacagtccctacctctgcttcctcttctaaaatcttactatgtcttcttcactttaagtaactatacatgtatttttcttccttcaaatatacttataaataattatgatctgtaataaaatgtgctaaagtaaacaatgtggcttcatagtagagaaggagagcttactgatagaaatgataagagacaagtttaggtaatgattcctaacctttatggatgccccataggggataagaccatctcaagggagagaccataagcaccataaatggtcaagcaaaggctagatgctaactagcaagaaatccaaaaatgaattgttatattgagtagaagtcaactgatttcttaacatcctttcccactaaacaatttggtaaaaatttttaaaataaattgagttgcaatacaaccctccaaatgatcactaatgaaatgtcatagtttcttggatattagcctagttcatgaaattacactgaaccctctttgggagtccctgtgtaaaatatttaatgctaattagacagtaaatttcagatctagcattgacataggaaggagaagcaaagaggattattaaatagaggtgataattacactgatttttattgcttttaggagaacttaaaaacttaatcagttcttcaagtgtttcattatttacattgatgacaaaggactaaatattgagagaaaattcaaagagttctaaagaaagctaagtgaaaatctattatcaccattaactattaataatagttaagtaatgttagaagacaaggtaaaggtctataaaaatatgctaaataacttaatggttcagtattattgagcaagttaatataatgctattgtaaactatgccaaggtaaaacttttgtattttaaacaaaaatgataatttttgtttcttaatttaatgatttttttcaattttagtaatgtcattaaatagatacggttttcctgagactgggctgttgaatttcaataacttcacttctataaaaccattcatacaaagaaataatgttaaaaagccattttgagttagtattccacagagttgttgctttagtcgctaagtcaggtctgagtcttttgcaccccagtggactgtagcccatcaggctcctctgtccatgggattttccaggcaagaa

SEQ ID NO: 33010 - DNA, 3626 bp, Bovine  19866880523384
  misc_feature (1)..(1): n is a, c, g, or t
naaaacacattacccacactatcaaagataccatgactgagctgctgacaagcatatacttaattgcaggatttaaaatgatgtgtctgcttttgattttcatggtgacaactctttactaaaataataaaagcagtactacctaaaattagcagatacaatatcctattacttcatagaggtatccatagaaaaaataagtagaaaccctaaagatgctcagtctaaagtatgaatcactgtatgctgtcatttttgtaagtttaccttactctgaaacattcaacttgacataaatatcttaaacctgtttacacaaggataaaactctcattttttcctagaaagataaaatataatctaaatcattacagactgaatgtataagatattttaatagatgttatatttttccaatccagttcaactgggatattccaaattaaaaggtattctgtaaaaattatgtatgtcaaacatggagagagagggagaaacgatatatcatggtgtgaaagcaagagtaacccatcttgaaagatctttgtgagaattaagaattgtttgcaataattaagaattattttcaaattactttgcaaataacacattgcaaagtacctacttccaaaaagcattgtattatttatcagcttcataggtaagaacaaaatataaaaagtaaagatcctgaggtttataatattttatggaaacaggttagggtgggagaaataaagaaggatagagtaagacagagagaatgagggagagatgaagagctgtgtggtgcagaggataagaaggctggattgaggcagtgggaacctgcctcagtggaagctgtttgagctcctctgaatgttttcatcccagggatgtcttagtgtttgcgacaatgatgcctatcagacctttcagacagtgatcagaatagaactctttgtcaaagaaattgaataagccgttacaggatctcaggtggactgatatattcagtgtgccatacatattagaattctgggcatcctaaatgaattctgactatggaagcccacattgcatgaattctgattaggtggtgggcaggaacagagaacgttcatcaactcctgtacttacattgtacattggaccctcagaagatggagatattggtctgattctggagtttgagtggtcctgctgagaacacagcagataagcatagccaaaatttccagactgcccttttcttgtacagacataaacctctcaggatcatttaaattccatgaggctcatcacaataaagccaatccattcagtgcagtagctattatccagctggacatgccagttacaccatggcccaaatccatttctattagtacttaataaggtattaaataaggagatcaaaccagtcaatcctaaaggaaatcaatcctgaatattctttggaaggaccgatgctgaagctgaagttgcaatacttcagccatctgatgtgaagagctgactcattggaaaagaccctgatgctgggaaagattgagggcaggaggagaagggggagccacagaataacatggttggatggcatcactggctcaattcacatgagtctgaccaaactcagggagatagtgaaggacagggaagcctgacatgctgcagttcatggggtcacagagagtcagacacgacttgatgactgaacaacaaaacaagatagtgaatatgttgtttatatatatggttgtaagaacaaagttctggtatgcaccagacaggtatcctttaagcaacatacagaattaaatgacccatcatcttccacactgatatcatcctagacccctaaagaaaccaatagttcacattggctagccctatggatttactggaaatgtccattctttctttatggatatcagtgatggctaggtaactggcaattttttcccaagtaataaacattaagcaaagagtctaaaaatatgacctaatggatatttggacttctgtcagaggagttggagaattttaccatgtgtttttttcatcatctagtctactttcagagtcaactgtgtactcacacaatttgtccccaaaatcagggtgttactcttatgcttcaaacacatactagtcaagttttcctccattatcttctcttatttctagtgaaaaaaaaaaaaaaatccttgttcatgaggttgacactgtataacatgtcatttcatcagatccaaatgcaagaagtacaaaagactccaagtgagaaacctcaaaataagagaaaattgagagactcctttatgagtaaaaggagtatatactccctttcagtatactgagagaagatttatacatatggagaagaatttacagttaaattagtgataagtacagaagcaaagataatgcttaaaatccttaaagctaagcttccacagtatgtgaacaaagaacttctagatgtacaagctgaatttagaaaaggcagaggaaccagagatcaaactgcccaacatccattggatcatagaaaatgcaagagaattccagaaaaacatctacttttgcttcattgattatgctaaagccttcaactgtgtgatcacaacaaactatggaaaattcttaaagagtcttaaagagatcagaataccagaccagcttacctgcctcctgagaaatctgcattcaggtcaagaagcaacagttaggtccttccaggcggacttcacaggactgtggacgacagaagggaagcacacagggactgtcccctctgcttcgatgccctcccgttctccttagggatcagggacctcccgagcattgcctggggtcatactgtgaactgtggctttggacgcatgtttgcctacaccaaccagtataagaccgtcttggatttcacaaggatcagacttgtgcagagaagagtccatcgtggaagctttaattgatgggatctggctggctgccagagaacaagagaagcatgggaggtattaccactgaaagacttagcagagatcaagccctgagcctttgcagtgggagcactgactccaagaccctagactatcagagaactaaccccagggagtatcaaatagtgagaactcgcacaaaggaaaccactgtaataaaaggcccagcatcccccaaccaccaatagcaccctgtgcaggacacctcatctaaacaacaaacaaaacaaaaatacaaacccagtcatcagcagacaggagtaccacttcactcagccttgcccatcagagcaaaaacaaacaaacaaacaaacaaaaacttagcacaaatctcaccctatatgaagcttacacaaaccactggaccaaatttagagggaagaaaccaaaaggaagaaagaattcaagcttgaagcttgggacaggagacctcaaacacaataagtttaaaaaataataataatgaaaaggcagagaaatattacacaaatgaaggaacaaactagaaacacagaagtccaaataaatgaaaaggaaatgagcaaactacctgaaaaagaattcagaataatgattgtaaagatgatcaaaaacctggaaagcaaaatggagaaaatgcaagaatcaactaacaaa

SEQ ID NO: 33011 - DNA, 1280 bp, Bovine  19866880558220
  misc_feature (1)..(1): n is a, c, g, or t
naccttgtggggggtggtccctgaggcagcaacaagcaaccccagaatctttcttttttttttttttccccagaatctttcttattgtgatgcagtaacaaacaaattgaacacactgggctgagtttatttagaaggtccctgtctataagtttggagttttcagaagacgtatttatgttgctgctaagctgttaagtcgcttcagtcgtgtccgactctgtgcgaccccatagagggcagcccaccaggctgccccccatcttgggattctccaggcaagaacaccggagtgggttgcaatttccttctccagtgcatgaaagtgaaaagtgaaagtgaagtctctcagtcgtgtccgaccctcagcgaccccatggtactgcagcctaccaggctcctccgtccatgggattttccaggcaagagtactggagtggggtgccattgcctgcactacaatcagagcatgtaatctatatgacaccaagtctttaaaacatgctgaaacttattttatggcctactatgtgatcagttttttaaaatgtttcttgaatttgaacataatattctctaattattggatagatggatagatagatatagaaagaaacttatatatagatctatagatatagatcagagaaggcaatggcaccccactccggtactcttgcctggcaaatcccatggatggaggagcctggaaggctgcagtccatggggtccctgagagccagacacgactgagcgacttcactttcactttttactttcctgcattggagaaggaaatggcaacccattccagtgttcttgcctggagaatcccagggatgggggagcctggtgggctcccgtctatgggctcgcacagagtctgacacaactgaagtgacttatcagcagcagcagcagtagcagtagtcccctacatgcttaactcatgtgctgaggtaaaggtcaggaagatcagccttcacagagataagataaatattgctattcaaatcacagctgtgtacatgatttcagtaaaacatgcttacttctgctaaaaaatatgataaggaaagattgttatgctgttaccataattatttcaccaggaattgataacctaaaagagtctatttataactgtgctgaggaattctgtgtatcaaattaagtcatttttcaatgagatcattactagaggcaaatatatgactttcagaatgttatttttagaaatttaaagtcctttgaaatgtcaacttaaaaaaaatactgga

SEQ ID NO: 33012 - DNA, 614 bp, Bovine  19866880601351
  misc_feature (1)..(1): n is a, c, g, or t
nttagagtgagaaccctgaaggctttaagataacacacacacacacacacacgcactaaaccatagtttgggctaaatggattagggccaggtttcaaagaagcagtatttgtaatgattaaaaggtgaaggctgccaccttgattctcggcatttttcatctttgtgcaataaaaatattgttggcaaaggacttctatgtgtctaacctcattaaaatctttcagaaacattaggaggaattactcttaaagcaaagggtgtgttttggttgacttgagcagagtttaaagaatttactgtcagggcttaatctctgcacagtgacttcaatttctctgtagtcaaccatctgaaaggcgtcatttcacaatatatgaaccaaatgaatggttaaatatgtcctatttggtttttctcccccagttggccttgatgactctaggaataaatgctatgattcctcaggctttcagaaggaaagcagatttttaagcactttgcatcacagaagaaatttacatgactattgaagaaaattaatcagagaagactgccacccaccacctatcaggaattaagagacttagatatgcaagagcaagcaggggaca

SEQ ID NO: 33013 - DNA, 1563 bp, Bovine  19866880617836
  misc_feature (1)..(1): n is a, c, g, or t
nttcccaagagtcaaaaacaatttaaagacctaattgacaaatgacaacatccatgggtgaaaaataaagtagctaggctacaagggtaaaagatcatttcttttgaaagtctacagcctgcacacacagataaatgattagtcttccttgatttgtatgcagctggtagcttgtctgaacccttcaggttatgaccatgacactgggatacttttgattttcttcttaattgaaaatcacatggtaacgatggccaagttctgtgtaacacaatctcatcatctctcaggggcaatcaatgacttcaaagctgtctggcactaatagaagtgcactcaaacagctttaagaacacaatcactgtcttttcttttctaatttttcagcacaatttagagcaatcgaggaaaaaagtatttgactagaagagaagatgtgtttttatcttggttttatttctttactagtttaccttgggtaagtcacttaacctctctgagcctcaattatcttacatgtaaaatttggagataatcacacttgatctgccaatatcacagggtagttatgggagaatcatttggcataaggtggatatcaaatgttatgtaaatataaagggcaggcaagtaaatctggagattttcaatcaagtgccttatttttacttttctattcaaattttttaaatttaacattctataatgtaggagaatgaaaaattttgcaagcttttccacaaggtttttatttttctcaaagggttataagtttttggtctatttttatctaagacggttttttcattttatgttatacatgctcttgaataaattttttggaataatatataacatagtgggggaaattacccatgacaaatttcacagacattttaatttattcatttctatgccatttctttgcacacatttataaataaatgcatactgttaatataaaattaggatcattgtttagagatttattttttcacttatcaagagcttcatgcagattttaggtctgtggaaatgagatctttacatacaaaaccactactttatgaataaatgtaacatttaatttttgaacatactgaggtttctttcaaatttatactatcatcaataattatatgataattatatttatatgtaaattgtcgactatttttgagtattgttttatgatttgcacctaaaagtgggatttccagtttaaacattttgaacattttttaaacttttgctacagattgaaaaatggccttcataaatggtgttactgtgcactcccacaaggcatgaataaaaccttatcttaagtcaccaccaagaatcaaaatcctatcacacactcacactcagagatcaacacacatattgtacacacaaaacaatgcatagcatctttagagacgatgaatacacatttgtttgtattcaaatctcatattggtaataaacacttttatgagcctgagacacatccaataacctgctttgatactacttaagagactgaggatatgcatcttttagtcactgattatttactta

SEQ ID NO: 33014 - DNA, 1465 bp, Bovine  19866880644168
  misc_feature (1)..(1): n is a, c, g, or t
ngtcggacacgacttaagtgacttagcagcagcagcattcattgtctagtagaatattggattattttcttcaaggcttcctgttcaaaaatcaatgttctgctaaactgagtggactgacagtagtgtgaggcttgctagaccaacagacaactggattgcccttagatttgaaatccaaggctgctcctgattatggtgaagggtaaataaagaaggaaaaaatacaattatatatgtttcatttacagtcatgaggactttcatgaaattttttgtgaaagaagaaatatagctcaagctcaataggatattaattcaaataaagggattaaattatctcttaattacttttagggatggatgaacttggccatatttggggtgtattgagtatctcaaatgttttcccaaatgtctggagtttaaaaaaaaacatcttcctcagctacctttgttttaaagatcttgcataatttatggtaaacccaaatgaaaatattttaatttcatttgcaactaagaaaacatttgctttttatgctttttcttattaatgtttgaaatttagtttcagtcaagggctaagacttctagatgttttacatgtaatagaaaaacatttatattcaggaaataattataaactttgctacatgaatatcacacttattatcaatgaggaggaaggaaattttaaaagactatacgttatgcagggccatgttgatattattttagacagcctattactttgaataagagcctttctagtactagaatttacaacataaaacattttaaataaaagtttaactaaattaatttcacttttctgtcaatatttttgcaaagattcatttttatcacacttttatagtgtaaacaaaaataatatttttaaattacatatttggtaccaatttatgtctatttggaattgaaaatattggaaaatttcttatttaaaacataaacataattgataattttatatgtatagatatgggtatatatattgtgaatgtgtatgtatatattcactatatatatatacatattctagatacatacacaacatagtgattgtatatatgtatatattcactatatatacacacaaatatacatattttttcactcacacaaacatacacattctaagagcaatatcacaagagtgaccaaaaaggctactttttgtcctatactcagacctcttgtaaaaaactatttcttctcaatcaacctttttttgtcattgttctttactttgagaacttatctgcaatcctattagagtacctaccacatagtgaacaaaatactctctctgttgatgcaataatattcttctgtaaaaagagtcatcctacctgtgaataaagcaattcagttcatgttttctattgctgtggctttccataaaatggcaaataccattttctacaagagatacatgtta

SEQ ID NO: 33015 - DNA, 1913 bp, Bovine  19866880650001
  misc_feature (1)..(1): n is a, c, g, or t
ntggattttaaagcagagtaaaactcacttttcatctaaatagcagtgagtttattatgaatggacccatcttaagataagaggatcctttatgatacatatcatccagatttgctttatttttccctattaacatgctctgcagttatctattactttggatcaaaaagttgtagctctaagcatgaattagttagtggtaatgttgagttaaatatttatacatacccatggcaggaaaagtcaaggaaatgtattctaaagtcctttattaacctgatatgctgaaggttaaagaagtttttatggaagaaatgtttcatttttaaaaaataatattgaagcagaacaaaaaatacatcaaaaggtaataagttgagggactgtcctctcttgaaacatagacctgaatgaaaaatcatttatcaaaaattgtcccccacctctgacttccagaagcaagcaccagaatatgaaatactcttcttctggcagcaagggctaacgcgatgaaaaccagtatggttggcagggctcctactgaaagcctactcctgcacttcagtgtcctcagtgatttccgttttctccagcccctcatatctgtttcgtctattctcacacgccctgggaccctaaaggccaatccatgatggtcaagcgaaacagaactccttttaacctcatcaaatctttctgcatcagcattttccagactaaggcatcctgtccttagtatgaagggtagaaaaagaaatgacagcatcatttaccattccactcactcagcccacatttatgcacttcagtttcaaaagtctgaatatcatgaagtctcaattcaatcagccccatgtaggctatgttaaaaatcctactaaaaaactgtaagttttcatcagcgcttagactaagcctggggccattccaagatactggtgaaaagtttaaattatggattgttaataaaatggagtttcactacttttcttcatgttcaatatctgaaattaggtcaactcagtcctaccttgtagatagataccttactacaaaaaaatgtaattaatattaattatattaatttgctcaacaaaactgtattcagtggctactatatcttgggtattgtgaggggcacttaagaatactactataaaaatgtggttaagtatctaatgttatatgtaaatgatgttttcagaatatttgatatccctagaaaatagtatacattgtttaaaacacttgagattcaaacactaattattagggcaatttttattattttatctctagatgagtagataagacatgtagagtcaagttatttacattctggtgaaagacaaaagcatacacagtttacaaatgcagtaaacttgggcagcaggagtatggagcaccataaatcattgagcatagaactagtcatagaacctagaattactgtggtctgaatgcttgtgtcctctcaaaattcatatgttaaaacataaagctctatatgataatatttagagatgggaggctttgggtgattagattataccatggaacacacaagaatggaattaatgcctttacaaaagaggatctagagtgatccatgggctttgtatgccatatgaggataaaatgaagtctgagacctgaggaggacccttacacacccagactggcacacttatctcagacttccagcatccagaacagtgaaaaataaattcctgttgtttacaagccatctagcttgtggtatttgtgttatagcagcccacatgggccaagtcaaagtttcacatagactgcagccattggagaaagcaatggcaacccactccagtgttcttgcctggagaatcccagggacagaggagcctggtgggctgctgtctatggggttgcacgga

SEQ ID NO: 33016 - DNA, 2319 bp, Bovine  19866880657350
  misc_feature (1)..(1): n is a, c, g, or t
ncatattgttttctgtataactctatcaatatttatggcattgtgctgagatcatgaattttattatttgtatcttttagtagatgtgagctcctttagcaaaaagactttgtctggctcatctaacatcggactaccatatgcctgtaatagaggttgccaaattgagtaaatgagtgaattaacaaatgaagaaacccgggctataacttttggtgactcctatacaaattgccatataacttagctgaactccaaagaatgtatacatgtaacctaaaaaggaaatccctaagcaattaatctggtctatcaactcaaactcaattgttgctattactgccattacatcacagacaaatcattttagctattttaaaggtcaaatcagtgaacactggagtacatgtgtctctttcagttacagtttcctcaggttatatgcccagttgtgggattgttgggtcgtatggtagttctattcctagttttttaaagaatctcagcactattctctatagtggctgtatcaatatacactcccaccaacagtgcatgatggttccctttactccacatcctcaacagcatttactgtttttagattttttattgatggccattctgattggtgtgaggtgatgattcattgtagtttatatttacatttccctaataatgaaccatgttgagcatctgttcacgtgtttgttggctatctgtatatttcctttggggaaatccatcagcagaaaaatggatacagaaactgtggtacatatatacaatggaatgttactcagctataaaaaggaatgcatttgagtcagtcctaatgaggtggatgaacctagagcctattatgcagagagaatgaagtcagaaagagaaagacaaatattgtatattgacacatgagtatagaatctagaaagatgctattgatgaacccacttacagggcaacagtggagatgcagacatagagaacagacttgtggaaacagaagaggaaagagaggttggtctgaattgagagaatagtatggaaacatacattactgtatgtaaaatggatagcaagtgggaatttgctgtgtgacacagggagctcaacccagtgctctgtgacaactagaggggtgtgatgaggtgtgagatgggaggcgagttcaggagggaggggacatatatatacctgtggctgattcctattgatgtatggcagaaaccaatgcaatattgtaaagcaactaactttcaataaaaagaaaaaaaaatttttaaggtcaaatcaggttaatcactcaattcagttactacatattccagccccttttctggggtcaaaactggccaggaaacttggagtttccccttaagagctgaaattaactctggataaggcacagattaatctgaccattaaaaaatcatttgtgaattggcagagcagttgacctcttagcagcaagatgtgatgtaaagaatgtaagtttcagagtcagacagatatggcttcagtttcagaaaactctaccttcaaaatatgtgacaccgagtaagatatcttagccctgctttcatttatttatttttatttttgaaagttgaatactaatatctaccttatgagtgaggatggaggaatggcaggaagccagttagtcaaaagatgaaaaaatgctttgttccatatctgactcatggtaatcaataaatattagtttattactttaactgtcactttttctttctaacactcttcattgatctttacttcacctggcaaatgttctgaatgttggtgctatttgatggagaaccatagataccatcaaagactttctactgcttagactgcagcagaaggtgaactaagagtactgagcatataattattccctgcctctctctctcttccattccttttctttctctcattttctccttctccctcctgttcttcctcttccttttctctctatgaatctaagaaaattttaaaatttacaaaggcacttttaggctaaaatttaatctttataaggctttttatcaagtatttgctctcatttcctctaaaggtagtcaatcacctctaatctttatttctgtatagattatcttacagactcatttttttttttgcaggtttataataaagtgtttaaaattcaccacaagctgattaaagcatgttttgttctcttttcatcaaagatgtactgatactattttacaagcctatttttttttaattcaagttagtaaagaaaatagtattaggtaatttgtttaatcttatggggaaaaaaac

SEQ ID NO: 33017 - DNA, 1329 bp, Bovine  19866880694798
  misc_feature (1)..(1): n is a, c, g, or t
nttcaaatgggaaaatagcaatattagcacagttattaagagaaaaattgcttgctcatattattgcaaaatgctctaagaaataaattgttatgatatataataataaaactgtctatgctgagaggctttggtgatattttaaattaattgatttctaaaatgttatctttactgtaatagatcagtttgttatagaaatctctgcatgatgtcttaaaagaagtgtgttgcaattatacatacaataaaccaaaccagtaaaagttcatagtctagacttgtagacactgtatgatgggaagacagcattgaatagtggaaagaacattaagttcaggtatgaactttggtgtaacctgattgtgaaattatcaaggtgatgaacctctcaacatttcagtaaactgacatggaaaattaagatattaagtctagttacatccaaaaaaatgcatgaaatacagcagatacttgacacttgagaatcatatgtccctcctcccgtccactacttccaacaccaacataatatttcagtcctcttgcaagcaagaggcaaccacttggttgaccatttcttaagaaatacattgagaaatacccaatcagatggttatgagaaaaagcatttaataattttctctcccaagatgctgttaaaataatattaaagttattttacaaaaatatacacacatatgaatgcatagtatatttctgataaagagaaaactactgagtgaggaagtggggtgaaggaagccacagtctaatgtccatgaagagtataatgtaggaggaagctaacttcaacctgaatctagagagacagatgaatgcagtgtcatatctgatattgtacctgatgctgaagatgctggaactataaactgaagtgaagaatgactttaataagtccattcctagattggacatacctgaggggagaatttatgagcttaaagatatgttaatagaaacttccaaaagtgaatcgcagagataaaaaggaatgaaacacacatgcacaccaaacaaaaactcagaacatcagaaactatgctgttgtttggttgctaaatcatgtctgacttttgtgaccccatggacttcagcccactagtctcctctgtccatgggatttcccaggcaagaatactggaattggttgcatttcctactccaagggattttctcaaccaagtgattgaacctgcatctcttgcatctcatgcattggtaggtagagtctttaccactagcaccacctggaaagtccaaaaatgattccagttcaattcggttcagttcacttactctgctgtg

SEQ ID NO: 33018 - DNA, 1070 bp, Bovine  19866880728373
  misc_feature (1)..(1): n is a, c, g, or t
ntttgcctgaaacttaatctgcaaatcattaaaggtcaggctctcccttttcccttcctccttccctttcacactcaaccagctttccacatgacaaaaagaagtcacagccttcttatggctcattgcctcccaaggtataaatcttccatggcagcataggaacaactttactgttgctttaatcaaggcatcataatcaattctctcatccatccgtatactttcacattttacatttaatagtgatatgtaaaagtttatacaatgtttatactgttttagtcaattgtatgttaatgtttataatgataactcaaggcaggtaaaaagtttaatacttaaagactttggttatatgaaaaaatcattccaatttataaatgatctttgttgcagagaagtatgatagggtgatcaataaaagtctttcaagcataaaagtatattacattagtataaaattttttgcagaaagtggaatggaagtacaagctcaaggagaaaaagagcaatgtaaaaattctgatgattgtatcatattccaaagattatatcttatatatataatacatatatacatatacaaattatatacatatatattttaatagatatggttatcaaactacttatgttttgtattgcttagaatacatttaaaagagtgatgaaatttaagattttgtaatgtgaatatttataatatactggtaattatatactctcaaaaagttttcgattatgaaaaatgatgaatgtctattttaaaatgtgtgatgggtacattttctacatttttttttcaaagagatatgcaggcaaaagtgagaccacaggcttaaggctaaaaggaagtggtttgagactactggctaccaccctacttctagactagaaaaaaatgagaagaaaaagaaacaaaaacagctactgttgtatacacatatacatacaccctccttccctcactattcctaacccccatcctttgcctgcctcttccatcagctccacctcagacatatttggtggtaaagcaaagggtttcattgtttgggaagcaccga

SEQ ID NO: 33019 - DNA, 1692 bp, Bovine  19866880761692
  misc_feature (1)..(1): n is a, c, g, or t
nattaatctttattcattatcccttttctttttaatgttcaagattttagccactaaataatatcgttggttgtatacttaaactgatagcttcctctttctcccaaatctgtatttccctcaaagggacaaaggtagatttgtccttgggaggaaaaaaggaaaacagagcagggggagtcaaagtgtgattcttgacattgcacaacactcatgattgtctctagggatgggagccctggtggttcagacagtaaagtgtctgtctacaatgcaggagacctgggttcgatccctgggtagggaagttccctggagaaggaaaaggcaacccactcccagtactcttggctagaaaatcccatggacggaggagcctggtgtccatggggtcacagagagtcagacacgactgaacgacttcacttgcactttgtttaggactgtgtatacggcaagatcttgcttccatgaactgtgttgtgaaaagcacgtgtatatctatgtatgaccttattttttgcttatctaaaagaacattgttctttcatccatgtgaatgtaacagaataaaagtgtggcacatgtagaattgttttggaaaatatactaatttagtagatttgagtcttgctcaaacttcttgataaagcatacttttcccaatgtttttctctttctgtataaatttgattaggtttaactttctaactccaaggggaaatgaagtgaacagtctgacatggagcacactatgctgcattttttgtctgtgtctgagtctgtgcattttagaatccaaaaagtttgagatttttcatagtttaacacccaataaggttataaaccacccctttattataaaatgatttttaaacgtattctacttaactatggtagtatttactccatatttttttttgcaatttttatcatttaattaaggatatttttctaaatttataatctggcttgggcaagataggattaaaactgctatttttaaaaaaaagagatttacaggtaatcatacagtatattatgtctatatatttatagataatcatacagtatattatgtttctacatattcattcacaattaattcaataaccatacttatctctgctaagaagaggattgataaaattatatagttgatttggtccagagaagaatttgcatattggtttaaattagattctcctgaaaatatgagtctgaatttctgtttgccttggcctgtctgttgtcagaatgagtgagtagatagatagaggtttctgacttgcctgaaacctacaaattaataggatttaagagaaaatatggacataattgaaaattggtaagggtggaggggccttaaaggccagacctgttagaaggagagaggagggacttcagattagattcactgcatgtttatgttgagtgagagacttattttcattccatcaggtattttatgaaattgttttataaaaatttttcccataaaaattataggtcaatgttgctgttgctgctgctaagtcacttcagtcgtgtctgactctgtatgaccccagagacggcagcccaccagggtcctctgtccctgggattctccaggcaagaacactggagtgggttgccatttccttccttgggttacactgatcttaattgtatagaattttataataatct

SEQ ID NO: 33020 - DNA, 497 bp, Bovine  19866880773322
  misc_feature (1)..(1): n is a, c, g, or t
ntaaaaaatagagcttagttccttaaaatcacgttcttgatattttttcatttaaaaaattaatattttatgtgactcattatatgactcatttatttatgttgagaggtcaattaaggctaaattagatatatctgaatatctatgaataaagtgatttaaatttttaagtcttcactgcaaccagaaaaacctcctgaacaattaacctagattcatgtaatttgcaggtttttgctttttctaatgttggcctttttgctcaaccaataaaaatgtgcttattattcttttatatttctatttcagttcattgttcttttgttctcaggtggggaccagttcacatccaaatacttaatgcaggcataatacctttcaggtatcataagaaagcaaaattaattaacattaacaattttacttatattttaattttacaaccccttgaggcaggcactatcttcattttacagaggaagtaacgaggtctaaag

SEQ ID NO: 33021 - DNA, 2535 bp, Bovine  19866880784682
  misc_feature (1)..(1): n is a, c, g, or t
nctgctgggcgccggccggctggagggcaggtcgagtctctagccgctgaggtcagcgactgcggtttaaaactactgcagctgcttcctgtccttgactgtcattgaagagcagaagttagaaactagtaaatgacttaaagatggctgtagtcttgttaatatgatctggaaacagttcctggtcgtcgcttaagtgttcagggcttccgtggtggctccaatgcggaagacaggttcgatccctggaacaggaagattccctgaagcaggaaatggcaacccactccaggtattcttgcctggagattcccacggacagaggagcctggctacaaagacctttgcgacactgccactctctcctttgcctgggtctgaaactgcattctaaaaatatgtttctatcggtcttgtcactacaaataattttttccggtatcccaatactggaattctcatttacctgttttttctttttcttttttttaacccagaagtcttcccaggcattcaagaacactctgaaccccaacctcatatgtagcttaaagcattaatcaaatgatcacaccagtaattggacctggaaagaaagtctcctccaaaaaagtaatgggagacctgaaggagaagacattaaccaaacgaaatggaggtagatgtatagacagaggtaatagttgtgactgtcagaaactaaagagactttttaagaagggaggtctggtttggttggaacttgaatagtagaggaagcgggtggtggggggatcagatctgttgcaccagtggtcatttacacagcatgggttttatgctgagagcgttagggagttaggcaaaagcaagatgtgactttaagttattgctttgtctatgaaaattgaattactggagataaacatgaaaaaggggggaatggttaaagggccattgcaatagtccatgttagaaaatggtagcttctactagtgtaggaaatgtgatgatgaagaagagattgcagagatatttaggaggtagcaccaagacactgtgattggtcaaacatgggagtaggaagaagagggaatccaggatagtttcagaggttccattctaactctggattttgataccaattattgagattatgagaattggaccgtaaagaaggctgagctctggagaattgatgctttcaaattgtggtgctggagaagaggtggtgattattaaaatgacatgaagcttatgaagactggtatctttttcattcattcagtaaatctttattaagtacctactctgaatctggcactgttttaactatggcagctgaaagaaaaacttgttcctcactaatggcgtttacagactggttgggaagacaaacaggagggaagaggggcagggcacaacctttaaaagaatggtatagcctgaagacatgacataaattgattagaatcaaataggtccaagatggcagactagtggacttccactagaatttgagcctcagtatatgctgattgtaacacatcagcaagctgaaagacacatccaccggcaccaagatggttcaaaggctgacaataaaagatcaaaaaatgagcagcagcccaattcctggaattctccaccctttccctaaaatagttgaagtaatcctcctattcaagcccatgaaattactcagcctgtagaagctaaccacatcacattttgcgactgctcttgccttctgagatggcccacactctgtctatggagtgtgtttctctctaaataaatcccacctcttacttatcactttgtcactcattgaattctttctgtgatgaaatatcaagaacctgagcttcatctgagtcactccagataatgagtgcagccatgaaattaaaagacgctgactccatggaagaaaagttatgaccaacctagacagcatattaaaaagcagagattttactttgccaacaaaggtctgtctagtcaaggctatggtttttccagcagtcatatatagatgtgagagttggactataaagaaagctgagcacagaagaattgatgcttttgaactgtggtgttggagaagactcttcagagtcccttggactgcaaagagatccaaccagtccatcctaaaggacatcagtcctgggtgttccttggaaggactgatgaagctgaaactccagtactttggccacctgatgcgaagagctgactcatttgaaaagaccctgatgctgggaaagattgaaggcgggaggagaaggggacgacagaggatgagatggttggatggcatcactgactcaatgggcataagtttgactaaactccaggagttggtgatggacagggaggcctggcatgctgcagtccatggggttgcaaagagtcggtcggacatgactgagcaactgaactgactgactgactgagcttcattaggtcctaaaaacaggtgtgtgatctcagttggaagctgtgggtcttggccgggtttaattcttgcacatgggttcaaagcctaat

SEQ ID NO: 33022 - DNA, 944 bp, Bovine  19866880872026
  misc_feature (1)..(1): n is a, c, g, or t
ntatccttgaacatattgagcctattaaagttcttggtattgtaaagaacaatcattgccaaatggatttctttgaatgctttttttagtactgtgtatttagttcttaaattaataattcatttgaataatttaagttatttttttaagaataatggagactcgctgtggtcttttcaccatggaaatagttttatttgtgaaggaaggtttttaaagaatagatattttttgtggtacttattttaaaggtttataaagagccaaattcgttatataggttgtgtggacacattattttagaaagtaatacatactgatatgtattatgccatgctagctttgaagatgcttcttttgtgaaaagggtgtatgtggcatatagtataatgaataacataagaggtgaggatgagtagttatgtatgcacagttgacctttgtttctattgataggctgttggtgaatatttggaagattatagtgttttatgttttatatttagtgaaattaatattgaatacaagcctattagtttatttggcaagctagcattatcttttggccagatttgcaagtttgtctcataagaatctatttagtataagttatgaaagagcattttaatttattaaatcacttgaaacagaagcacatgcatttctgtgtgcaaatgtaaaatacacaggagaagtagaattcgtttgtaccacttgcaggacactttttttccggttggttgaactgatgcgggcccactgggccactgagaaatgactttgatagatggttgctgtctgagaagctagtatactacagattagtagaaacccaaagagaatctaattcgctttgtgaagagtttggtccaataagataatttttctaattaacctttggagcaccagtgtagctgtggtgtttaagaaaataaacggcctca

SEQ ID NO: 33023 - DNA, 740 bp, Bovine  19866880878241
  misc_feature (1)..(1): n is a, c, g, or t
ntatgagacaatcaatctctgttgtttaaaatcactaagtttggggttgcttgttatagcagctataggaaactaatacaataatcatcaatatgattgagatcatgtcaataaaaataataagcatacattgcttacataacaaaagacttccctataaaaatgatgatatattttctctatagacatgtttctttagggatatgcaaatgcttccctaaactggggaaatagaaaattcatcaccaagagaaaaccttctacctcaaactcatgttaaatagcaggtttatggattagtagatgtttggtcttttccacataagaaagaattttgaagaatattcatttaattgatattaatgaacatgaattgtataatttaacatagagtataaataaagatttatgaaatgagaccataaatgtttttgaaaataatcttaaagacatggaaagctaaatagaaagaatgaaaaattaaattaaaatatactctacaaatgttcatgttaatgaggtttttatatatctagatatcatccaaggagagttatgagtttagaaattagaatgaaagtacatttttagatggtattaaagagattataactatgtccagctttattttcatgctgtgactgcaagctccagcaggggaagatgataatatgcataagaccaaggcttactttctcattttccatgggcaacatgataattactgtaaagacaaacat

SEQ ID NO: 33024 - DNA, 1774 bp, Bovine  19866880899620
  misc_feature (1)..(1): n is a, c, g, or t
ntctaactgttgcttcttgactccaggtttctcaggagacagatattcccatctctttaagaattttccacagtttgtggtgaatcacacagtcaaaggctttagcataatcaatgaagtcagaagtagataattttctggaattcccttgctttctctatgatccaacgaatgttgacaatttgatctctggttcctctgccttttctaagactagcttgtacatgtggaatttctcagttcacatactgctgaagcctagcttgaaggattttgagcataatcttactagcatgtgaaatgagtgcaattgtatggcagtttgagcattctttggcattgcctttctttgagattgtaatgaaaactgaccttttccagtcctgtggccactgctgagttttacaaatttgctgacatattgagtgcagcactttcacagcatcatcttttaggatttgaaatagctcagctggaattccatcacctccactggtcttgtgcataataatgcttcctatggcccacttgacttcagacttcaggatgtcattctctagttgagtgaccacagcattgtgatgatctgggtcattaaaacttttttgtatagtttttctgtgtattcttgtattcttctatgtattctaattcctctagtgaatggtttaagactggtatattttctggttataaatatcattttaaaataaagcattaaaatatgaatagagcaattgtttaaaatgtcccatattgccagcagaatttggctgtaggcttccataggactggggaaaacagagaccccacttttgggaggcacacacaaaatcttgtgtacactaggacctggggaaaaatgccccttatttattgaattttctttctcataatctgaaaattatcagaaagagtagaaattcaagttagagttaggtagagaaaagggaatactatagctgataatgatgtaaggtaagtaaatctcttcctcatttggatatttcatttgaatttactttctcatttttttaaaatctcagttttatttatttatttatttttttactttacaatattgtattggttttgccatacattgacatgaatccgccatgggtgtacatgtgttccccatcctgaacccacctcccaccttcctcagtgatagaaagtcttagaggcagatgaatagaaaatttttagaaaaattccagatgatatgggattaatagagatgaggaaaataacctctttaaaatttctactgagtagcaataaaaattggtgaggatattttttaacctgggcttccttggtggttcagctggtaaagaatctgcctgcaatgcaggagacctgggctccatccctgggttgggaagatcccctggagaagaaagaggctaccaactccagtattctggcctggagaattccatggactttatagtccatggggtcgcatgtatagtcacgggacatgagtgagtgactttcactttaacctatgggtggtgaaaatatagagaaacttgttcatatcttgtcaacttttttagtgagttgtaaaatttagatggcatgactagccatatttattgaatcttttttattttagaagtttatgttggagttataatgtgatgagttgagttatatgagacatctgcaagtaactttctgcctaggaaatctgcatgtctcttagttcttgtgattaggataatgggccctgtacatttttccagacaagaaaagaacatcacca

SEQ ID NO: 33025 - DNA, 2901 bp, Bovine  19866880937616
  misc_feature (1)..(1): n is a, c, g, or t
nttaaaaatttggcattgttttactacagcaaatactgttatcttaccaaatatctggtttcttctgtttctaaacatacagtaagcaaaattaagtaaaaatacgcattttctgagtagaactagacagctctcagtttgaagtataattccttcaagtaatagttctatgatcttacaaaagttatttcaccttctcgactataatcaaataataacaaatttctgaggccttaactaattagaatacaaggactaagacttcatgtcccttttttagaaaagatcatactttatattaacagtcattgtttagtcactaagtcatgtccaactctttgtgatcccatggactattgcccaccaggcttctctggccatgggattctccaggcaagaatactgcagtgggtaaagccattcctgtctctaggagatcttcctgatccagggatcaaacccatgtctcctgcagtggcacatagattctttacctctgagccaccagggaagcccatattaacagttaacacctattaaatttaactaatcaggctcttcatgcacaaatattttgacattagaaatactgacccaaacaattgaaaaagccataagaaccttagactccacataagcaattcagtcatgctagcagacattatgttcctacattttatgttttaaaacatatattctctgtacctataggtattgtatatctgctacgataaataaaaacagatgtttcattaaatacctggaaggaataaaaatatccattagcaaaacacagaaagtgggaattacctcttcagtactatccccaagacacgtcaaaaatagataatattcagttcctgagctaggaaatccgcacatacacttaaaatgactattttgaaatgaaattttcatttcatgtatagagagggttggtttttttttcctttggcaaatcaacatttagtctgtaaaacacgatgctcactcataatgtcatgcatctcactcacaataattctttcttattaactgcttgggcacaatttattttcctctcaggctatgaaggtgcgtgcaagtgcagcagactctggctggagctgataagccagcccatagcagcagcactgctggcctgatgagatttgtaagaagacaatattccattggctcggaaaactatgctgtatatcaaacctatcaaaaataatatctacaaacaatgccttgatgcatttgccaactctcacagagagctctctggtgttctgaaaatatagtttgatttttttttttctgttgtagtgaagaaatacagaccacatattttttttaaagatccttgcttttgtttacatttttttcactaagcgtggtagtctaaaagaatatttttaaatcctggctttcaaacagtcattgctatagttcccgaagaggatagattatctatcctttgagttaagactatttatttcataggagagttaaaaaaagaaaatcaagaaatgatcaaaagagaagtatgtcataatctcacaaactaaaatctcattataagttctccaaagctttttagataaaacacttatgaggaaggcaaacactcctgctaaaaatgagattttcattctgtttagaatatttattttagttccacacaatttctcaaaagcacataccatattttaatctagtatatttttgagatctttgtttccaacaaaaatatgctcctaagaaaaaaatattaccttaaagacaaaccactgaggaatcaaaacaaatgacacactagatatattcactttatgtatgtattgcataaaggaaaataagctacagaaaatgttatcatatttagataatactttataatttacaacgtaccgacatgtattttccacaacactatgaggtgaacatgggtagaactagaattagcttcaaatgcaaattgactgacatttttctgtttcctgtatactctacatacaatacctcatttaatcctcagaacaaccaaatgacattttcttagaaggcaatattccactggctcagaaaaaaatttctgctgtacatcacacgtattcaaaaatatctaaaacatgctctgatgaattttccagctttcacacacacacacacacacatacacacacacaatctgtgtgcctatctaaaacaaatgtgatttatttttttcaatttttaaaaaagaataaggaacttgaagtataggtgggattgattacttacctaaaaccagaagcaagagacaactatatgctttgagtaccaactaaagatgtactgaggggtttatagacacacatacaatcacacgatctcagttaatattaccaactgctccttaagcttgatattgttatacctctttttttcctgtctctcagggacactggcttcctttttgctccagtggctccttgtgcttccattgtcataaaagagaagattttaacatggccaatagatgtctccaaaatcctgcagtaactaggatactggcactttgtggtattttctcatcctttatggtgccctggaaacaacggtgtaaccacctgtgattttaccttttgctgtgaaatcaaagctgtttcatggtagagccaaattagactataaaaaggctctaggaagattctctggtaagtcccatccttcagaatgaaaaagaagtaaacactgagaactcagaagaatataattcgcttgtgttcttaaacaatgtgtcctttgttacaagtcaacccggattcttaacattttcttattgatctttacaggaaagagaaataatccacaaaccgtaactacttcatttctacatgaaacattcttctgaatctatgtagttttactcta

SEQ ID NO: 33026 - DNA, 2761 bp, Bovine  19866880954131
  misc_feature (1)..(1): n is a, c, g, or t
nttgagttttatcacctgtagaaattagagtaatttgaaatcttaagtacctattactatttcattgaacatttccctcaaaatcttaggtaactcaatttcaatataaagtattaattagcaatttataccttcttaatgccaaaagtgacctttattcagaggttgttgaggtaattctgtgatgtaaccaaattaaatttcaaccttagatacaagcaattatttccaatcaggtcctttactgctgctgctactgctaagtcaattcagtcgtgtccgactctgagaccccatagatggcagcccacaaggccccccaaccctgggattctccaggcaagaacactggagtgggttgccatttccttctccaatgcatgaaagtgaaaagtgaaagtgaagtcactcagtcgtgtccgagtcttagcgaccccaaggactgcagcctaccaggctcctccgcccatgggattttctagacaagagtactggagtggggtgccattgccttctccgatcaggtcctttaacaatggctaaataggcacttgtgttacttacattgtagcttatttccccacagagagttaacaactgttgtttctctatgtaaccatcacatctaagagttttctgcaaagccaagtcaaatgtatgttcattttgtaacagagaatggaggaataactgcctgctcccacagaataacaccttaattctgtttttaaaaaatagctctcatttgtcacagtgagatgcttcacgtgtgcatgcatactcagtcacttcagtcatgtctcactctttcggagtctgtggaccatagcccgccaggctcctctgcccatgggattctccaggcaagaacagtggagtgggttgccatttccttctccaatgcatgaaagtcagaagtgaaagtgaagtggctcagtcgtgtccgactctagcgaccccatggactgcagcccaccaggcttctccatccatgggattttccaggcaagagtactggagtggggtgccattgccttctccaaatactcgcaggaatccccatatagtcagagtgacttttcatttttcatgtttatttcattttatctaaagatgttgattttaaagtcctgtttctgaatgtcttgatttcttccctgagtcttttgattttgatttttgaccaaatttaaaaacactataaagaaaactagccaagtttatacaatcttggacaaacaaggtaaagcatgcctttcaaagcacaggaaaatttgttttgtctttattcaatgtctattaaacaatttggttacaaactgttaagaaatcttgaatttcaaatactgaattctgaaattgatgtattgctaaatattttgtagggattctatttcaatatactattttatctagatatttactcacatcagaattgtttccacaaacagattgtaaatgttttaaagataagtgactgcatccttttgaatgccccacaatagtgcctccaataacatatgcaacataaaatacttgttaaataagtacacgttaagccaaatttaattacaaaaccagctgctgtcagttgcattgtctcacacgtgttaaaatttccttgggcttcctgagaaaccaataaccatatttttagtttcattttcacaaaatagttcactcttctggctgtcaaagttcatgccacgaacagcccaccttcttcaaatgtattctgaaaaatgctttttaccatttctcttccgtgcttctctggaacttcttattttgttttactttcttatgcttagtaaagcatcaccgaacaaaggacaaaataagggcaacaaaacaattgtgtgatgccttttatttcacagctctgctcatctgcggcacaaatagcagaacccatggttaatcaccacacacttctggttccctgggcactcgtggagctttccatatggtctgttcaaaacggggactcatatatatatcaaatacaaattatgcaaagaaatgtgatcatatagtggaaccaagtcataagagaaaaatacctgttcaacaaaagcagaaacctactttcaaaactctccaatttctggttcccaaggcaaagcaataataagtacattagataaatcttcatcctaacactaactaggatcatctctcagacatactcaactggaagctttcattttcattcgtatccaagcgaaagaaaaaagtttaatggattacttccattttctttaatgttttaggcttttcaaatcttgctgtttactctgagtgacttagtccctctatggtgaagtctttaagtatttttttttcccataatttcatctttaagctttattccgtctctttttctactggcttagacaacttttagccttagattaggtaaccgcatagtttatgactcctaccagggcgcttttgaaatgaaaggaagtacaaagaagaaaaaaggatagtgcaacaacaaatgaaacagagattttgctgggaagactgagagatacagtcacctagccttagggtttgctttttggtcaacagagactttctcctatagtttttagggttaatcagaagagttacttacataaccaaaaactgtttgactgtaagttggatcctattttccatgtatatcacatttctaatggcagtcaactgagaagggcaattagaaaaataccaaagttttcatgagatactagaaactagaaatcactagtaa

SEQ ID NO: 33027 - DNA, 987 bp, Bovine  19866881042006
  misc_feature (1)..(1): n is a, c, g, or t
natatagaataaagcaagtgagatcaaaactaaaaaaccctcaaaagcaactgattaagattgactatgatttctctttttctttctttcatcagttcaatatagagattacaatatatgttgtacttaattttataaaaatacctcaaaatgttctgaaaaattaatagcttcattcttttataaacaatgaggaaaacaactgctctaaaaatacttagtgaaaactcattaagcagcttaggattcaaacataggaagtgtttatactttattaatgaaaaagtgaataaaacagtggggagaaagaatgaaaaactaagactaaagaaaagagaacaaaagaagttataaaataaaaaagaaaattatatgtaagataagatctgagaatgatttaaaaataaagcagttaatttcttttacctatgtcaaaggattattttcattctattcttgcttttcttgctaacagaacaaaattctattacactttggcaacatcaatgctactttcatttgacataaaatctatacccattggagctttgtaagcactagacacaagtttctgtggacaatatcttaaaatatgtggaggaaacgatgactcacacacaaagaacttgctggattctttcaatagacattgatctcacagacagttttcaatgtggtattttaggtgattgaaatatttatgtgtcctgctccaaatcgtttttcaactgggaatataatactttttgataaactactgttccttttttttttttttccagtccatattttcttcaaagagccactgttgaaaatgaaggcttttcttcaataccagggtatagaaaagcacggctagctcaggataaaatgccttgaaaagacatattttctcaagctgtgcaaaattctaggacgcaatcaacagaaagacagaaatactttgcacttacatacaactctttaccaaaggctatcaaagcattt

SEQ ID NO: 33028 - DNA, 1755 bp, Bovine  19866881056938
  misc_feature (1)..(1): n is a, c, g, or t
naagaaaccaaaataaaggaataccaagagtggcaaaccttaaaagttttggaggattgaaacaaacagatggggactagcgggaatcaccaagggtaagccaaaagccacaggtgaccaggttacgcattcgaaggagagagtagaggtgaagctgtggtaaggtctcaagtgcctggatcagggaagcaagacatctgaacggaactgggggtgtcagagggctatgaccacatgccatcatccgagcagaccctccactgaagagcccacaggcgagggcagcagctgagcaaatgttaaggcataacaatctcaagaggttatctcctgagagataacatgttaataagatggtttctaatttatggtagtagaaagaacattgggcaggaattgagatctggatttaagatctagccatcaactagttgtaggactataaaaaagtgtcttacatttctttggcttctgggttatcatggacaaattggggggttggattggatgaattctatgatacctaaggtacttgaaattctagggatgaactgattggtcaccaaagccatcacccagttgcactgtgtaggtaggctgagatgacagtccagcattcatcttcccgtagtctacacactgtcctcacgcagctagccagacggttacagtcccaccgtttttcatttgtacttctgtgaagatagaagccagactacttgatgtttcatactgtgtacttgtgaaaaagaaagaaggaccaagctttcccaggatttgatgatcctgtttcaaatacagtggtgtgtgtctttgggaaatcttaaaaacaaaacaaactgcaaaagaaagcacataaactcactgttgcagttcagactatagttgctgatactttgtgtttgagttagggcgacttttaggatctttaagatattttagacttttctaatcagagcttatattttgaattctaaagtactagaaaatgataagcccattgtcaaaatgttcatcatttccttaactatcactgtaggattacaaacaacatttttagttttaaatctcttaaatttatttgtaatcttatttaaaatgggcattattgctgtttgaactttatacctttatggaagaatttagtaagtagataattctcaagaggctggtttatagttgttagactataagcatttttgaaaacatactcttgagaatggacatggaagaatgtggacatttaaaatcttcaaacaactttaagtctgctttaaataaaatttgacctgctttttcatctaatttatataaagaattaaaaaatattaaaagtgatgcatagttgtattgatttttgaagcaggcagatatcatagacattgtctggaacaagtggttcttgaccttttcactgctaaaggctcttttaattaatttttctccagtgattcaacattttgaaatattttgtctatttttcctcaccaagagcactccttaaatgataattaggtttttcattttaaattaatctgaacacataactactgatctctttagcatgagttcagcaatgacaccatcctgagataatgaaattctaccatgtaaaaaaattctagtatttagtgcagacttactgtgaaaaaatacattaattctattatagttttgaaattttgaaaatagtttcagaactctggggaactacttcttttccctacctctcccagtttacagatatgtaactca

SEQ ID NO: 33029 - DNA, 1836 bp, Bovine  19866881098108
  misc_feature (1)..(1): n is a, c, g, or t
nataagtttgttctctaagtctgtgagtctctttctgttttgaaagtaagttcatttgtatcatttctttttagattcctcatataagggatgccatatgatatctctccttctcaggcagaggttatttcacaagaggtggatacagtggtggctctcaaacaattttcaagggatgtatttgcagaagccacattctaaagaccactgtttagtagtatgggcagccaagatgatggcagagagggacagcaacagcagcagttgcctgccctctgcctcagaagcacaatgacataaatttaaaaccacctgtcctctggtgcttctctaacttcactctgccaatccccgtgctcattttgtaagcactgaattcaccgtgctaagtccttctctggttgggatgcccggggggtgtttcatgcagcccacctgcatgctggctgatacaactagtgcgttgtccttatcacatgctagaagctgaagcagactcagtactcccacctgtgtattgccatctgaagaaaggaagggaaggagagggaaagcagtttcctctaaagggcacaacctctaagtagcacacatcacttcctctaagaaacacgaaacagtccaatggctcatcaagctacaaggcagaccagaagggtaaatgccagcaggacaaacactggatcagctaaaacctagaaaagttaatcggtgaaaagaaaaagaggagaactggatactggggccaattagcagtttccaccacagatgtccccaatataccacctactttcagcaataaagtcattgtcattttaattaaggaaacacactgaaaaaaattaacagagtgaaaaaaaagaaaagaccatgccaagttgccaagtgtcaccatttcagtagtagccaccaaggcaagaaacaggaaaaggttattttgtcataaatgtaattctaccaataaaagttgttattgaattcctttcttctactcccggtccaccgagatctaccacagccttcttcacacacactcacacacatgcattcagtaaagcagtgcatttcagctttcttcattatgttagaccagcttcctttatgtccccagagcactaactcaccaaggtctttgtaatttgagtcacaaatgtggtaccacacacattcagatattttattttcttaagagagttttattatgacccttagtcatgacctttagtagttcctttttgtggcctctcttttcaaattattctgttcaagaaagtcagtccccaattaggaaacatttctttttgcttcagagaaggtggtggcattttcaaagctcttgacttggtgccgtaaagagtttggacagagagcagcacttgaatcctgtaattatacggcatttggagcacagattatgacaggtgtgctagcagcatccagtaatgagagagttggcaaaacagctgacttgtcacataattcgttggtcaaaaaataatcgttaaaagtaataacaacaggtctttaggcaaactagaatttcagttctggctcaaaataattttcccagtcagaatttcaaacatgttttctatgcgagttgcagtgttttatccaatcttttggctttcagttcacccagaacatatatcgtataattctgtcctgtgtcttaccacagaaagaatgatattgtagaactgtaaagatcactttgctcagcctcgctttcaagaaagggttttacctctagtgactgttgtcccacatttctcaccaagaccaccccccacccctagaatggtgcctcggctgccagtaaaacggaatcacaaa

SEQ ID NO: 33030 - DNA, 918 bp, Bovine  19866881166896
  misc_feature (1)..(1): n is a, c, g, or t
nactgaattattgtcttacatgtagatgtacctgttacatcacatgaaagaactataatgattgtctgtcattccattaatatgttgatggtcatgaaaattcacttctttaacaagcacttagtttttgttttttcatgttattgaagtagattaaactggtagaaagattttccttttgtgctttatttgttcttttacatttcttctgtttacaagttttacataacagtgattttctattttaagtttcatttgaaaatttgatgtttaaccaaaataatatgtagcagattaggaggtgttaaatgtcagcagagatgaagcagtagttgatgttttagattataacattggttaacttctaggttgcccattttcctaagaataatgttgcctggttccagtgctttcctaattcctatctttaggtaaaggaaaatcgtcatttggaatatagtatactattcataatgatgtagcaagacagtctgtatttccagtttaaggaaacagaagtatggaaaatccagttgttcgtaattgatttaagcatgtatccaatttattttatagcactttatgctaatctgtatctcctgactaagtttacctttggcagtatcactttcttcatttttcttagcataacaatcacacaagaggctggctagtgataggggcagtatgaattggatttatgctaaggtgtgagggaatgtctagaaatttgccatgtaaaatctatgtaaattattcagttgttaataatctgtactacataacaaattgcttgagagattgtagactgtattttttgatacatataaaggtgacgtgctgtttaatttttttctactaaacagaagagattttggtaaataatggggctttatttaggttaacagtccctaagga

SEQ ID NO: 33031 - DNA, 650 bp, Bovine  19866881187878
  misc_feature (1)..(1): n is a, c, g, or t
ngtttaaggattaggatatgttcagatcttttaggggatatcattcagcccattacacttattaaatgtaaaatgcatccttcccatagcagccaccctttatatcctccccagtgatgctggtcattcctagaaactctgctccactctctcaaatcccaatcctggaaaaattcctaacacagaactcatgtagttcttttttgactttctagccaaactttttctcttaaagagatacatattttatctttttgtcttcttgtttcattttctcttcacttcaaccctcacccagattttgcctgacaaaataaactcaggagctgaccccaaatgtaagaagttttgcctctgagaagctggggagacctgaggggtttttgagttgtgaccgtttaagaaatttttgctctgtaacagcttaaccatgacttttgggcccccacacacaattaaataaaatgatttctgtcaggactcagatcctccttgaccaaccgaagtttattcgcgtctcctctttactatctccactttgaaaaaatacaggaaagtcaggcatgactcaacaaaagtgaaatctggaggcaatgttggggcatccctttctctagcatgctctagcactagcatgaagtgctagcatg

SEQ ID NO: 33032 - DNA, 1370 bp, Bovine  19866881189491
  misc_feature (1)..(1): n is a, c, g, or t
naattcaattctttgttgctctacttgaaagtactcttagaagtactctacatttttatgcagatatggatacaactaagttgaaaggaaggtgatcttgttttcataacccactcagaaccatttagcagtccaaaaaactctaccatttcccaagggtatggacataaaaatatttctttaagtatagactgagctccttgagaacggtgattatgagctccttgaggacggtgacaaataggagatactcaataaaagtgggctgaccaaatgaataaatgttacagttagggtgctcattcactcccatagctaagaacaggctttcaaggaagccacttaataaaatgggtagaacggtttaaagaagaattcccttttccccagacagacagatatcataaaaattgggttgatctacctcattactcttgctctgagatagtgtcaggctatcattggtcagttcctcatcatcagcactgtttctgctaagaactttactcttcttcttcttgcagcccccttcactggcaggactgctatgctcttcatcgttgccttcatcgttctcgtcctcatcactcccgcttccctcatcttcatcatcctcattgtccccatcacttccttccttctgagatgcagatcgtccctttctttttactacagtgggtcgccaatcattgtcatcttcactgtcatagtcatccatgtcattcagctcttccatggatacgaaatccaaaagtggtcggttccgacgaaggttccacttttttggctcgctgacctgctcctctgcagctgtggccgcggggcctgaaggacacgtgtgagcagcaggagggcttgtggctggcgtggtggaggcagcagcagccacattatcagatactgttgctttctctttctccttctctctctccttctctttctctttctctctctccttctctttttcctttttcttcctaggtctttctccattctcttcttcctctttcttttccaccttaattaactgtttttctgatgacagtacttcttcctctgcagaatttttaagttgttcttcttttactttaacgtcttcattcagttcttcctctaaaatattttcttcagaatcactacaggaaccttctccactgtcctttgaaggatcttcacttccattaccactcccttcagaatctgttgaaaatatgagaaaaaaaaaccacacatatgtatatacatacacacacacacacacaacgctgacacaaatgaaaccaccaaaatttgtgaataactcgcaaaacaatataaacaaatttaagtcaaagaaggtagacattcccaaccgattaaataataaatca

SEQ ID NO: 33033 - DNA, 1157 bp, Bovine  19866881279338
  misc_feature (1)..(1): n is a, c, g, or t
natgtttgacagaaaccacaaaattctgtaaagcaattttcttcaatttaaaaataaataatctttttaaaaagtaaaaataaaaaaactttttgagctgcaatcagttactatttccatatgattatcaatcttgtaatcgatgcttttgaactgtggtgtgggagaagactcttgagagtcccttggactgcaaggagatcaaacgagacaatcaaggaaatcaatcctgaatattcattagaaggactgatgttgggactgaagttccaatactttggccacctgattcaaagagctgactcattagaaaagaccctgatgctgggaaagattgaaggcaggaggagaaggggatgacagaggataagatggttggatgacatcactgatttaatggacatgagcaagctccaagagatggtgaaggacagggaggcctggtgtgctgcagtctatggggtcacaaagagtcagacacaactgagagactgaacagcaacaacaatcaatctcattggctacagaatcattatcaagggttcagggcatcagtataagttattaaaatctctaaactgtttacatttatggaatttctctacctatcttctctctttatttaaattcttgcagaagtctaaagactcatgaagcttttggacaaaaatcacaaattgtttattatgggaggggtgattaaaatatgtcctgtggaatgtttatctccccttctagataatgatgttaagtaaaacctagttctttgcaattggcactgtgatattatctaactggaagtttctggcttaaacattccaagactacaactatgaaagtaaaaacctgtgtcatgtgttaaacagtaggccatattcttgttgctcagaatatagcgtacaagtcagtgggtcctggtagtttatttacttcttccagtttggatgcattttatttatttttgttgtctggcttccaatactatattaaatagaagtggctacttcaattttttttttaaaaattagttgggtcattaggacagaagctagtttcctgacttctgtttctgcttctcccaatctacccatataaatccattcttcagtcattatcagtgtcttctcctccatgaagctttccctgaattctccagt

SEQ ID NO: 33034 - DNA, 783 bp, Bovine  19866881287091
  misc_feature (1)..(1): n is a, c, g, or t
nacacacttgtagtacaataaaaagaaggactcagaaagtaattgatcagtttgcaagctataatgttagagaatgtagcatctagaaagtcagagaaaaaaggaggggagatttgcttccatgcagatgatatagcatggaaaaggcagaaggaaggaaagttcacaaagtgcataacgtgcagaaggaattgaaatgaattcagtgtggtgggagcttaggtttcctaaggaggagttattggaaatgaagcggaaaagattaacagatttttgagaagttgagatttggaactttatcttttagacggtaaagatttgtaagttttatatataaatgggataaaacaatggcaggatactattaatatattaataaagctgtttttcattaaaaccattccactctgagacatgtgtcctctagatttcctgttcctttgttctgtttaattttgtgaacaattttaaaataccaaaatattattcaaattaaatgcaagttgttcagtgaataattataggcagtatatcaatagcataccccaaaagtatttcttttgcatggtttctctgaagattcaagcccagaaaattctggaaagtatagtaattatgtgttgttattaaatgtgtgacagtaaagaaatagcttctttagagaagaataatttgataagtgaaccatggagtacgactatattaatgcaaattgaaagaagaatcttatattttttactctggttgcatttagcatttaattatttttctagcagataaatt

SEQ ID NO: 33035 - DNA, 783 bp, Bovine  19866881344510
  misc_feature (1)..(1): n is a, c, g, or t
ntgggcctggggaataattatgccaccatttggtgaattttcatctcagatgacatcaatctgagaattcaacctcaaggggcttttaataaagggtagtcatctccagttgctatgacagttagctgtagaaattttattaaaacagattagagtccaatgtaaactggttggaatatcagaaatttctggatttagcattgactgaggagttataaagcaatgtcatgtgaatatcagttatacaaacatgccatatttactttattactattgaggtttagaagacacactaaataaatatatttttccttgacccatgtaagacctattgtgtgataagcacaggaataagcagctagataccaaactatttttatttaaaaaaaaaaatttacagtataaacaagcacaaaattaaagggaataacactataaacctatgtactaggtcatccaacttcaacattcatcaattcttggcctcattggtttcattcatatacttctatatattttcctaccctcaactggattattttgaagcaaatcacagacttaaatatcacttcacccataaatatttaagtatatatcaataaaataaaagaagtatttataacaaaccataaagtcatcagggatttctctggtggctcagacagtaaagaatctgcctgtaatacaggagacctggattcaatccctgggtcaggaagatcgcctggagaagggaatggcaaaccattccaatattcttgcctagagaattccaggacagag

SEQ ID NO: 33036 - DNA, 1123 bp, Bovine  19866881376931
  misc_feature (1)..(1): n is a, c, g, or t
natagagtgaaacttaacgctttgaaattgtaacaaatagaaatgaaacttcactattcatcttctgtggatatcttctaatctagatacaacatctgacaccatcctattctgataacttctctttgatggttttccttctttcccaaacagtttgttacaatttgggatagctcataatatggatttagagatgcatcttcaccttcttcccagagagtattgttatcttttagcaactctttttgttggatacagcagaaggcaacttgccctatttttattttgaggtgaatccatttacaacagcctactagctatttgtagctgaaaagaataaaatcgaaggaacacacttataaaagaatttttccgtccccaagaaaaagaatcttacacctttactgtgtataacgccttctgggattgtgatacaacatcatttatatagacataggtgggtattctgtttctcttaagtctgtgtttatatagtatagacatgtacttctttcttctgtgaaggtagagaagggttgatacaatgcattggaataattctgatagttcaattggaatatttttgatagtttcggaatattaggagctgtagaaagaacttcggagaaggcaatggcaccccactccagtactcttgcctggaaaatcccatggacagaggagcctggtaggctgcagtccatggggtcgctaagactcggacacgactgagcgacttcactttcacttttcactttcatgcattggagaaggaaatggcaacccactccagtgttcttgcctggagaatcccagggtcggcagagcctggtgggctgccatctgtagggttgcacagagttggacacgactgaagcgacttagtggtagtaatagaaagaacttgaactatgtatgttagttgttctaaaaatcaccaggtagaaaacagggctaatcaaggggatcctcagagaatggttgatgcctgagatttgattcccaatctgcctcaagatttagttctaattaaactaacatgaacaataggacattatgaagtgaatagtatttgatcagggattaatggacaaagtacatgaaaagaaggggagaagtgaag

SEQ ID NO: 33037 - DNA, 1382 bp, Bovine  19866881423276
  misc_feature (1)..(1): n is a, c, g, or t
naactattaccgtgctactttgttatattcaggaggatttattccagttgctgtggttgttatttttaatacaaatagataatatccgacgtttgctttagaaaacaaatgattctaaatgctgttactatttaccaaactatgacccagaagcaaaagcaaaactaggttgaatttgcttcttattgactaacttacaaaatgttagcctttctttctgagctccttgaaagcaaaatgggtaccacacaaataggtgtaaagattgtcctgactgaaggcttgtaattaggctgtgaataaaaactaagtgagcacctttcctgggaaaatatgataagggtggcactgaaaatctggcatccttacagtaccattatcaggctctgaaaaatcttggctgaattgaagctgaaaaataatttaccacatcaccagttgaaacaggatgttcagctcatccaaagtctacttactctccatttgactctctccaagaggcttggaaatcactcacagtgagataactagtgatccaaagataggctgacaagcacaatgtagggaaggtagatgcctgtgccgattaagctccaggctatcatggttgagctgcacaaacctgaagagactaagaagataggaatgagctatatggaccaaaacttagtttatagtttagaagagagagagttcaaggtatgaaaaatcctaattaaagatattctctccatatatctcacatgctcacatctctttgacagttttgagatggaaatatcttttctcctaaaattcaatatgttaaaaaacatctgtagcacatttcccttggctgttgattattagaaatatctgttcatgattttttatgaatttcaaaacgttttatatctgtgttggacgatggacttaatactaacagaagtgaaagaatgttggagattaagtgttgaaacaagaagaaatagaattgaaacatttggtctttccttgaaaggctttctgaagaggttgatcaatggaaagatattcaaaatatggaaatcaatccagctgtcaggaaagtttcacccttgtcctttagaaaaggttaataagaatttattattaataggcctgaacttagagttccaaatgaaatgtgagtaatagtggcgagccaggtatatcatttgagaagtaaagtaatggcatgaggttatttccagggcagtaaatgactattacttcatcccaatgcaacacagaagtggaaaacacttccctcatgatgtataagacagtttctcaaacacagccctgaaacacccagcctctttgcattaccagtgagcatctagactcctaaagagcaatttaaccagcatcgaagacactcc

SEQ ID NO: 33038 - DNA, 1334 bp, Bovine  19866881470141
  misc_feature (1)..(1): n is a, c, g, or t
natactgcgtatgtgctgtacaataggattttgtttcttgttcagtttgcatctactaatccagaccctcagtccattcctcccccgtttttccttccccttggcgacctcgtctgttctctgtatctgagtctactccccatcagaatatcactcagttcattttccccagatttggaggtattcagagacaacttacagtttggcttttgagggataagactaagtccttcactataaaatacctgccactctgctccagatcctcatcttttttccccctctaggctgctgttttttgaggttcatggcattagattgcctagttgctgctcctgaatttttcctgggttttgctatttttatttcactgaattgaatgttgggaaaggaaattctgtgcatcagttttattacaccatcttagctcagaagtccccaatgatttttattaaccgcaaaaatatttctattcattgtgcagatatggaaatttgtaaatagaagattaggtgggatgtattaccatgtgaacaagtacttaattacattagagatgcaaatgttttttgagattatacttttgtaaacaagctgatcttgttataatggaggatttgtggtaactgcaatgtaaaggagcctcagaggaaaaattagcaaaactgagtatgcgaactatttattgcccgtgtgagtagtatgcataaaatccaatgaataccaaagaccgtgtgcaaaatcacaacacagtgcattctattacacagtctcattctcttcttttaaatatctagattgcttttcatttcttgtaagtgaactgaagaaatgtgtctcagactgacacacttctgaatgttttaaatctctaacgatcacaaacacacttggcagagaactaatttcacacctcaggcattaaaatccagagtctgtattcattgtttattttacataatgtaaaacagcatgaagcatgatatattacacaatgggtgaatgggaattttagaaagtagggcatcattttacatttacacctggtagatgacattttatatattagaaaatgtcctgatatatcaaacaaaatgttttttttttcaatcaactgaattttgtgttactgtatacattaaagaataaaagatttctattatttggttatattttcttagaatataatggtaattttatgagttactgtgacgtcagtgttaatacccaatagaccaggctttgttttgtagttttattgatagatttgcttatttttcagctgcgcagggtcttgttgatgtgtgggcttttctccagctgcaggagaggag

SEQ ID NO: 33039 - DNA, 929 bp, Bovine  19866881604076
  misc_feature (1)..(1): n is a, c, g, or t
natctgtctccttgaaaattcctcctgattgggacacagttcacagctaggggaaacaccacatttacaggcatcacaaaaccaaggttcagtggagttttcagaagctgaactcataatagagtcactctctccatcaactccataacaacctaaaaaaaaaaaaagacgtatgattagagtttactttttaaactcacatttataaagttacaaaagaaaaaggtaaaggaagcagagaataattctgaaaattaacggtttagaagaatgatattaaagtcaaaacacagaactgaaatcattttataaaaatgttttcaccatttcatagtgtatgcaatgacataactctttacaacaagtttaggtctactggaaagcattacagaaggggaaaattttacagttctttagaatttttttacaaaaaacacattaaaatatgagttttcactatacagaaatcagaactattgagtctaggaactattaattagtaaatattttcaagctaccctttgtactgagcatttaaatatatctaaaagaccatgatcatgtaaaacatacaaacaaaaacctatgatttaattttgtatgaatttggttaaaacacaaattcatacaaccataaatgcaaagtaagtactagtaaaaggaaaataataggcatacacatacataaattaaggctactgagcaatctgaatagtttagagataaacaagcgagttccattcacaattgagccagtctagagctatacaaggtagctgatctatttaacatttataattctactatcttctggaaaaatgtatccagaactgaaataatgaaaagaagggtagcataatccttcacattttagagtaggacatcaatccttattgggcttataataaacagtacttcccggttaatta

SEQ ID NO: 33040 - DNA, 881 bp, Bovine  19866880187012
  misc_feature (1)..(1): n is a, c, g, or t
naaacgagctatggattatttaaatgttgtcaatgaactcaactacatgactcagattgttatcatgctctatgaggaccctaacaaggtaacagagttcttgatttgcatgtgttgttcagtcgccaagtcgtctccgacgttttgaaacgccatgaactgcagaacaccagggcttcccctgtccttcactatctccctgagtttgctcaaacttgtgtccattgagtcggtgacgccatccaaccatctcatcttctgtcgtccccttctcctcctgccctcgatctttcccagcatcagggtcttttccactgagtcagtgcttcacatcaggtggccaaagtattggagcttcagcagcagtccttcctgtgattgttcagagttgatttcctttatgattaactggtttgatctcctttctgtccaagggactctcaagagtcctttccagcacaacagttcaaaagtgtccattattccatgctcagccttatttatggtccagctctcacatccatacatgactactggaaaaaccatagctttgagtatatagactttgtcggcaatgtggtatctctgctttttaatacaccatctaggtttgtcatagctattcttccaaggagcaagcatctttttaatttcacggctgcagtcactgtatgtgttgattttggagcacaagaaaatgaaatgacactgtttctactttttccccatccatttgccatgaagtgagagaaccgaatgtcatgatctttgttttttgaatgttgagttttaagacagcttttttactctcctcttctaccttcatcgagaggttctttagttcctcttcagtttcttccatctgcatgtctgaggttgtt

SEQ ID NO: 33041 - DNA, 5136 bp, Bovine  19866880428166
  misc_feature (1)..(1): n is a, c, g, or t
naaactaccccacgggcactcctgtgagtgaccctggcttgcagacggcagactgtgagacctctcagcctccataaacgtcagtcagttccttacttcacacacacacacacacacacacaccacacttattagttctattctgtggagaaccctagtacaagagtcaataataaacaaaattgtttgatttctcacaaatacgttaagttttcttgaccaaaagatgttcattctcatcagaatcgcttcttttcatctgattttccacatcacttccccattttagaccacactgttgtaatcttcccatcccttttgtttcaggctgcatttctacagtgcgcctcagtgctcttaaggctcttctggaaattccagtttattcatgctgctgctgctgctgctaagtcgcttcagttgtgtctgactctgtgtgaccccatagacggcagcccaccaggctcccccgtctctgggattctctaggcaagaacactggagtgggatgccatttccttctccactgcatgcaagtgaaaagtgaaaagtgaaagtgaagttgctcagtcatgtccgactcttagcgaccccatggactgcagcctaccaggctcctccatccatgggatttcccaggcaagagtaccggagtgggttgccattgccttctccgagtttattcatcagatcagatcagtcacttagtcgtgtccgactctttgtgaccccatgaatcgcagcacgccaggcctccctgtccatcaccaactcccagagttcactcagactcatgtccattgtgtcagtgatgccatccagccatctcatcctctgtcgtccccttctcctcctgcccccaatccctcccagcatcagagtcttttccaatgagtcaactctttgcatgagtactggaactccagtactccaaagtactggagtttcagctttagcatcattccttccaaagaaatcccagggctgatctccttcagaatggactggttggatctccttgcagtccaagggactctcaagagccttctccaataccacagttcaaaagcatcaattctttggtgctcagccttcttcacacccatccttaaaggaatgtcctctagagaagggtcaaggaacagaaagtttgacttaatcactttaaaaatgggtcgtatgtctaaaactcttaagagttcctgcacattttaaattaagagattttgagatgattaaagatagaatatagattccataaaaactttatatatttgatttattcatccatttgttgagtgtcagatcctagctaggtacttggagaaaacggagaagattaaatggttacacatgtaatccaagttcttacagtttaatgacatagacaaatataaacattatgatatatgatgtcattgttgttcagttccttttggcccaattctttgcgacttcatgggttgtagccagattctggtcctccactatctcccagagtttgcgtcagattcatgacacaagatacagtgggtctaataagcaagctatagaggagagctgttttctggttagtaggacttgggaaagcttaatggaagtgacttttgagtaaaggttgaattaagaatcgtaggacagtgggaaagaattacaggccgatgctgtggcaaagcacagatggtagggagggggggtgggtattgtggtctgatttaaccaaagcatagggtattgtgagaatttactgacagagtgcctgctatgtgcgtgtattgctgctaatgtgcaaacactattagacaggcatcaccattcccttaacagatggaaagatcttcatctcagagaagttacgtaactgtccatggttacgtagctgaaggtggtgatgttgggagtcacatgcaggtctagatgactcaagagcctgtgttctttctgctctactgctactgtccttaagtgtgtgtgtaggggagaaaaagtggaactgtatttcattcatgaggtaatagaggggcggcataggcgaggaaaagaaaatgctctggttgaagaggccttcttgatagcatatttttctggtaaggcatgctcatatatagatgatattataaaaatggtggtgatgacaacatgtaggtgtcatttgctgaatgccaaaaataggccccaaattatatcatcagtgatgctcagaactataggtatcacggtcgtgtgatttgttacctgacgtagtggaaagagcggaggtacagagcccaaaagaactcggttccagttctgcttttattcttttctagttattgaattccaggcagattatttattatttatgaaccttgatatcctcatctgtaaagtaagtatatatgcatatatcatggagttgtgaatgttagaaaaaatttttttaaattctagagcattttataacagaagcagaagagttagataacaaaagtaaaaattctgctgtagaagcaagagtatctctgagcatgtctaaatgaaaaacataatagtatgacaaaaatatggatagtcatagcaccaaaatttaatctaccttaataaaggctgctcttttaattacaaaaagaattatttactggagtaggcaactaaggatatgactatgaatttaagtatattccgaaaactgagaggatttacattcatgcatatgacagcaaaatacacctaaacattattgttgtagaacctcatgagaaatacaactcattcttactaggttgaaatatgcttttacatccattgtattcatgcttctctgtctagattttttaatgacagtttttaattcttttcaagaagaaattcagtacatcagaaataggtcatgctgtgcatgggtttcttttcctagcttgatgtgtgctcacatagtagactgagaattgaatcttctcagaatgaaaaatggatgcttctgacattcatatcaagcatcagaaaattataaacatttattgaatgtattgctgcaattgttttgaatgtaatagtcttgcaaaaaatgcctgtctagaaggctttgtttttgttaatggactcttctaattgagactcttgtctggaaacctcccaaaaggaaatcctataattggagaaagcagggagagcatatacagcattccagataatttaaccttcttgaaaccttagtgcctggtgttttaattgatatcttaccccatgtcagaacactggtccttgattaatgtatctaaagaaatatttggaacaacttttaagcatatacaattagtagagtctttaggatgtatttatgttccttttgtaaagtgtaactattactggaaaatattgtgaaggaccccattgaactatcaatagtcgtacaatagtctatcaatagtctagatttgtaagcagaaaaaataatccccaactgggaaaatattttctccaatgggttcttttcagggtactgaggcagagtgctgaaaaataagtcatcctgcaaaatattttgtcaatatttgcctagagtaagctgtgtacaaggtatagttttaaaagtggagtaaatgcttgcaatgaactgattagtctatccacgccttgcaatctaaattggagtaatatacttcaacatagaaatatgaaaacactataataccaggtattcccaagtcttaacaaaatctatgcatcataacttaagaatttacattactttagacatttgtcctgtgcaagtggccataaatttaaatgcataaaatgtgcaaaatggctgctatgacattataagaataatgctttcatgaaatcctaataatagcagagtgctcaaaagtattagactagactcagaagttggaataatatgcagccattaaaaatggagtttttgaagaatagttaaagatattagaaaattcttggaatttgatgtaagaattataattacaattatgtttataatatctatccagatataaaaatatcaacatatcaagcattaaaattattggaaggaaatacatcaaatataactgatttttgggggcattgggattttgagtgatttgttttcttccttgttaattgattcatgtcacaggcctttgttaaaacctaatgtgtggtaggcactatactagagagctgttcattcaacagtgagcaaacataaaatagcctctgtcatcattatgcttctaacgtagtggagaagacatattaatttttaaaaaacatgaataagtataaaactacaactgggataagtgctaagaaggaaggagactgagagcccccatgacagggagccctagcataatgtggggtttaattcatggaagaattgacaagtgcatgaaagcctgatgcgtgggtaggagattttagcaggtgcgtggggaggaggacccgggagcatccttcacagagaaacagcacttcagaagccctgtcgtaggatggagcagttgaagacgggggatgagtgtggtgttatgggaagaggggttagggaacatagtatagtatttgtgttttaaaattttcatcctcttctgcagtgcagaaaagagattagaaggaggagaagcacagtcagagaacctagccagggcattatggcagtagaataggtcagtggtgatggtactttggattaaggagatgaaggtggagacatagcatcaaagggatggaatcaaaacatatttagggggtaaccatgaaacggacttgatgatggcttatacatggagatgaaggagcagggaagactgaagaggactcctaggtttccagtctgagcaactatttggaaggtggtgccagtcatttcagcgagtgaccccgaggtcctgaggaattctgtaggtggtcggtggagctcatttcaagttgctgctatgaatccatggtgacgttcctcggccctgacggcggactttttccaaaagccgggctcggtcactcacggaagggagagagaaaacccccagaggtgggatttggctccaccagtgagaagcaagtgaatttagaacatgggcgggaatttttcagtgatgatggaccgagaaactgatgctgaatgcatatattaaaaaagagagagagaga

SEQ ID NO: 33042 - DNA, 1410 bp, Bovine  19866880454812
  misc_feature (1)..(1): n is a, c, g, or t
ncagaatgggtcccatggcaggaagagatttattaaagatagcataaaaggttcaacaacacactgtataaagaaagcaatatagtaatattttatgtctagaatcattttgacatttccatcctgtcttagtcaactcaggttgctctaacaaaacaccataaactgggcagcttaaataatagacatttatttcttaaagttttggaggctgataaatcaaaaatcaagttgctgacaaatttgattcgtggtgagaactctcttgctaacttgtagaaggttgccttttcacttagttctcacaaggcaaagagaaagagctctggtctctttaggacactaatgccactgtgaggatcacaccctcatgacctcatctaaatataattacttcccaaaggccccacctccaaatacaatcacattaagggctaaggcatcaacacataagttctgaggggagataaacagttagtctgtaacattcttctagccctaagccagaactgcattattttataacataaatttaactccatacaacttaagtgtgcatgtaacacttatatatttgtaagaatatacatggaaaacaatatttggatttaaaagcaattcgttattttagataatttaaatactcaggactttgaaataaaacttcttttgtcaaaggaatgtcaatgtcaacagatgtttacaacatttgtaagttcaccctgccccttcctccaccaaaaaaagtaagctcctgagcagggctatgcatccacaacacattttattctccagttctcatcagtgtagtctgaaaactttcagcaagaatatacagaagtctaaatttttaatgtatcacattaggggagaataaagtaaccaagatccagataattttggactttatagtctacagtcaacaccttaaatttcatctggaaccagaccagattacagaacactgacgcaatatccaatggaaacattatcacagcttgattatggaataatatgctgcatttctcatgttgctttcattaaaataccatcatatccacaaaacttttgaacagaacatctctggggagaacagtccaaaattatcatcttattaaaatataacttctacttttgttgctttttcttgttttctttcaagttttaaactatgtcgaatggccaggggaatacagattatgcctgatatagaacaggcctggcccttgctgttacacacagggccaggagtgtattttctacacttcttcaaaacagaaactcttcatccagtacctggtccaccctaataccagggcatcagcttcccagttagggtggagacaaacatttcacattttaggcctacccacctcattcactgtaagtctgctttttttttaatcttct

SEQ ID NO: 33043 - DNA, 1726 bp, Bovine  19866880468390
  misc_feature (1)..(1): n is a, c, g, or t
nataatataaatcatgcctaatagtttataaaacatgttttcttcttcctcaattcatatgggttattatgtatttcatactcttttctattattcggaaggaaatgtttaggtacaccattgcaaaacttttataaaccaagatggttccagcaaaagaacatttcctttttggtactggttctgacaatttttagcaagcctctgctaataaaaagcaagctctgaaatggactatttgctgtacagaaacacgtcagtgttgacttttccagcaatgtcacggagcacttatttcctctccatagcaacagtaatgacatcagcaagggaagggaaaaaaaaaagaaaaatcttttccaaacagggatgtggtttctctaagctctgaaaatggagagcccctgagagaccacaggaatggtcatgggaagctctgtttatgctttgaaaataatttggcttttcaccctccgaatctgatacctgtcagggtaaatgcgtctcccatgaaatataagcaaacggtgacgtgcaatcccaaacagacacctgtttcctgcacgtatcttcatgtgtcaaaacaccattgctaagaattatattttagcagcttaggagttggtcagaaaattatgtgctataaaaggaagggctggagccaaagtaataaggtggagcctctcactatagtatctgccctcccccattcaaaatgaggaaaagggtatatagactaagacagagaaatgaggggaaaggaatttaagatgtggccctggttcagaaaaccctgaaatcatggtgcagagcaggaaagtgaaatgaaaccttcccaaattagggaaaggaaaaaactgcatagatgtatataataataaatgaaacttgaaattaacccatggaaggatccttctatattttgtcctcttgggaatgtcatgcccatgttcatctctaaacacgtgtgattttgtgaaaccgcctcatccgttcaccaaatatagctcatttgaggcactgactctatgatacagtattgagctgattaaataagaatcatcacaaagaaaatttcattgaacagctgaaggaaaagaaaagccatactttctttccatcaataattgaacttgtagtcaaaggaactttgagctccaatccgagaaactataatatcttaaacatgttaggattcaaatgatccttagtatcagccaacacagtttgcctatattattcaatattcatcttttttctactcaaaagatctgactttaaaccaagttgctttctacgttcctaaggaagaattgtaacacatccaccttcttttccatagagaataacatatgcaattcgactctgtcaacctcctcctcctccacggtggaggaggaccgtgttctgactgctcctctggccccaccaaatggccctttcaacagtccttatcgccactgttgattccctgaatgatgacggctggtatcaccctagatccccaaactacagggctacttttctctcctcttcatgcataataaggtgcgtacatgacaattacttcttttacaccagctagctttaattctgacagcgtgtggttagcctgaaaatagtaggtcctcagtaagtatctgttgaatgaagaataagtcatttgtcttaacagatgcctataatttattacagggtggcataacctgttaccccatacattata

SEQ ID NO: 33044 - DNA, 1909 bp, Bovine  19866880533843
  misc_feature (1)..(1): n is a, c, g, or t
ntggtctggtattcccatctctttagaattttcccagtttattgtgatccacacagtcaaaggctttggcatagtcaagaaagcagaaatagatgtttttctggaactctcttgctttttccgtgatccggcggatgttggcaatttgatatctggttccgctgccttttctaaaaccagcttgaacatcaggaagttcacggttcacatattgctgaagcctggcttggagaattttgagcattactttactagcatgtgagatgagtacagttgtgcggtagtttgagcattctttggcattgcctttctttgggattggaatgaaaactgaccttttccagtcctgtggccactgctgagttttccaaatttgctggcattttgcgtgcagcactttcacagcatcacctttcaggatttgaaatagctcaactggaattccatcacctccactagctttgtttgtagtgatgctttctaaggcccacttgacttcacattccaggattaaattaaagaattaactttaattaattaaattaaattaaattccaggattaaagaatgaactatgatgactacaacagcatgtgtgcatctaaaatgcatttcattaatgaaagaactcagacacagaagacatatgtacaatttcttttatatgatatttttgtaaatacaaacctatagagacagaaaataaatcagtggttgccagggactggggttgggtaaattttcagttacagaggagatacaggaatttaagggatgagagtgctagaactatttccatatcttgactgtggtgacatttacaagatttatgcatttcttaaaatccaaaggactttacactaaaatggttaaattttttctatgtacattatatctaagaaatttttggaaaaagaaaagataaagatggcttaggaaataaaggaaagataaacattgaataggtaaaatactgaatatgttgtcctaaaaagccaacccaagatatagatcacacaagtccctaaaataaaaaaaacaaaccaagagactggaacaaatctaaaaactaatattcaagaaaacttccttgaattacagatttgaaactgcatttaaaacagcacatatgtacttgacaatttaaactaagaactactatctaaagcacactctagtaaaattaccaaactttaaaggaaaaaaccctttgtgcagtttttttttaaaggaaaacattcattttatatgaaaaataaaattagattatcatcaggctttgatggcaatgctttatgccagaagaaaatggaataatatatttgagaatctcagtgacataatatgtgaatcaaggatttcatatccagcaaaactgactttcaaatataaacagtgtaagacaaactattatcaacattaaagaattcaggaatgttctcatgagcacttccttaagaatctaccaggcaaagaatactgacaatcaaaatgagaaacagcaacataagcactgacagtgagcattaagtttataattacatttagaaccaaaaaaaatggattactaagttaaaaggaaaatatagtatgtaattgttatatactcagaccttgtaattcaactaccagaaaatgagcaaggaatgaggatggcatatgcaaaaatcacacataaatgtgacccataagcatattgatagtcattatattagtattgtcattctaagactactatatgtataatttcttaataaagaaaacaagaaattatagcataaatctaattctgcaaacccctatgttcttgaggaagggttaagtaaaatcctgccatacttaaactgatttgaaaatatcagtataaatccctaagatacattatcttggatatgtatacatttaacat

SEQ ID NO: 33045 - DNA, 1294 bp, Bovine  19866880553800
  misc_feature (1)..(1): n is a, c, g, or t
ngaccagttactagggaagaaaggagaataatttgtggggaaagagaaatacaacaaaactttccagtttccgtggagcactggggcccactgccatgatgtggaagcattttgtgaatctgcaaagatcttcaagactaactgcagtttaccatgtttttcttaatgattttcaaaacaattttgaattgttttgaaatttcaaatgcttgaggcttagcttagcatgcatttctggacttttaaaattaggtctgtatatatcagtctaatgggttgatggaacttttatgacttgttttaagatttaggcaaaggaaaaagtactttatccttttatttggtagtcattttcttgatggagaatgaggtgaatacaagggaaatgtttactgctagggtattttgaatatttttgaacttctttgtaatactgggctttgaagacttagattccactgtaagagttagatcttgacattttctttatccagtgtaaaaataaacttcatgaaataaagaaaagttaagattttatgttgttttagaagaaatgtatgcatttttcacttaattttatctgctgataatttggttactaagaggtccataaattctccttttataaactggaaaattatattgccagtgagtcttctctgtggaagtcttgggcatttattctctagaagttcttggtgatctggtatattcatttgaatatatgaatatatatgaaatatattaaaattataggatgatttactgagggaaatatatgtggaacaacatccaaaggttttataatctctacctcttcagtgagaaatatggtttaacatcctgcacctggataattttgtttcctgtatcaatcagacatgtctcatcttgtttccactctcattgttttttgttttttttcaaagttttgagcttttaatgcaactgagaaacatttcatagaatttttaacttaatatgccttaacacatcaccactttcattgttttcctctgggatgcatctaaaccctccctgacttgtctcttcacctgtgttctcaaatgccacacccagctcactgctcatttcaggagaaggccagctgcgctttggtgaagacttggccctgagtctggtttttgcaaataacattgtgattatggtgaattactttgctaatagtctctacatgtctcagagagtttgtgatggggagaggagataagaataccctgaggtgcttttcaggataaagtaccatgtagaagtcaaagcatgatttctgaag

SEQ ID NO: 33046 - DNA, 1129 bp, Bovine  19866880566817
  misc_feature (1)..(1): n is a, c, g, or t
nattacaagtgccaagctaaacagtgcgtgcaaagagattttaaagtcattctagcagaattaccctaatcaacaaaagccaactacagctcaatcaaagtcttgagaagaaaagcttgtgtgggagttaaataaattacagcggtaaggtcaggcttttataagatgctctagattctatcaccttgctctaattcttgcctatttcagcagtcacttttgtgtgtgtgtgtgactgctgaaataacaagtcatttaaaaaaatcccaggatggttacaaaagtactgttaacaacactgtgcatccacatatagcccatagcactgaggacattggaataaacttggaactctgcaattgaaaagttatttttaaatctaaaccaggcgataattttaaaaaagggtgggagggggtaagtgtaactgaagcaacttagatttgttttctgtttccatattgtttgccttgctcctttcctttctgacactaccagtgtcatatgggtttgaacaaatctagaccaattattggagaaggcaatggcaccccactccagtactcttgcctggaaaatcccatggacggaggagcctggtaggctgcagtccatgaggtcgctggaagtcagacacgactgagcgacttcactttcacttttcactctcatgcattggagaaggaaatggcaaccccctccagtgttcttgcctggagaatcccagggacgggggagtctgggtgggcttccgtctatggggtcgcacaagagtcggacaatgactgaaagcgacttagcagcagcagcagcagccttagaatatagtttaaaatcaggaattgtgaaacctccaactgtgtcctttctcagaattcctttggctatttaggaacttttatggttcataagaattttaggattgatttttttctatgcctattcaaatataattatcagttcagtcactcagtagtgtctgactttttgtgaccccatggaccacagcatgccaggcctccctgttcatcactaactcctggtgcgtatccaaactcatgtccattgagttggtgatgccgtccaaccatctcattctccatcgtccccttcttctcctgccttcaat

SEQ ID NO: 33047 - DNA, 3713 bp, Bovine  19866880629318
  misc_feature (1)..(1): n is a, c, g, or t
naatcatcatagtatttcattgaattcttgacaaaactgaagccattgacatcacacacaaaggagtgaccattggcacggaggagatcaaaaccacaaactgtttgctgcaaggggaagaagggaagatgagaacaagagggccacgcttccttctcagcttcaccccaccaacctctccctcatgccacagcccctcccctgcacccctcctgctcctgcacaacctcccctaccaaggggcctcccttcaccttaaaagctacgcagactttcctggccaccagcttttccatggcggtcagcatgactggatatcgaatctcttttccctcactgtctcgttcaaccttcccatccaaagctggagattttctggcttcagcatgggcatagtctggccccactgtgtacacctgcaggtacatagcatcactgagtatgcccacagctcaccctgtatatgagaaggcaatatgagcgtcatgtctgtaggctagtttcccaggaaacataaacaaaacaaacaaatcccctgagtattaagaacaagaagactgacttttttttttttttaactgagatggaacttcagtatcattatgaaagtttctccatgggactctaaaactattgcctagtccttactaagaaataacttaccaacgttattccatttttcacattacccttgccctcactctgatagtgacaatataaatacctacttccccaatccttgtcttcacctgcatatgaaagccaatcccattcacactttattttctataactgcttccctacacttctacttgcttcacaagcaccccaccccactcagacatttataacctcttaaatccccatatccaccataaccttgacatctgtgccatctgttggcataaactcctcatagatgtatgagcctgtctttcggacgctgctctctggagagtaaacactgcttcggctgccaatcttcaggagaaaaaggaaggggaaggaaaaaaaaaaggttgcctctaacttgtccccaagtcttccagcttcccttcccacaacttcattcttgctcatctacttttctgcctccccggatatctcccacaccttacggaagaggcgctggcttcctcctccagctgagctggggtagtagatgtaaacgttgtggtcctctgcactcacgggcttctccacaaagggcttggggaagacggctccatttacctccacctggtcttcaccctctatcaggttgcactctgaaaggtcggtgtgtggtcattcctagggcccaagaatgcttccaactcccaacttctctgagttttaatctccatcaccctcaaatttctatgaccatactttaataatagatatggtaactaacatctgtatacgaggtctcagattctgtccaaagacccatggctctagctctacccgtagtccagtaaccaaagcctcacagagacaggcggcacatagctgtctcaagaatggagaactgggctcagtcacagaaagcggggcagcgtaggactggacaaggccaggtactcaccctcaggccgggcagggtcacggttgagcacagcgtatcgaggcaggtcaataccctcctcctgcaggatccggtacacctccctcctgttacccccgaataaattagctgagagaggtgggggcaggtgacaaggggagaggctagggatttcattcactcaggaattgggagacacccgtgtatagaactcaagagggtttggtataacaattcggcatgtttgtttgactctgcccctcccagagtgggttctctaaaacaggcgtgatctcggggctgcccatccccccagtcaacagaaagctgtacctatcctggatgtaatactgcatagccaggtcattgataagaaaagggtttcgaagcttggagtaagcaacagctttgtccaggggaaagcctgggatggagagaggaaatagagaggtggaagaaagaaggagagaaccagtgagaaaacagcaagagaaacagagaaatgtgttaaagctattcgttgccactgagctccacaacccgtccaacccagcactcatcctcctgcccaacttcgcaagtctagaaaatccatcaggaaaaaagcaaaacagaaactacttgtagggtccttccagagaccgattttgtcagagatccgaagaaacttacagagctttcctgaggtttgaatatgggctttacactaaccccagcaacttctccaagatgtaggaaaagcaaatccctttgcactgttctctagtgtcgggaagagaggacgacttctttactatttgacagtaagagcctcatttcccagtccagcattcccaacaccactccttcccattttccttcacagacaccaacctttggagtggaaggagatgaggcagtggcaggatggccagttttccacaggttcattgaggatcacgtcttctcccaggatgataacagtcaggtagtcaaacctgcagagtcgctctaggatctgggtcattggcttggacttggatttcttggtcatggcacagatgccaacaatgatctgaggttcaggaggctaccaggaggaagtgccatcaggaacttaggaacttctcacctgaaccgcctttagcagggaacactgcctcatcatctccttagggcagagtttcttgtcaggactttggacttagggggtcaaggttgtctcctaactcaggcctagactggggttcctgcagggattcctcctgccacagtgcaatacgtatactcaggcagaagagtcagagaaccaataatcatgagacaacaggaggcggacacaagcagaggggcttcagggagcggcagtctaaccagtctccactgcccttccctttcatcaagagggcctgtttgtgacagggagtctaagcatttgggaagattgggaggaggtgtcttaatcctatggaatctccactatggcgggggtcccaacaccaagtgacatcatgccccctaatcttaccacttcatcctcctcatcctcaaggagctcgctgtcactctcttctggcctcatgccgagtccacgggtgcccagcccctcatctccagctccgaggaagaagtgggctgtggcactctcgccctcactggccggcagtgaccacatccccgccggagcacccactcatcccgccctgaaatggaggggatcccctttagctcagaatccaagtcccacagtagagggtgggggtgggggatggggaatgagaaaataagagggaactacaaggggaaacaggaaacaaagctacagtgacaaggatcaacagggaaggaggcacatgggctgtgactggcaatgactaaagatccccaagagaaaatcaaggtttccctttttttccctgctcaccccacccccaaccaggagcctgggatgagaattactggattaacccttaccgtgctggcatgtccctgattctgccagcaagaaaaatcattaactccagcagcaaatgcgaaaggcagttcttcatggagggccactgttgattcctaccataagaaaagaaggttagaatgacatttcaagttcagattcactcgaaatcttcccagccctcctctacctcccaacggcaaaaagcagagacatcgcttgcccacaaag

SEQ ID NO: 33048 - DNA, 946 bp, Bovine  19866880680304
  misc_feature (1)..(1): n is a, c, g, or t
ntgggtagacatggagatgatgacgagccagaaccccacctacagcacaatctgggcttcctccccacatccctaaagtagatgctgacattgaaaggaatctatgcaagtgagggccctgaaacttaagctttgtgggcttcatcttaaattcactttttaaatcaggtactacatatattttaagaattaaagtttaaatggttgcttaaattagtttgagatataggattacaaataacacatgataaatattatttccaagttagggctttgtaaaatttgaatcacatgcattcagtctaagaagatatgattagatttggcattaaccagtgaaatctactacagaaataattaagatcacttcccttactaataaataaccaagggcaaatgttataccatgacacgtaggaatttgcatatatgctttaaatacggcactagttttatttaacactgaataaacatcaatcagaatgcctgtgtacaaaacaaggaaatgcccatttgcaaataaccttttccctctttcaaaaaaaatgacctatgtaccataaatgtgatcacacagtaagaaaataaggattaagaataacaaaatagcatctaaagtactgtcttaccgtagttcacttaagcatgtaaggtgcacaatgcagttcctaagaataaactagtagaataaaatctgttttatgctttaaaaaaaaaaatggcattccaagatacagctgcatagactatatgatgaatattcaacatatgagaaactgacaaatttatcttcactccatcattaagcatttttgtgacaagctgggtattcatcgcattaggggtcttttttgtgtgtattctttttgtttaatgcttgctcatgccctttcctgacatcctgcaagactagtcttttcttttcttttccaaatttctgattgct

SEQ ID NO: 33049 - DNA, 1409 bp, Bovine  19866880694854
  misc_feature (1)..(1): n is a, c, g, or t
ntgatatattcaagcaaaatcataaatacaaggaatctgttttcggggcttcccctcccttttccaaccattgccacttttcaaaccttttggagtgccacaagcacagcacagtccctactcagtcaacagagctccactccatcaagccctttcagtaaacgttaataaccctatggtccaccaaatcatttactatcagaccagagtgcaaaatggcatcatctttccaagcacatcctgacagtcactgctaagtcccttcagtcgtgtccaactctgtgcgaccccatagacgacagcccaccagggctccccccgtccctgggattctccaggcaagaacactggagtgggttgccatttccttctccaatgcatgaaagtgaaaagtgaaagtgaagtcgctcagtcatgtctgactcctagcgaccccatggactgcagcctaccaggctcctccgtccgtgggattttgccaggcaagagtactggagtggggtgccattgccttcaccgtgacagtcactaaactagtcttttcccagaagccaagaattcatatacatataaattgttctttggagttattcaaggtactatttgcccttttatttcactgagctataattttcataagcttactttctagcatggaatggcgactcctcgtttgttttcttcactagttaaaaacagaaaaggaactctccaaaactcaccatgaaacctcattagtatttgcaaactttattcacacatcatttaatttagtcatatattttgttggagcataaaatgcttccaaaggcttttggtattttggtcacattatattaggtgtctgttgccatacaacaaactgcccaaagcttaatatcttaaaacaacaataatttagtatttctaatgatcctctggttggatgagcagtccttgtctgctttgcctggcctcactcgtgtgagtttgtcacactctaaaggtggccaggctggaggatccacatggccttacatgtctgggagtggttgctgaccatcaaggggtcttgattctccccagcatgacctctccttctccagtagacaagattggctagactcctttcatgccagtctcaatagagaggataaaagcagatgcatcaaggccagaatttgcaaaatttcacatccacttcattttattcactgaaaggagtcacaaggccacctctagtggtatagctcctcttgatcaagagactttataaactaaaagaaaaaagttacctgtctgtccagattcaaatcagcagagaaacagactccaactttgaatgggaggaatacatataccaggttgaaaagaatttgcaatcatctgaaaacattctgcaatccaccccacatgttgactcactcgta

SEQ ID NO: 33050 - DNA, 1487 bp, Bovine  19866880735821
  misc_feature (1)..(1): n is a, c, g, or t
ngtatattgtaatttaaatctagctattttaaattcgtcttataggggaaaagtttccccagccagagcttaaaattcaggacaaggtaggaaaggagcccagaaaaatgaagctttactggagtaatttttagttctttggggtttgtaatttacttgtctcctttctagttattattatgtaatatttgcattaaagaaaataaaaactcttgttttcttttgagcacaaaaataaaaggaagggagacaccccacccttctatgtttccagtttccctcacaggtcagtttgactttcagatgaagccttattacacaaaaggagaaaattagcgtcagcctctgggcatcagccttaggttagctgttctcctcattgtagagaatggatccgaagcagctgggcagcacccaggggcaattcccaccggacttgagagcttgaacttgcaactccgccgtgggtttcctgaccacctctgagcgtttggcagtcacgttcctttctgccttctgtagtcctctgacctgcctgccactacacagcatcctcttctgactcagtctgtacactagaacagacatggctgatgggatttaactgagagaagctgtctggacaatattaagaattgtgaggccaaagttgtgaaacacctccagtagcctgtcctgcactacagtgaagaaaagaccatgggtgaaaactggttgcattaagtcattgtcttacaatgaacagtattcttggtttttagtgtttctttttcctctgttcttcattatttctctcttgatgaaaatctagaagcatggtgatcttgctattgaagaagggaaatcaagaaatatccaaattctggactagtatgtgttttttatttagaaacacttaggcaatgtgtataaaatgccaagatttggaaaaagagcagcaaaagagattaaaatggtatgccctttcccttccccaaactgaggaagaactattacttctttcaccaatagagaagctaatggcaaagaaaatttagtgattattagaaaggaaggtcaccaggcccttgttttgttttcttagctgtgtcatattgtttttttcctctttcttttttggaagttcaggattggtatcatgtaggatgctatttgtcaaattcttaagttgtatttggacttccctggtagctcagatggtgaagcgtctgcctacaatgtgggagacctgggttcaatccctgggtcaggaaggtctcctggagaagaaatggcaacccactgcaggattcctgcctggaaaatcccatggacagaggagcctggtaggctacagtccatggggttgcaaagagtcggacacgactgagcgacttcacttttcacttcacttaagttgtatttatttatataattcaccccttactttattagcaaggctcaattatacaaataagtagaataccaaaaatggctcttgtaaacag

SEQ ID NO: 33051 - DNA, 1502 bp, Bovine  19866880760593
  misc_feature (1)..(1): n is a, c, g, or t
naagttaacacagcagaactaaggctgctatcctgtgaaagtcctgcttacaaagttggcccttggctgatgactaggaacctggattctgtgagggtttctaccattccctaacggattaaggatggctcatggtgcctaaactgttttacaaagaaggtggtttatgctgaaaacttctttagagactctagaattttgggtgccaatgtgatcggcttccatttaaaatcccaggcaccaagtctgtaataagcttcccaagtagacaacaatttacatgtgttgctacaactcttcactgggagaattaaccatgtcctgtgagactccactgggagagaatgtcttacaagtttgttcctggttttcccctggacttatccccatgagccttttctctgttaatcttgctttgtatcctttaattatataaatcttaggcatgagtatgtccatctgcagagtcctcctagtgaattattaatataaaacctggagatcaccttaggaaccccctgacccaagccctaactatttaataagtataactttaggtatttcttctggattgagatatcaaaggtgctgtgaacttagtctggttatttataccagtcttttgtcaattgtaaaaatttaataatatacctctaaatatagtagtatattcctttgttagattttttgtatatattactgtctgcttattctttaaggttaactttaatttggataaaaaggccagggcaagggaaaatgcttcctcctatttaatgctgattagaaatccattaatcatataaattaattttgattttagaaaaattgatattataatattgaatattctcattcatgaaatgatgtataatacttctccatttagtcaattctccctctacatgtcaatcacagaatttttaagctagtagcaaaaaaagactatttggtcccatctcattttagtttgaagaaaactaaagataagtttcaattatttagtggcatagtaagtactgatactaaaatactggtctcttaatttccagttcaactacttttgtactatacaatattaaacctttatacctgtaggaatttatctaaacttattaagcatcatataataagctgtgttgtacactgaaaagtgagtaaaatatgctcctagatctaagtagtttatttgtcttacctgatgaatgaattcatctctttggtccattattattttctgaggaggcccatataagaaaaatatgttgataatagctttagaaatttctgatgctgaaacatcacaaagaggcaaaatcacaacccattttgtgaacaaatctgtcatgattatagcatatacatgacttctgttgcttgtatgaaatgggcccatcagatcaacagtaactatactccatggattctccactttgagaaggtgctgtttaggtgctagaataactgtattttttgccacttggcaatgctgacaagcatat

SEQ ID NO: 33052 - DNA, 1871 bp, Bovine  19866880782991
  misc_feature (1)..(1): n is a, c, g, or t
ncaagggactctccaagagtcttctcccaacaccacagttcaaaagcatcaattcttcagcgctcagctttcttcacagtgcaactctcatatccatgcatgaccactggaaaaaccatggccatagccttctagtcaaggacctttgttggcaatgtaatatctctgctttttaatatgctgtctaggttggtcataactttccttccaaggagtaagcatcttttaatttcatggctgcaatcacccatctacagtgattttggagccccccaaaataaagtctgacactgtttccactgtttttccatctatttgccatgaagtgatgggaccagatgccatgatcttcgctttctgaatgttgagctttaagccaactttttcactctcctttttcactttcatcaagaggcattttagttcctttgtgctttataggtcataaaaaacttttttgttactatgataacagtggcaagtatgtaaagatagcaaaaatatacaaatttgattagatgtcaaccttctttttttaaccaaaagttaagcactgagcaaatccttcatttaaaaatattcttcctttctgtgaggagattttccagtgaaggttgtcaatttcctctgacaatcccctcaagttagtaatttgtctcgcttggactttgttagggacaagctgctggaatgttggagatgagaggtgaagaataagagaggtgatctggcttgttatttgttttatcccttggccatattagaattaatgtgtatgtgtttgtaggggtggagatgaaagtgtcccaggaaaagtggggaaaggatagatctttagaacttaattgggaaaattttgcaaattttttcatttgatctttctgacagttcagagtatttaatagccatcatatcatttgtgtgtttggtgggacatgatattctcttatttcattaaaagaatctaatctgatatagaagtgttccaccattcccaaaagataataaagatggagggaagagtcagattcattaaatggaacattttctacaagctcaggctatatttcttgtatgtggctctttcagttcctgtagttgtgtaataaaacatcctgaaaattaatagcacaaaacatcatttattatattcacagttttatgggcttgtctctgctccacagtgtccatggcctaagctagaaagtttgaaggctggggctggattatttgaagggttctttgggtgcctccctctgcctctgtggtctctctatgtgaacttgccaaatttggggcaagaccctggtgtaactgatgtcttataaattggcagagggccgctcccaaggctcatgcccagaaacagacggaaagccagtgaaagccacactgcctctttagacctagtcttagaagtcacgcagcatctcttctcgtgttgtcctccaaggtgatcacagtgtcccacccagtttctggaggagtgaaaatagaccacaccttttggtgggagagaggcaaggatctgggaagctaagtgggaccagaaattttatcatgaccattttttggaaaatcctaccagtgcctgtcctaaaatttcaacttaaactctgatttaggaataatattttacttaaattgcagtgctaagtcatgggttgagaatctaagtctatttcagatattactattctagctttattgttactttttgagggaactggaatttaaaaattttttccttggtgagttgccccaggattgctcatatgcttgagagcaagaaacaaaattaaatggacattcttaaacaagtatatgctcctggaataatttccccagaagtaatgaccattttgaaataa

SEQ ID NO: 33053 - DNA, 1594 bp, Bovine  19866880851938
  misc_feature (1)..(1): n is a, c, g, or t
ngaattgaaatacaattacgttgctgtcctcatgtttccctgtttgtcctttaaagaaaaatatgcatttcagcacacactgttccacaaacagagacagtatatcctttgcctaaaaggtttcagacctaaggctgtctttacaaatggagtccaaattctcataaagagatatgacatccttctaaacactgttgacccatttttcagccattgactccctcaccccattccatgccacccctccccgtaaagtagcagtacatagaccacagttctgagctgactcactggattgacccatgatctccacttccacagggccacactgaataatgaccataagctgttgaatgcttagagctcgtgggccaccctcttagaatgccttcacattttgaccctcaaactgggtgatatgcttacaaattgtcaactgtgttaattcccccaggaacttatattgtgacgatgatgatgatgaattttgctcatttcactgttaaattgtaaccctacttttaatacattatttctattcctctgactaaccgtccgattagcttaaatatatgaatcttgtaacttctggggaagccagatgtgacctgcggcagtagtgagctgttttagaaaacttagagaactaaggtaattaagttagacgatacatctattttttttgagattccgttaggaaaaaaactggcagaaatatgaaaaactcaacttgtcatacacaagaaaaatatagtttattgacttgtgctgtgagttttctgttccctttcctgtttccaaccccaaggctctgtcaggttgctgttgaagatgcattcccccactccgagtgaaactagtaagataaaagaataatcaattaccttttgaattcttggtttgaagttgcgcagaggcaaaaagttctatttccagactgaggcacacagttaaacacaaatggttttcccaagctgctatcaatgccaacttctgcaccttctaattttattacctctagaggcgagcattttccttcatcctgtaattgataaggaagaggttcagcgcgggcactgcagctaagcagataagggagaaaatgagagtggaaaggaggactaaagttatttttctgaattgattgttctgaaatgaaaataaaaccaaaatgagcttttgtagattatgctgtctgtgatatattacatcaaactccaaatttcccacatcctttttgaatcgcctctattaatatgcatttcatttatgccaacttgggagagtatcattaatcattcatatctatttttccccatcagaaaaaagaatataaaaagaaattgatattacaaaatatatgtatttggtagtatctagttagtgtctatacttagcctatattccatacttattgtgtgttatgccctcttctaatatctttacatctattaatttattaatagatttattgtcacaaatgctcatcattacttttattatcttttttttttttttttttaacaagtcaggaaacttgcaaagtttaaagagaacttgcagcatagagtgaataaagaatacttttctaaaa

SEQ ID NO: 33054 - DNA, 707 bp, Bovine  19866880863932
  misc_feature (1)..(1): n is a, c, g, or t
naaaaaagcatttaaaaaattcctgatacggtgtttttaagcattatttatttatttattctttttttggctgtgctgggtctctagctgtgagcatgggctactctgcctgtggtgtgtgagcttctcattgcggtggcttctcttgtggagcgcaggctcccgggcacgcgggcttcagtagttgcggctcacaggctctagagctcaggctcagcagttgcggtgcatgcttttagttgctccatggcatgtgggatcttctcggaccagggattgaacccatgtcccctgtattggccagtgaatttttaacccccagactgccaagggtgtcctgttacagtgctttgatctctagcatttatttttaattcttccttaaaattctgcctctctacatgttgtgtattattttattaaaatccttactaatcatagtttaaaaaatactggtctcataattccaacattactattgtatcacactcttggttctgttgtttatttagtctcttcaaactgtatttcttgccttttagtataccttgtaatttattgttgaaatatagatatgacatggtaggtagaaggaactgcagttaacagtcctttactgatggggcgtggagggaaggggatcgttctatagcgctacgagtgggtctcagccttttggtgagtctgtgcccctggactgtgaaatt

SEQ ID NO: 33055 - DNA, 920 bp, Bovine  19866880922068
  misc_feature (1)..(1): n is a, c, g, or t
nctgaagagtccctccctcatggggttgttatttaaattaaagggggaaaatgcatataaattgactagcccagtgccaggcagaaaactagctcttgccaagccgtcttatgtatgagaagcaccctctagtacactctggaagatataaagaagataaaggataatgaatactccctattagttcacaatctaggagaaagtatggaaaatatattgacattagttcataataaattttgtcatagtgagatacacgatttaatcagaagttaaaggtcataaaagggcatttcatcatgatctattgtaaaaaaaatataaataaatctccaggcacaattacaagaacaaagactgtcgtggacatttggtgaccatttagccttctgtagaactcaaatcctggtattagtcagctttataactttgatgaacttcccaaacaggaagccacaaaatgctccatcagtgctatatttggtactggtttagcccttacttagagaactctattccatattgatcctcttacctcagaaatgacataactacccttggggaagtgaaaatatacagagctattcaagctaggcttagctctgggatttatgtctgcaagatacaaaacactaaataggcaagggagctcaagaacacactttcatcaaaaaggcatagagacttgtaatccctgctgttcaaataactctctagcaaccattctggaaatatgaccacaaaatagaggcaacatattacagttgttaattaaaaatatagacatacttgacccaaagcccatcaaaacttgctacaagcttcactggacacagcagaaatcagtacataggaaattactaaggttaagacattcctgtcatctcaaaccaactaccataatttcatttttaacaata

SEQ ID NO: 33056 - DNA, 1708 bp, Bovine  19866880999987
  misc_feature (1)..(1): n is a, c, g, or t
naaaaatgaataagacagttctcagatttcagtcttgcaagatttaggctcttctcttaaagtaatatttattctacaaaacattcacttggcatacatcttatgctaccctgcccttcctctcccagtaacaggcatgtctttggagggaaaaatccactggaatcccttttgtccccagaatgcctgcatgttctcagtagggaccttgtgggtgaattctgctcttgttagaagactgggttccaaatggtctcctcagaaacattcagattatttttaaattcgcactataacccatcgcagagcgtgtggtgtacaaacaggttttatctccacaataatgttgaaattcactagcagctgcctaaagtgctaagaaaagtacggaggccacatctggactgagagagagaatgtatactgaaactcaagggttagtgacgtctgccgcatgcacagatgagaaacatggtggtatgcatgctcagtattcgccatctcgactctaaatcctgagccaaggtctgaattccacgaagttcaagtatttcttactgcctaagttcctttccctaactgaagcatcagaccacggacagataattcgaggttcttctaaatatacatttccatgtataatccttttatgtaaaagtttggtgaagaatattcttccgagtgaattagacttaaggtcaatcacagacccaatgttctcttcctctttgaactagcacacagtaagaaccctttcccaagagtatctgtagcaacttttaaacttttccaaaaaagcaaaagcatcaaagccacttaaagatgccactgtctgtgcagcgactcttttcttccagtagatgctgcgatcttctgtttaaagagttcccttttctcatcctgtgctctcccataaatcggtaacatcccagacaaccccaaatcggggtgacatttggcagacttggtttcagactcttcctctgaaaccatttaacaaaacctggcacaaagtccttttatgatggcgagaatacaaattcaacatccagccccactcctaaagtgactgagggggtccagcaaactcaaaataagaaaccaaaccccttcttcttttggtttgtttctagggagtgttcttcctcagctagaaaattcctgaatgtttctctaaagtatcaggagatccatttcataattctaaaagcacactacaaaacagaagggtgcggtccgtaacggctgacaacctccactcgtagctttataatcatatttattatatttccaaggcaatcttcctcatcaatgtccactcccctaatcaaatcacattgtttaaaaaggcaaattcacttattacttgctgccctctctccattacagtagcacacgcctttgctgtctctccgccccacctcttctagagcatttatgcctgacagtcacctcctccttcctgccacagaccacttaggccagagtcatttcaaagttcccttaaaaaaacttgatgcttataatggaagaaaagccttctcaagacagaattctgttagaatgagaaaataagtaaaaacaggttgcttttctcaagatctcaagtaatattctttctttagtgaaaggtcaacttgccttttaaagttaagcttagaatcttccaaaagttcccaacacccccagtacgaaatcacttccagca

SEQ ID NO: 33057 - DNA, 1113 bp, Bovine  19866881042559
  misc_feature (1)..(1): n is a, c, g, or t
naggcaccccttggattatttgcacttcccaaatttgcctcagactgactgacgtggtgctgggtggcatcaaaaacttgcaaagaacaactttttaataaaccttatttgtgacaaaattaatctttttaaccatcgactaaaaagccctgcaacaactcaaacccctaattcagactaaagcacaacatccccctttggacacataaaaatattccttccttagagggggagatagcccaattttttgttatctggtacgtatgcaaggtgaccctgcttcagcaattgcaatagccagagaaaaattattgcttctttgattctgtagttgcgttttgtcctctggaggtgtatccccaaaaaatcaatgtcaactggctttagaggaaatgtttttaatggacatgctgctgccaggtctccctgggatacttaatcactgtctccacgccagggatagaagcactgggactccaggagcctggttctgagcagaccgtctcgggggctcacatgcttacagaggtcagacaggcattataaacccgtggagcagtcaggtctacaacgccagggaatatgagggaccgtgtgaaacgggagtatatctcagagaaggcagacagtcgctacctgttccgttcagttgtcaccctgagggatacgggacccactgtgtcgtgggaacagctcttgcagtttctctctatatctgaaagagactaaattggggtcacacacagttagacctgtgaacgggtcaccctgaggaaaaggattagagaatccgctgatattaaaacctctcatggaggaccaaattagtttcctaagctaccataacaaaatgccacaaattggctggcttaaccagcagaagttcatttttttttttttgcagtcctgaggactggaagttcaagatcaaggggtttgcaatttggttccttttgaggcctctttccttaacttgcacatggccaccatgtctcactgtgtcctgacattatctttttctctgtgctcaagcattcctagagctcaaacttctgtctgtgtgtccccagatttcttcttcttgtaaggacaccatcaggtggattaggactc

SEQ ID NO: 33058 - DNA, 1875 bp, Bovine  19866881078220
  misc_feature (1)..(1): n is a, c, g, or t
ncttatttttgggggctccaaaatcctgcagatggggactgcagccatgaaattaaaaaatgtgtgctctttgcaagaaaagctgtgaccaacctactataacgtattaaaaagcagagacattactttgcttgacaaaggtccatttagtcaaagctgtggtttttccagtagtcacgtatatatgtgagagttggactataaagaaagctgagcaccgaataattgatgcttttgaactgtggtgttggagaaaactcttgagagtctcttggactgcaaggagatcaaaccagtccatcctaaaggaaatcagtcctgaatattcattggaaggactgatgctgaagctgaaactccaatactttggccacttgatgcgaagaactgactcattggaaaagaccctgatgctagaaaatatagaaggcaggtggaggcagggacgacagaggatgagatggttggagggcatgaatttgaagtggctccaggctttgatgatggacagggaagcctgatgtgctgcagtccatgggatcccaaagatttgggcaccactgagtgactgaactgactgaatatcttgaaaattgaataaaggcatagatcaagaagatagagaaatgtttaacaaggacctagaggaactaaagtacaaataatcagtgatgaacaacacaataaactgaaattaaaatgcagttgaagaaatcaattgcagaataactgaggcagaaaaaacaggaaagtgagctggaagattgagtgtttaaaattactgctgtggtgcagaataaagaaaaaaaatacaaagaaattagcacagtctcagatacttgtgagacaactttaaacaagctgaaatttgaattataggggtcatagaagaagacaatagaaaggatctgagatatatttgatatatatttgagaaatatttgaataatatttcatattattctcctaatatgaaaaacagagaaggcaatggcaccccactccagtacttttgcctggaaaatcccatggacggaggagcctggtgggctacagtccatggggtcgccaagagtcggacacaactgaacgacttcactttcacttttcactttcatgcattggagaaggaaatggcaacccactccagtgttcttgcctggagaatcccagggacgggggagcctggtgggctgccgtctatggggtcgcacagagtcagacacgactgaagcgacttagcagcagcagcagcattatacatgagaatatgagatgcatattttgtatgcatttgaaaacaggactagacctatgtatattaaaaagatgaggcagaaacaataaagtggtcatagtccagtgttggagcaataaatgatttgctgcttgtttgtgttcttcagtacattttttataacagtattttttacttgtagaatgaaaaagactcttgactcttcctacattcatctttattccaactttggaattattagtctattttggaataggttcctaagacagttattattttaatagcttcagaatctttcacaatattgagaaggttctctatatacacatacacacgcatatatgtacatacacactcacacttctttccaaatgcttctctcagcatgcaagtttgccgactttagagattagcctgcttacagattctctaagacatatgcattttattgtaactgaggtccttaccggctactggtcggggttttttggtaagacatctgggactgtcttcaggattcccatcatcccctcggaaaacccatgcagcctgaatggaagttctctgtgtagaatcctttttcttcgatactgactcgaaagccaaggtccacagag

SEQ ID NO: 33059 - DNA, 1159 bp, Bovine  19866881083056
  misc_feature (1)..(1): n is a, c, g, or t
nattagaattattgaaatgcaactaaatgactgaagtatgtccagatataccagaaatagtgatcagatcaaaggtttatggtttgagagactgaaatctagaatacaaaacatcaaaagcatatcaggccagttggttctcattaagtttcatatttaattcccatgcccccaaaaaggatatggccatctccaaggcaattatgaacaatcactctctcttacacaggatggtcataatgaacttcacccaatcaagtaacccagtgaattaaaagtttgccacagtttccatacatactttctaaagtaatgcccatgcacacacacacacgtgtctatttcttacttgtaagaagaaggcattgcctaaaatatctcaagtaaaggctgttctttgttacataatcctatctcataaaagtaacttcactaatgtgtaaactccagaatagatttttttccttctgccaagaaaactaaaaggatcagagttgtgtcaccattatctcagaatgagatgacattctacattattccaaccttggacgagaaagaatttcctaatatgtagtgatttatttttgatgttgaacaagctagttgtggaaatatataagctgatttaatgtatatttcaaagcattatgttgctattaggaaacagaatcccttatcagaactaaagacttaagagcaataaataaattccctttaataaaacattagtcagaaatagaaaacacagtatttttcatacttttcacttaaaagagattacaatatgattcttaaaggatttcaatataaaagaattttcatgctatttttttagcactaacatactgctgatttccaacataagaagataatagaatcacatattgagaagttcagttctttaaagatgaatctgtgaaacttcctagataatatatcttcgtaataaattcatataagtccagaggtttagactgatcaaagtggcaaagaagaatcagtaattaaacttctactccatggacagatttttcgcccagggaaatctctacacagagtcaccaccacctggctgcttcagaaggcaggaggtcattacaattaatctcatactctcctgacatttaactctggaattccaaataccctaccaaaatac

SEQ ID NO: 33060 - DNA, 899 bp, Bovine  19866881148730
  misc_feature (1)..(1): n is a, c, g, or t
natcatggctttaattactaagaaaaagtatataaagtgaacgaagcctgattcaccattttcatgtttagggaatatcaaaagaaacatattattctgactcttttaaaatattaatatccttaaatgtactatttcaaaattaagtttataaaatatattttccaaaagacttcaaggttgggggaaaaaattcaaataaaaatgtatgtgaaagtgaaaacagccattttgagataaataattgctgtcgtattttttttgtttgtttttttttgctaaaattattacttgaaaggcatcatatagagtaaacgtgtaatgaactatctagattccattggtaaattatttattccatgtgggctggccttgattttttcactgtagcaagggactgacactagatcgttgacagaactcctctgtgctctaaaatttcataattctatgaatataaattgcatgcaaatactgagtcagattggaaaggcatcattgtcaggagttggagacgtgactgagttgtaccagttgactcatctcaagcaggctggccactgcgttttgccattgagttgcatcactgagtgattagaattcttaaccacattatacccacatggtttcaaatggacttttaaaatctgtcttgcagcccatattccctgtgaacctctaggttagttataattgactttctaaccatatacaatggacaataattgatgcttttagctagctcaaagtgttcatctagcatttaaaagtagaatttttttttcacttcataaatgtaggatctgttcaatatgcaagctagggaaatgtacactaagtaaaactgtttagtgactctggctttcacagtctagccttattctccatttaaaaatgag

SEQ ID NO: 33061 - DNA, 713 bp, Bovine  19866881158915
  misc_feature (1)..(1): n is a, c, g, or t
nacattaaacttattaccagttggaaaaatactttttatttacaaatatactttcaaagaatctaaaaacccatgtcatcactcttataatgcaatcacgtatgtagtctgaaacacatggctcatatttcataaatgttgaaaaacacactatgaaattgccaagtgaatactactaacacctcttcttgtatgcactcttccacaacaacaatcacgggcaactggaatctgctttacaagcatgtctatctttgtaaaaactgcacatgctttgttagtgggcattgcacttgcgtcagacaaaagtctgataatttaattgtatattcaaagatacaaaacaattaaatccactagcatcaacaaccatccaggaaaccaataatgagggttctttgaaagtagagtaacccagaggtcctaaagtacttaacataaaattccaggcccttcaatatcagccacaggatactacatttcttcagcattacatgttttcacatttcagtgattacactcttagctccctttatcagaaataatttcctttcttaaagctctaattctaaagatacctacacctcaatgttcataccagcactatttacaacgaccaagacatgacagcaacctaaatgtgcatcaactgatgaatggataaagaagatgtgatacatatacacaatggagtattactcagccacaataaa

SEQ ID NO: 33062 - DNA, 1443 bp, Bovine  19866881176686
  misc_feature (1)..(1): n is a, c, g, or t
nggtagaactggcatctcataagtctcctacattggccaggagagttctttaccattagtgccctctgggaagcccaatctctaaatggctcctgtagtggttaatacgtcaagtggttatatgtcaagtcagctaggctgtagtgccaagatatttggtcaagcattagcccagacgttgttataaaggtatttgtgaagatgtaattaatatttaaaccactgactttgggtaaagcagattatggtccaaaatgtggattagtgtcttaagagaaaagactgaggtcctcggaagaggaaggaattatgcctttggacccaagattgcaacatcagttcctgccaggatttcctgccttccatcctgccttgaatattttagacttgccagatctcacaactgtgtgggccaatcccttaaggtacatttcagtttctctttctctttcattctctctctcatacattctattggttcactttctctggaggaccctgaacgatacagctcccaatgacccacagctctgacatccttgccctcgttcaatcgtcttcccttgatgcaggctggaccaagtaacctgacccagtaatttgttatctctaacaaatagaatatagcaacaataatttttcttttgcacattggattcagagtaggaagacctgtggtcaccactttcttgacctattcgacacacattcgtaacttctgagatgaggatacagaagtgctctggcttccaccttggacaccctcttgcattctcccttgctgacggtgatgggcagacagcagcagccatgttgggagctgccctgtttacagcccacatgaggaggaaacgaggcgtcctccagcccatggccagcaaggaaccgaatcctgtcaacagtcgcgtgagagagcctgcaagcgaatccgccccggtcgagtctccagatggctgagaccctggccgatattctcaccgtggcctttgtgtcagacaaccagcacccagctaagctgtgcccaaattccttagccacaggcaacccggacaataaatgcttgctgttttaagccactacatttagaataatttgttatacagcagtagataactagcatagtgcatttcccacttttaagctcttgaagatcttaaaagctgtcactcagctaggataaccgaggtacttacggcaggcgtgtgaggtgtaaggaaacaccagagcagtccttgtgattatctgaaaatacacacaaaaaatacacatcttaaatatgaataatgaatttcaaactaaaaatgttaattaataactcaatactaaatttaaaaaccctatatatttcgcttgtatggtgttttacagtttacagagtactttcatactcataaaatccatttaattccaatgtatcacagagcaacaagagaactatcattt

SEQ ID NO: 33063 - DNA, 1012 bp, Bovine  19866881201097
  misc_feature (1)..(1): n is a, c, g, or t
natcttctgtttgttttcttaagaaaaaaacttagatctctaactagatttttctctgtctagccaacactgatcattaattcacattctcacatagttcatcttattcagtttgaaatgactcaaactgattcctttggtgtctgcctccattatctttaaagaacgtctgtatattgtgcttcattttaagacattatttaattgacttttcatgagtaaaggtaaggatttagtttattttacctatcacacatgcttgttatcattcctccatgttcctcgatattatggtataaatttaggcattttctctcattttttcctttttttgatttattattcctagaatattaatataaacattctcacactggacaataaggggaaaaaaaatctcagaacatttacaaatgcagctgcccctctatataactctggttgtttaatattcacctaaccttacatttttaccctggatatatatatattttacatgtttagatctactgtatttttggagtagcattaaaagaaaaggtgagttggtttcaagatagctcaggcaaagctaagaaatctggtataattcttctagcataaagaaacaagttgcgaaaatgataattgccaacaactcaagaggaaaaaatagtttagatcttaaacataacaaccatagtatgcagaaatcagtaataacatattatttttgaaatgagattttacttaatgaatgtcaacaagaatttaatccctatatttcactgaaaaatttttcatccatttgaatacataagtacgtttttttcttaatttgtggctttaaaaagattttgcaggcattagaacagctgccaatgttttaaattatgatgtacactaagtagaattgcactgaatatttaaaaggaaagaaaaaagaaatacacatacacctttattaaactgttcataaaaaagcattcttcttgttacccccaaatacatgtaaaatttcaaaaatgctgca

SEQ ID NO: 33064 - DNA, 1059 bp, Bovine  19866881203743
  misc_feature (1)..(1): n is a, c, g, or t
ntttgtctgcttctttgcaggtaggctttctccgccttgggatgcacatgacccaaatatgttacccctgaaaaccctatttttctatcccctcatccagtaagaatgaactaaagcctctaagacccaattttaaatttttaagtggaaaaacgaatgacagcttaggtcaagtgtcccagatgtctgttgcctttgacttttccaaaagactaatttctaggactccagatatgatactgcattttgatgttctacccagatcacacaatggtaaagaatccacctgccagtgtaggaggtacaagagatgtgagtttgatccctgggtcaggaaaatcccctggagagggaaatggcaacctgctcccgtattcttgcccggacagttaagggggtcacaaagagtcagacacaaatgatcgtgcacacaacacaaatgcacacaactataaaaatgcttcagtacctacagagcactttgattcatccagtagccaagtgaacttacagaaatatgatgtgagaatattcagttccaaattcttaaattagcaaatcaatattgttgcttttcatcccatccaacaagaagcacatgcatttcttttttaagtgaagagtttcaagatatttttaggatattcggtttatactctttttttttcccccacaggaggtaaactcatccttacttactggaaaaatcagtctgtgcaactgttctcatcatcaaagtgggagtctttatctggaaggctaagcatttattgactgctaagactgtggcaacacgcagacagcataaaccaccatttcttaccccagatgctttgtttcagagactcggagctgctcttggtaacaaatgccggaaggccctgaagtaccaattactcactgtttaagacaatgccctctccagaacggaataaagctcacagtcacaaaaaagttgattctgctgcggggagccaagtagatccacgctctctctagcaagcctttataatctgtactaatcacaagtttctttgggaattcttgtctagggataag

SEQ ID NO: 33065 - DNA, 1027 bp, Bovine  19866881335673
  misc_feature (1)..(1): n is a, c, g, or t
nacagaaaggaaatggaagaaattttgccccattttgctgttccattagttctgcaacagagctaagattaaaacagatttcaagcttttatagtgatagctcgttgccttggagaactttttaataggaagagacaggaggtttgaaagtagaatatttttaatttaaaaatctcattggcttattttcacggcactgcagctgctgattttcatatacataatatgttattttttatgctgtctctctttgtaagccaaaaacacttcttaagaaaaggctattagtctccattttaaaatatatatatatatattgaagaagttacagtttgtgacagattttgttcatgaattcatgaggccagtcagagctgggaacagttcctcctaactagcgtatctcaggtttgctttatgactgagcaaaaaattctggggttgtccagcttcacatgaggatatcttacctggctactctgaggcctaacaaagctcatcatccacctttacactacatcctcactcaaacagggagaatccccttccaaggattgtgatttggtgccaaacgggcgacacctgggttctagccccattctccttccacacatacatccttctctccctccccatgatgccacccaaacagaacccaaattcagtccttagaactttaaaaacaaataagaaacactcatctcccttaccatccagctatctacccattcagtaaatatttactcagtacctattacgagacagacgctgttctaggtactaggactcagcagtcaacaaagaaagaatcctgactcagtgaacatacagcgtgtcaggcgtcgatgagggctgagggaaaaaaaaaaagtggcggggagcccaggggtatccagagtgatggaggaggctcctttatacaggctggtcggtatggaaaacccattcagccacgtacaagtcagatatccttcatgaaagctgtttcaagggcatcaggtgagctcaaagacaaacgggaacaaag

SEQ ID NO: 33066 - DNA, 979 bp, Bovine  19866881363388
  misc_feature (1)..(1): n is a, c, g, or t
nagaaagggagcttgcttgtagcttacataactaattgcccacacccagctggcacttgcatgaacattttctatgaaggcccaaatgtttgtgagatctgttgtcataaacaaaagaaacagatgttccaactctgataccaagcaaagttgaaaaggaaatgatacatttagggatgggcagaccacatacgaaattatggacaggcccatctttcgggaagctctagagtttaaaatgctactgttatagtaaaaattttttaaatgaaaaggacaaaccccttttttaattataagttttcagactctacattatatgtaaatattcataaaaggatgaagtagctcagcatttaactctttataatcaatacagaactatgtcgtcaagtaccctatcggggaaaccaacttagaaaagtgtgggcttgttttcttaacactttgatccttcctgtccaatgtaggatacttccattctgctcccaagagcagcctcaagtagggcaactgtctgtgtggtatattagagtcaccttgaaacacctccctcctccaagagatcatcatgcctcaaactgtcaccataattagtagataaagggaaaatttgtaagttgcattcaaattagtggaacacagtcaataccctctataattaaagctgaaagctatcacataagctatcaggaagagtaacactacagaagtaattcctctacaaacaagaataattttcactcataatgcaaagataaataacacagtttttaaatgagcaaaggatttgagtagatctttctccaaagaagataaacaaatagccaaataagcacataaaaaaatactccacatcagtagtcatcaaggaaaacaaatgaaaaccacaacaaaataccatcccatacccactaggatggctatatgtaaaaaatatcaaatatggcaagaaagggagaagctgagaacacttata

SEQ ID NO: 33067 - DNA, 1483 bp, Bovine  19866881384306
  misc_feature (1)..(1): n is a, c, g, or t
ntgtgtgtcgtggtttggacctttgttttagtttcagctatacttcacaaatggagaaggcaatggcaccccactccagtcctcttgcctagaaaatcccatgggcagaggagcctggtgggctgcagtccatggggtcgctaagagtcagacacgactgagcgaattcactttcacttttcactttcatgcattggagacggaaatggcaacccactccagtgttcttgcctggaaaatcccagggacaggggagcctggtgggctgccatctatggggtcgcacagagttggacacgactgaagcgacttagcagcagcagcatacttcacaaatgcatgctgtacccagtgttttcaaaatgtacactgtgcgcattttcctagtaaataaagtgtttccttgtctgactgactgactgactgaaagtctctcagttgtgtccaactctttgtgaccccatggatagtccatggaattcttgaggccagaatactggagttggtagcctttcctttctctaggggaatctccccaacccagggatccaacccaggtctccttcattacaggtggattctttaccagctgagccactagagaagcccaagaatactggagtgagtagcctatctcttctccaggggatctgctcgacccaggaattgagccggagtcgcctgcattgcaggcggattgtttagcaactgaaatatcagggaagcccggtttccttgtctagcgttgtctagttttgaatctcatatatttcattttttaaaattaatttatatttttattgaaggataattgctttacagaattttgttgttttatgtgaaatctcaacatgaaatcagtcatatttcaaagaaacagagtggggcctgtgaacattgccgggtcttctgtatgctgtataaatatacttcagtgcctctgttactgattggattgtgagggaatttgctattgaagaccttaggtgtcattttaaaatttgttgttgttcccggtacttgtttatgaaactcggttttaaaagtcttgttcacctacacgttgacttttttacgcatattgcattttctgttcgactctattccacagaatattgctgcttatggtatcataacagcactttctgttttctgtttgcggtttttatttttgctttaaactacatgtgaaaggcattaatggaagctgttaagggtctctgttgttggtctctgatttgtagtgctctgcggttccaaagttagccttgggtctggtttctgggttcacatgtattcttactgatgcagtgggcgtggtgcctggtccgcacccctgcagtatttacagagtgtgctttgtgattgtttatcttggcagtatgttttttggatacaaagtttatcttagaatataacagaatgctttgtcatgaatattgttaataacaacaaacccataaacagagctttcactgcagtt

SEQ ID NO: 33068 - DNA, 1683 bp, Bovine  19866881399228
  misc_feature (1)..(1): n is a, c, g, or t
ncaccccatccctcagggttgtcccagagcaccagcttggagtgccctgcttcatgcatcgaatttgcactggtcatctattttacatatggtaatatacatggtggcggtggtttagttgctaagtcatgtccgactcttgcaaccccatggattgtagcctgccaggctcctctgtccatgggattttccaggcaagaacactggagtaggttgccatttcccttctgcaggggatcttcctgactcaggaatcaaacccaggtttcctgcattccaggcagatgatttactgactgaagcccggtaatatacatgtttcagtgctattctctcaaatcatcccatcctcgccttctcccacagagttcaaaagtctgttctttacatctgtgtctcttttgctgccttgcatataggatcgtattattgtctttctaaattccatatatacatgttaatgaaacaaaaattattacataactatattggagtgagaatgaaaagaaaaagggtgtaaaagatagttaaatgctcatcagcctgaatcaagaaatcaataatgtctaaacttgatatatcaaggaataaatacggcatatgtgttatacaatcactcacatggcccccactgtctcctttctgaaggcgctgcctataccctgggctgatccaccaccccactgatcacttttgccaagctccccagctggctggagttaaggtgaagtctagcacttggatggcccacacaagccctcgtcccgtactgagcctgtccatgcaatgcaacgcaacaccacagagtgtgggataagcttctaggaggtcacccccagatggcatgattctgaactatggaagagttagctccccatagagtgaactcagactaaagagaaaaagtagatcagagcaagccaagcagaggaacttctgtccaagaagtatttgaaggcggggctactgatcacgttccatggtgacaaaaccacatgcccggttgatgtgcttgctaagcatccgtcgtgtaatgtattacgtggccctgctttgcagctttccctgcctcacttctcttttttcttaccttcatctacttgggcttataccatccaaataaagtatcaaaacattaatccctgagtttaatctgtttttagagaatctaggccaagatagcatattatttttaaatatagagatgggtatgtactgttgctggagaatatgattatatgattacagtattgcaagaatgagaagaaagattacttaatttcttttatatattttctgatattaccgactttaaaaactactctccatatattacttttataaatgaaaattaatttaggaagaaaatatgtgatgattaccattacatgcattttaaattgcttgcaaaagtttatattgcttttgtaagttttccccatagaccaaagaaacaagctaacaattattttagtagtagtataataatgttgtaacttaaatctctgtagtcatacacatattatagatttttctaaaaaaaaaaaaaaacccttttatgaaaaacgaaggaagatgtcaccttaagatcaatactttcttgtatcctgcttaaagtgctatattcttgaaatgacagcaagtgctttatggcagagtagcaataagtcaatctatactcat

SEQ ID NO: 33069 - DNA, 1097 bp, Bovine  19866881400039
  misc_feature (1)..(1): n is a, c, g, or t
natatgatattgctgatgcctctttactgctgctgttggaaactatccaggaaaagcacattttcctgacaaaagacggtagtgtagtagaaatgaaaaagaaggaaaacacttattactaaagaactcccattatattctattattacccatcttaagccaagaagtctcatgtagacgatagagatcagtacactttgcttacgacatttaagaaccaaatgttctttattttgatttagtcatttgtgagacagagatgcagtgaattctacagaacaagtagttaataaaattgactccttatgtaaattaatatgggacagacaaaaccacctgtatactactgcacatgaaaactattcacataaaatcagtaatttttgttttgggaaaccagaggtaccattcagattcgagtgttgagcacaatcatttgatcctgtttggataatatcctcacatgccttttattgttcaggcttaaagaatccctgcagactacctttctaaaggagactatgcattgtgatgatacaaacagatgtagaaacagacaacaagacggagctttacctgaatatggcccttctgcttgtatctgtggctatttgcaagttggttgttctctgttagtgggccttagaaatgttatactgtgaactaggtgtctggtaactttcctcaggtatcctttgaaacgataaccaaagcagggcaaccatctcatggtggcaacagtgactctctgccttagagtgattactcacagagtaggtagtatccctcctaactcagaccatgcacagtttaaatctgattgagataagccacataggacccattaagccctacattcttacatagtacctattagcattcaaatagcttgaattctgcaaagtagtagagaaaacctcaggggctgacaccagagctgccagaccaagaagagtaaagtacagaaagtgatcaggcctgttagacaagaattttagttacgagagaaagagaaagcaattggaaaatacttttcaaagcctctttttaattgatccagacagataatagaatcaaactgctattttctaaagcaa

SEQ ID NO: 33070 - DNA, 1438 bp, Bovine  19866881599442
  misc_feature (1)..(1): n is a, c, g, or t
ntcgcctgcccgcctggcccgttcggcggtctgagggggcgcgaggtggcgaggccgcccgggagccgggacggcggggggtgcacgcggcagacggcgctgggcatcgctgccctcgccccacctgtcgcctttgggcccggcggaaagcggagggaagggcttcccgggcgggcggcggtcagacctggaggaggcgggccccattgtgaagctgccaaactctctagtggtggaatctgcgcgtctctgccagagaggagatggggagcgcggcggggacgagggccgccggcccggccccttgcaggtgttccgcatcctcagggtctcggtgctgctccagccgcgccggttggcacccgggtagtttaccgattggtttctgtcgagccgagatgctcgagttgtgtctgtggtccgactggggcgctcaggtagaactggggctgggaactttctcatcattcgaggaaagaggaagaaatgcaggcattttatcgtgtgcttgctactcgtagccgaaagagcagtttcttgcacaacgtgtctgacgtttctagacccttcattttgtattgtttttctcagatagccacactgcagtttagagttgtaagttgccttatttatttatttttttaaccctgtggagcagattggacgctagggaaatagaaatgacctcttccccaagtttattttcccagtcgtttcaaaatacagtattggttattatggtgaagctttttggtactttcttaattcaagatcgtaatttatgcttacgcaattacacttaatgaatatttgacagatttctcagtgttttcattatgtaactgtgtatgcattataaactcaataaaatgaccagggcataatacaaggattaacaagcccaaagacctcttgctttgataagaactgctgtttagaatatgcttctgcctgcgttttaggttatttaagtgtaaatgagactgttaagtagtaactgttccaagatgtaagctagaaggtgtttattgaccttatataatggtcagtgattttgtttactttctgtgtatcattttgtatactttgaagagctagtgggcacattaacccttaaaagtatttagtgtcgtgggagtaacacaacgttacatacgggatttttttttttttttttccttcctgatttatattctctggggggaaatcggcttttcctccagagaaagctctgatttcctcacattcctatcaaaataagttcttggttttaagcttttatttggaacgtcaggcagttccacagtgtacacctgtcccaattcagttgtgtttcctgaaggggaaatttcttgtaaagactgcatgtagacctatgggttcggttactgtcagtcatatttgtagtgaaacaattctaaaagtagaaagatgattt

SEQ ID NO: 33071 - DNA, 1442 bp, Bovine  19866881761559
  misc_feature (1)..(1): n is a, c, g, or t
naatagcaagagaaacagcattctctcactaaaggtacacgtctacttcctcatttcagaaatgttaaaacaagaagaaaatggtttcttataataaaacagattactcttacctttttgcactataggtatttttgtaagccaactcaaattcttagaaataggatccattgcaaaactatagtaaagagcccgatagtgagttatttcagtttctgaagagaacagtcgtcttggcaggcagtcgtgtcttcaaggaggtaatttaccaagttgggattccttagtgggtcataaagagctgattattctaacaatatcttttctataaaagcatttagtgaccacgttgccgtggtcaagcaacagggtgtatattccgaaaataagaaggagaggacgggggtgagcttcagcaagccgtggcctttgctctggttctggagaacaaggcactggcctactcaccggacccttcggtgacgttgctggcgagcgaacttcctcccgcagagctggcccttttgccgtctcggaactgctgcctcctcctggcccactgctccagggcttcctcctgggagccgtcgctggccctttttccttttggagccagttcctgggataactttcgaagactgctggtttccaaattcccatctacattaaaccacatgaagtttgaaagtgagacagcacttcaaaacagaatttcaaatgttccagtctttgaaacagaaccactgaagactagaactagaatgatttcactcagttccttcctgatgcactttctcaacttgcattactaaaacagagagagtgagagaggaagagcaggaggaagaaacaggagagtaagaaggagaaaaaagagctgtatagactgaagagagatttacgtaggaaacgggaatcatcatgcatttcctcagtaggattcaattcaatagatattccttgggcagcagcagtatgcctgatacattgtattagtttgtgttagtttattagctgttttggaggcgcacaatgtaaatcaattgttaattacatctactgaaattactgtacaagatattattattattatctgaattagttcaggtatggtctttgaaaacaagtttactattgaactctcagttcagttcagttcagaaggacacagatttcatacttttcttgctgtatgtgttggttcaaaatgagaaggataaaagccaaattacatgaaggctttgatatttttatatttgaataaataacaacttgaaatactttatttacttccaaactgctgctttctgtcagcacaagctatgagactatacgttaattagaagtaagaaaattacagttaaactaattacaatacaagcaaactttaagaaaataattatcaagtgaaaaacaaactcatatagcagaatacataataa

SEQ ID NO: 33072 - DNA, 1389 bp, Bovine  19866881789380
  misc_feature (1)..(1): n is a, c, g, or t
nataaactataaatctttatatttaaatcattcttggtatgccccttttcaatgttttcatttccattagagtttgttggtataggaagcagatccccaattactttaaactgagattttacagttactcttaagcagatacattaagtctgaaggaaggatgccaatttcagatggcaatattttttaagtaccaagtaagaaagcaataaaaaagagttcgctttaggtaaaattattccaaacatttggtccaaaagaaaggtgactgcagctgcaactaaaattttaatgctggaaatattttttttaatttattctggtcattaggtattttgaaaatgcatcttctttctaatggaaaaaaatggcccagagagaaaaattaggtcacgggatcaataataaacacaaatatgttcatatgagtatgaaaaaagtttagaaatataagcattatggtcaaagttacaaaagttcagtaattagaaacactgtttctaaattatccaaggttattttagggtcccaaaagtacagggctttctctctcatactcaagtagttattcttaaaatcaaccaagtaaatttttctcaagaaacatagtattaaacatattgctgaagactgaaataaagctaggctaatcctatccatactttctggtgtacaaaacttttcatttctggagtgatcaaatgaaaagcaaaagaaaaaatgaaaaatattaattatttttataaaaagacaaagcaacactgatccactatgaaagaaatctgcaatttcttcatattttaattttgtttaaaaaaagagtaagggaaatatagcacattccaattctagtaatattttatttgtgcatcatggaatttaatcaaaaattaatttaaatgggcctccaaaaaatattataatatataataaaatacattttgaggactactaaaaaaaggaaagaataataaaaataagaggctactgtgccctccgctcctgggcatcacccagcatcagtcccagccttcccgggacacccttcccagccactccagcagggcctttgcctcaagccctggacacagattgaccgacacccagcggccagtgaaggtttaagtgctcaatgaggaccagcagtgggacagccagggcagcgggcatgtcatccaactatgctgagtggctgaagggcatgtccctgctagttagggcctgacaaaacatggccaactggacaagggaatggcaaacagcttcagtagtcttgccttgagaatctcattaactggatagaaaggtaaaaagacatgacagtgaaaggtgaacccctgaggtcgtaggtgcctaatattctactggagtagagccgagagatagcta

SEQ ID NO: 33073 - DNA, 813 bp, Bovine  19866881820346
  misc_feature (1)..(1): n is a, c, g, or t
nttttaattaatgaattttaagatatccaactattggttttggttttgtttttgttttttcccctcaggttttgaattgtattcgatggtgccatctatttgtcctctagaaactcttcataatgccctgtccttaaagcaggtggatgaatttcttgcttccattgcttctccatcaagtgaagttccacggaagacccctgaaacttgtaggaaaagtattattattatttgatttttagacagtagattttatctgaatatgaaataattatgaaaatataaattcaagtagtgatagtaagtagaattttaggggagaaaggggtatacaagaacattgtttgaaattctttggtataatgtgcagtgtaccacttgtcttgactctttccccaaattttttctcttaccaaaaggaggaagaaatctaagacccagaagtagaaatcagcaatatataatacaaaatcatagtcttattttctactgtcattgtatataataagctttttttaaaagacgggatattagtctgcattaatgcccacgtgttcatccattcaatacttttgactcagagctcttaactcagagcaaattagggcaacagtttttcaaattgtgttctgtaggaaatattctgaagaggttaattcctttgtgtaaagtaaagggattcgtggctaagccagttttggaaactttattataaggaaaactccatacccacattttccaaaacttatttgttgagaaaacattttggtaacacatttaaatattgtataaaattattctcaggaacttcag

SEQ ID NO: 33074 - DNA, 761 bp, Bovine  19866881853689
  misc_feature (1)..(1): n is a, c, g, or t
nctacactgtagacctgaagattttttttttttttaaaaggttgaaccttgtggatcaaagatgaggcaggagatataagatggattaaagttaaaatgaagataaattcctgaaggcaaacaaaggcatgagaagatgcagagagctttcaaggttaaatagagtgataatctcaaaagccaaatgaatttagagttctattctactttatcacaacctttcacaaataagaccctaaagagatacctgggtgaatatgatgagctgctgcagtagctcaccacagaaattccatatctatcatctaattgcctctttcttacaatttttctcttatgttaaaaaaaagactcattttgagattattttaatgaatcattgatatttgggtcatccaatataatgtgtatattgtttttcagctcacatcattggctcttaattgtaggcaccattttttaattagagaaagaatatttaagttgtctgaaagtggttaatgccctgatatagaattctgtgccaaagtagctggattttgagtttaaagtctctgtagaacagctagtttcactgtggtgttagctgaagattttcctcctctttcattaatcttttcctgtatacttgctgaatgcctttagatcactcatgacctggtcactgaggaacttgccagctagcagttgaccagtatgtgtcctttgttttgtattctggatgatctgatgggtcgtcaggtcaatgcccaactgtatta

SEQ ID NO: 33075 - DNA, 1143 bp, Bovine  19866881854000
  misc_feature (1)..(1): n is a, c, g, or t
nttgagttttccttccgtaaaaccgtgctaatcctacaaggagaaaagcattttccaagatgggcactcagtcgacattcctggcttgcgaaaaacaatgatttcatgtaagaggctgccaggtatgccgttgggctttatattaatttgtgagacattcctttcattatgttccctgttcaaaaattatacacatttgaatcaaagcccaatgacagtgtctagtaactggaaaatatttatttctccttggaaatcttacctgcttaattacccaatcttttgggaacacagccaaagcctggagtgagtcttttgttgtaggaagaaaagaggagaataatttggtgccgaggggaagcaggtcccttacagctctcgtgggccctcttgtcatgtttggagttcccttgcaaggcggcccgttgtcatgtggttctgtgtcattagagttcacatcagaggataatccccagataaatcccctgtactaccctacttttttttcttctgctcgcagatattcatctccaacttgttctgacttgttcatattctgggagtaatggggtgaagttaatataagacagttaactctctcaattactcagaggctaattatccaggctattgattgcacagtccagcctctgcttttcctgccttttaaagggtggttgactgccccttagcactgaaaccagacaagagtagggggtggagaggtaaagtcataaaattcaaatctatctattttgcagcttattagcactagctaagagcttaggtgattggcaaaagtgtggtttggagacacctgtatatttaatttagccttacttttccttgtcatctcttaccatggataattgagttggctgcattatcttatgttcatatggttaattctcagaagttgggtttttattgctttggagcagtgacttaattggtacttaagacatctgaaggaggtagggttagctatacaaatttcattttttttttttaaataaagaaaccgagactaagtattcaaactgaaaaatggcaggtggaattgtgggctagaggtggaattgtgggctaaagtgctttttcactcttggtctgagttcaggatacacagataggaagaatcac

SEQ ID NO: 33076 - DNA, 769 bp, Bovine  19866882148560
  misc_feature (1)..(1): n is a, c, g, or t
ntttaaaaagtacttgatagctgctacactggaagttaaacatttaaccttctgagattatttcatagaattttaatagctatcattttgtaccttttaatgactctttctcttcttattgccagcaaaacataccctgtgaatgttacaaggaaatcacttcagcttcaacaatacaatagagaatttttaagtaatttttcaaaacagcgataccagtaaaattttctaacaatacctttttaaaaatctttgccatctaacaatattctgaaaataatgctgtcactttataattgtgcagtagaaagatattgttcatatttcctgtttacatttttcctcattcttctgtgaattatgagtcaaaacccagtttaaaaaaaaaatctataaaatccaatgtaaagctctaaaatatgataggttttgactgatatataatagcaatcatggtaattttcctgaaccttattgccagttctacatagaacaaataaacatttatgaaaaatataagtctaagaaatctgcagtggaatggatactatgatgtaaatcctaaaaggtctagtggtgatatattttacttgtggataaaattatagcttatgcatttgtgtaaaaaaaacagtaaagtgcctagaattttttcaaagtgaaatcagagactattagagtgtattaaacacagggaatgacatgatttaatttgtatattttaaaaatctggctgctatgtaaattcaaagaacataaatttagaagt

SEQ ID NO: 33077 - DNA, 1341 bp, Bovine  19866880598003
  misc_feature (1)..(1): n is a, c, g, or t
nttgaggtttgacagaaaacaacaaaattctataaagcaattatccttcaataaaaaaataaattaaaaagaaaaaataaataaatcagaaaagtggactttgacctgatttggcccatgagctgcagtttgtcatcccctgttccagacttgtgatgaactatccacagaaacacaggcctcacacagccacccaaccttgtaacacacaatctaaccgcaaggtaaaatattagaaagggatctgtaggtagtttttcctcaacatggctggatattaatattcttgtggcagaaccagtgctctcattggcattgttttactctacaaagtgaataattcaagtcaaactcaataaagttcttcttgtttcaaataaggggaaacagtggtggcccatcacattttaaattttcctgaatttactctcattaaaaaaaaaaaatctactggtcacttctctagacctctctctgtcttctctaagccaaccagcatatctcaggtcttatcccacatggggccctgccaggtgactgcttagtccattttgatggcttccacctcccagaaagttacagtccaaagcccacttttaaggaagcagcaccaaatggcctgtcttttctgggatctgcacaagtttgttggcatagttttccagctctaagtacatagaacagttcagctcacatgagtgatccttagaccttggtggacctctcagacacgctgttgcaatgagcatacatgaaaggtggtttttgtttatgaaaacattagatatattttttaaagcatagaaaatgtaatgaacaccctatttactcaccacctagcttaataaacaaaatattatagatctattcaaagccctttgtatacactttctggatctcattttcttccctttcttcccccaaataatctttatcttgaagatgatgtgttctttgtactttcactacatatgaatgtatttttatgaacatattcctaaacaatatataacattgctttgcatgttgatatcctttgtatcaaagatataatatgataatttttttcaagttgaatccatagttgacacatgtactgcaagttcattcatttgctctatttatattcttccattgggtttctctggtgactcagagggtaaagaatctgcccgcaatgcgggagacccggattcaatccctgggttggggaagatcccctgaagaagggaatggctaccctctccagtattctgccctagagaattccatggacagaggagcctgtcgggctatagtccatgaggttgcaaagagtcagacacagttgagcaactaaca

SEQ ID NO: 33078 - DNA, 1467 bp, Bovine  19866880694998
  misc_feature (1)..(1): n is a, c, g, or t
nctaaaaataaaatagaaaaattataatgatatactgtaataaaatttatgtgaatgtggtctttctctcaatataaaacctatgcattctttatttctagaattttctgttaaatattttcagaacatagtccaccataggtaagtgaaatcttagacaactcagacaatgaacctgtataaatatggtgcttgtaatttaacacctagcagttagttagctagctagcttctttatctatttaaccaatgtttggaggactttgtatgcaagggcaccccagaatcatttattaaatccttgtgttactgtcctagatacggcataagtttttttaaaaagcaccaattaacctctctatggaaacttctgtgacattcccagtatattttgatattgcaagtcagagttggacaaaatattacttttgtatttttcatactctgagaaaagtccttagaactccatcacttgatgaagcttgccaggagcagaagaatcactaagatgtggatccaaagcctgacatgctgagcttggagctgctggtattattcaggataggcaagatgctgctgctctacctaacaacccccagatgttagagcaacagaagtttatctctcatgggacagacccatctcttcatcctcttcctctgaaaaatctggctttaccatctagaaagtcagtcaccactgccaaagaaagggagaagatggagcaccgcatactggatcttcaacacccttgacattccttctcacgtttcattggtcagagtcagtcccatgggcacatctcacttcaagggagtggagaagtacagtcctgctggtggtctggaggagccgagctgagtacttggtgagcagaaatcatatccacactcatcttcctctgggtttcttattatgtgacaccatagctctccttatcattttagccaatttcaggcagtgttgtctgttatctatggccaaaaccatgataactgaatgctgctgctgctgctgctaagtcactcagtcatgtccgactctgtgtgaccccatggactgcagcccaccaggctcctccgtccatgggattttccaggcaagaacactggagtggggtgccattgccttctccgaactgagtgctagaacacccaaatctcaaaccagaaaaaaatcccctatataaattctatatccagcaaaacatccttcagatatgaaggagagatttaagacattctcagataaataaaaagtgagagaattggtcactagcagatctgccctaccagaaattctaaaggtggtctttcaagctaaaatgaaataacatggactataactgaaatcaacatgaaaaaatagagtactggtaaaggtcacgacataggtaaacataaaagacagtttaaaatagttctctagttgtaactctcccatcttgttggttgtaacaactgcatg

SEQ ID NO: 33079 - DNA, 740 bp, Bovine  19866880798576
  misc_feature (1)..(1): n is a, c, g, or t
ntcacttaaacaactatacatatgaaaaataaaagtatctgggcattttagttaactgtgggctaaaaataaatcaataatatgacatggttgcttaaaaagtctaatgcaattttagggactataacagactttcattatccagatctagaaaactgattgttccactttactatgtgctatctaaagcataccttgagtattatgttaacttcatttctgcatgacatgaattaggagagatagttaccaatgtaagggagactatcagggagatacagaaaaactatgaagtagctgagacagatttgtttcaaaaaggaagacttaagggaaataagaaatttatcttcaaataggtaaaggcaagagcagttagaattaatttatatcctttcaaacagcactaccaggacctccacagtcacaagggctaagagaaacaagtttcagctcattataaaaatgttctaacaattcagttgtggagtaggagcagagtagaaggcaattaatatttactgtctataacatgccaaacccattacctacttcacagcaatcctgcaaggaagatattattgttcatttttcagaggagaaaatggaatctcagaaatgttggataacttcacctaagattctacagcaagtagaagcagagcaaggaataagaatccagcttacaataggctcctaacttgatttccatacatccagtacgttcatccaataccagt

SEQ ID NO: 33080 - DNA, 2023 bp, Bovine  19866881219130
  misc_feature (1)..(1): n is a, c, g, or t
naactctgaacgcactgcatgtagtagacataaattctctgattagatccatctgacagctgaggaaacatgttcaaagaagatgaatgacttgttcaacataatatagcactcagtggcagaacagatactcattaaaatctcctgattcaggaactcaaaccagggttctgtgacaacctaaagggataggatggggtgggaggggggagagaggttcaagagggaggggacatatgtatacttgtggctgattcatgttgatgtatggaagaaatcaacacagtattgtaaagcaattatcctttgattaaaaataaattaaaaaaaaatctcctgattcttaagtactcattacctaaggaaacactacctcaaaacaattccattttgttcatatatgataaaaaataatttaagcattttaggagccaaaataggttctatgaaagagaaaactctttctacattgttcttttgaattaagtctgtaagctaccaaaatatgaacttcaacctgaaccaagcacttatatgaacttcaacctggaccaagcacttaattttccaaactctattattttttcctgaactatgacatgtaaaaatgactatttattttctttttaaaaacttaaaaaaaataaaagtcacacattaacctattataataagtctactaatccttaaaatttgttaggccagacaacagtccctattcttcttccctcgctccatctttccttcctattaggaaaacatttcagttcttttcactgattcttttcctgcaaatcttaatatctctaaatttatatgcttgtattgctaactcatgaaatttcagtttcaggcatatctatctaagtgactatttggaagatgaaaatttggtattcttttccctacctaccacaaataacaggtgccctccatctttccaaattcccaagataattacatttagtccagatcggggtttacattattataacaataaagtaatctttattatttttcctttgctatttaactttttattttctctgaaattaatcatcggggttcgcttactccttggaaggaaagttatgaccaacctagacagcatattaaaaaacagagacactactttgccaaaaaaggtccgtctggtaaaggctatggtttttccagtggtcatgtatggatgtgagagttggactgtgaagaaagctgagagctgaagaattgatgcttttgaactgtggtgctgaagaagactcttgggagtcccttagtttgcaaggagatcaaaccagtaaattctaaagaaaatcaacactgactattcattggaaggacttaggctgaagctgaagttccaatactttggccacatggtgtgaagagctgactcattggaaaagaccctgatgctgagaaagattgaaggcaggaagagaaggggacgacagaggatgagatggttggatggcatcactgactcaatggtcatgaatttgagaaaactgcaggagatgggggtgaaggacagggaagcctgctgtgctgcagtccatggagtcacaaagggtcagactcaacttagcaactgaacaacaatgtacgaaatatagggacttcccaagagacagtggcttgcaatccaaaatttgttttctttttatgttttatgttttctttccttttttctttttatggttcatatggctactcactgaaaatatttgaggcagcaaagtttatttgtcaatcatctctctggaattgtctttttttggttgtattaggtctttgttgctgctcacaggctttcttagttgcggtgctcaggcttctcattgcaatggcttctctccttgttgtgcacaggtttagttgctcctcagcacatgcaaccttcctggaccaggaatctaacccatgtcccctgtatcggcaggtggattcttatccactgtaccaccagggaagtcctgggaaacattttcttgtagaaataatggcatgtgtgtattga

SEQ ID NO: 33081 - DNA, 768 bp, Bovine  19866881264321
  misc_feature (1)..(1): n is a, c, g, or t
naaattcaaggccaaggtgaatagaatcagccagcagatcagaagcataaaactctgagtactaacccctcttttttgctcctttaagcataaagtgattgtaatgaaattgagagagataagtcaagccatccatgtttatatttactggggcagtgatgttgaccctacttgcctgcagtagagattcaaaatcagatttttctggagttcaaaatagagctcatcaacctggcttctctacagccactcatttgctctggcagtggcagaggaaaaggaggggtgaaaacaggtgggtgggtgggattcaaaggatgactcatggcttgcagcctttgtcccaagtgcagcctgtggaaatcacaaatgctgccaggtggatcactagttctggagctgactgtaaccatagagacagcacttctatatttcaatcaaagacccagaggcttccagtccctagaatatatggtggtaatgatggacacactgcagtggaggaccccaggaaagtcaactattacatcaacccaggttaggtttccagacatactggtttctcttttccacggctatgtcctatttgtgcagggctaatgacccaacagaaggaacaaaaggataagtatatacaaggctatactctggcccttaagttccagaaggttaagagtttattggttaccaatgttcatcgcagcactgtttataatagccaggacaggaagcaacctagatgcccataagcagagaaggataagaaag

SEQ ID NO: 33082 - DNA, 1862 bp, Bovine  19866881295080
  misc_feature (1)..(1): n is a, c, g, or t
nctgaaaatatttggatatttctggaaatatccagatagtaaatatttaggttttacaagtcatgtggtctccattataaccactcaactctgctcttggctgaaaactaccatagacaatacggaaacagatgagcatggctgtgttccaataaaactttatttaccaaaaccttgagtggctggatttggcctgtagactggaatattcaatatctccagttttaggggaatgaaaagatgttttgatttgctttattttgctttctctttttctatgtggctatcaaaccagtacaatatgtattgtcatcattcagcagttcctaacctgggataattggatttgggaatgtccttaagcttttctcattattaaagtttgatgaaaacaatctatttatctagcatgaacagtcttaactgaaatgtaagtctcatgttttccctagactttccccagtttctaagactacagtgtatagaagaatactattggaaggactgatgttgaagctgaaactccaatactttggccacctgctgcgaagagctgactcattggaaaagaccctgatgctgggaacgattgagggcaggaggaaaagggcacaacagaggatgaggtggttggatggcatcaccgactcagtggacatgggtttgggtggactctgggagttggtgattgacagggaggcctggagtgctgcagttcatggggtcacaaagagtcggacaggactgagcgactgaactgaattaatgtcaaaaattctttaagagtgaaaatagttggaaacaattttcttaattaggtagaaccttcctggtaaaatgtgagagcagactccttattcctttccttcacccagaactattttacaaacattattatgagcattgtgctaaaggtttgatgcaaacattagttcatatacagaatttttactctcagaggcttacaagacagtgggaagactcagggaccagtggttaagaatttgtagactggagcctgagtgccttcttcaaacacaggccccaactttcaatagacatataatcttgagtgagttactcaataagttacacatattattatttgtgcctccattctctcatctgtaaggggtaaataacaatgctatctatctatctctatatatatatatatattcaatgctatatatatatatatattcataaaactattgggaggattaaattatcactgtgggctggcactgtcatccagataactatttgtactgggggctgtcccatgttttgcaatatgtttatagcagccctggcctcaatctgctagcccaaccgtttctatccttcccaacctgaatcctttctatctttcccaacaatgaaagtctccagatattgccaaatgtcccctgggagtaaaatcacacagctgattgagaaccactgatctagcacatattaagtgttcaacatgtactagctgttactgtatttaatcataagctaattttgaaggataagagaagagatttctcataggaggtaactcttgcactttgatttattacaaaatcccacatataaaaagcatgcaatacaatgttttgctgacattaaaccagtcaacggtaacttctctttttcctccccaatctttaatattgccttgaagtgcagtccctctcagaatacctttttaactttattgccaaggacttcatttttaatttcatttttatttttccctttctagcctattagccaactctttcaaccctcagttaatcttattgcaggtcatttacttggagggaacggtttcttgcatggaataatgtaaaaaatagaataaatccact

SEQ ID NO: 33083 - DNA, 979 bp, Bovine  19866881302080
  misc_feature (1)..(1): n is a, c, g, or t
nccctttacctcaccccaaacagtgcttccgatccccaaggccaaaaagggaaaacaagccctcctttcacagacaggaaccttaaaggatttaacaggaagccaatggccatctccttgttacatgttctgcaagattaacaatcatttgactgtttctctacttttccttaatgacctaagcagttcagttattaagtgataaatcctctgggtattcatgagcagccagtttaattcaggagcccaaactgaaacaatcaggataattgaggtatctcggaaacatgaaggaagtcagccactgtgcagagcagaaaacaaactcaaccagtagcaggagccttgtcccccagaaagaaatgctgaagcacaaagccaaatgggatggaagggtgcaaactttaggaagggaaagtggaagacaaaaacaaggaaaagaaattccagttcctcctcgtcaccctcccactccacttttggcttgtatccaggcaaccagctgaaaccagctgccggatatactcctagagcctcatccgaggtcccaatcagctgcaggaggcgggcagaggaaggatgtgtgacaatctggaagatcaccctccaactcttgtcccttcactcactgtccaccccaactgacatctgttttctgaaaagaaatacaggagggaaagaaggagaaaatttgcgtgttggcattcagctttttcttttgtagactctggatgctgagtgggcttgattggacaagcagatgatgtttggatgatggacttctgagtctccatcacttgctgggcctattgtacaaccagatgcccactcacttgctacagaagattgtaccaagctcaatgccttcgttgtaggctgcagacctgtaaaggtgtttccattatttttctagagaatttgttgttgttgttcagtcgctcagtcatgtctgactctttggaccccaggactgccgcag

SEQ ID NO: 33084 - DNA, 887 bp, Bovine  19866881787573
  misc_feature (1)..(1): n is a, c, g, or t
ntccattgtggagtgggacgaaaagattagaaattctatttatgatcttttacataaaatataagaaagtactgacactccattcatatttaatgtatgcattgaccctggtgctcccatttggtctatgtcagtgggtcattgtcgcatactctaaattgagggatcttgaggaaagtctgagaaccacgatttgctgggagttgatggtggcacactacttctttcagtcacttttgcagtatgttgcagcgtatttcagtttacgagcctggttaagtagatgcgtggttcttagtattatcttcaatttgtggtttctttgcaggaaccttcttaagccatttgactattatgcataggttggctatagctagttaaagccactcagggtagacaaatggcttaagaacattcctgcaaaggaacagtggagtgatgataatagtcataatataagcacaaagcaaggacaagaaaaaggtggagctagctgccacttctgcaagtcaccttgtaaattggttggccaagtcatcaagtgaaaatgaatataatctaattggacctgacaagatgtcagccccccaaagaaggaaattatcaagaacattatttgaaatatgtatttatacccactatgttcaacagcaaacttattctaagtctgtactgtgctttggatatattcactgtacgtgactgtgatacatactttgtaaataaatatacatattgaggatgtatgctcagacttcttttactgataagaatgctcaatcaaaacagtttggagaccactgggtgagatgaggaaagcatggagcttctcatctctcatcctgtgtctgctgcttagagagtgtttacatttttttcctaaggat

SEQ ID NO: 33085 - DNA, 2430 bp, Bovine  19866880365186
  misc_feature (1)..(1): n is a, c, g, or t
natttggcccactggcaaggaaccagtctcaaaggcaggccccagacccccgtcctctctaggcactgaggcaactgagaccaagattccaaggggggaggcctgggctcgccctgggcccatgtgtggcacttgggccaggcctgagctgcgggctttagcccccactggtcttgttgttgcttcccccagagagtggtgactccaaagagcaggtcacgctccaggatacctgcttagccatgaaaggcctgttggctcttcctgggcacacttcacatccggtggggagcccaagtcgagaacagcctgctccccactgccaagccaagggtgggcctgcctgtgacacctcccccacgtctggagtccgagtctggcccttgcgggtctgacagcacataggccacgtgggctgcaactcacaggaatggcctgcacattccttccccaaagaaggaaaagccattcacatgtgaggtcatttggttttcctggcacgaggctgagagccacgggccactcaattccatagagaacttccccacatgacaaggctcaagccctgcttggtattcataaaatatgggaatctgtggtctggccacctcaagcatctaacctgactcctctgtgtggttgagctgtgactctcaactttacagcctgaagccttgatagtcgcatccatgaaatgggaataatcaatccaccccgtcctagagttgtgataagaattaaagagcacagtactggactgatggtgggggctcaaaaagtaaaatgcagtacagttagcgacccctctctcgccagggtcatttctaatgagtgtgctagctttgcttactgggaacaaagattctgcccgggctccaagcccctcaagggggagcctctggagatgccaaaccacttattacaaatttgcagaaaagaaagagacactgcttggatcaaaaaatttcccaagtctcttctctgtgtccctgaataacccgctggactggagcttctgttctggcctgtcccacagttcacccctgggacccctgccctctcaaggcatctcctttggcacagggtcaggaactctgacctccagaggcttggagctggaggcagcgggggcatcagctctgcccaatgctttcagggacttgggaggggttcccgagaccccagacccaatatagatagccactgaacctcttccagtgagcaggaaaccaccgaagagaggccaaggcccaaagtctgagcttacaccgatcggctcaatgacacaagagcagggcagcaaacaaacggaaaaatgtggagcagagtagctccatgcagtgttctcaaacttgaacatgcattagaatcacctggagggctcgctagagcagatttacgcatccctccagacttctgcttccatagttaacggacaggtggagaaactgcatttcccataacaatccacctggcgctgctgctgctggcctggagaccacactagggaccatgggcttcatgcttaagaggatgcgttcgggggcagaagacttggatttggtctgggtctgccacttactaacgctgagacctgagcaaattcttgccctttttgagcctcagtctttctccctgggctgttaaggggtttccatgagctaacatttgcaaaaagcttgtgtgagtgcactcagtcactcagtcgtgtctgtctctttgcgaccctatagactgtagcccaccaggctcctctgtccatgggattctccaggcaagaatactggagtgagttgccaggccctccctccatgggatcttcccaacccagggactgaacccgtatctcttgtgccttctacactggcaggcaggttctttaccactgtgcacttgggaagcccttgcaaaaagcctagcacatgctaagttgttaataatatctagagttccctatttaaatacaagaactaaaatacagatactcacagaaaggagtgagataatagaaaatgctcagggtccatggaattgcctatgtgttctagatggtcacctggaccatccaagggttacagaggttgcccgggtgcccggtgtgtgcctgagtctgggccagcacgcaccagccagcactgtgccccagtaatccctggccctgggctccctgacccaatcaaggacatatgatcagtaagacaacctcagcccacaaacccacacctccctcccaagggactaccacatgccctcacaccgaatgtaagtagaaacaacctcccaaaagaaagttcaaagctccagggaacccagagccttcagggtaccagagatgccctaagcagaaagcaggtggcagggggcacaagctgagaacccagcagctgcacaagcattgcaagccacaaggaaccacgccagtgatgtgca

SEQ ID NO: 33086 - DNA, 2137 bp, Bovine  19866880384854
  misc_feature (1)..(1): n is a, c, g, or t
ncatatttagagacttgcaaagtggtaggttatttcccagtgatagaactggaagcacggtggttaagtgattgcctatgctccccaggtaaactgatagcagatcattggcacaataggagtgcgtagtcacttctagaatcagaaatgaaagagtagagccctatcctgctaagtcatctcttgctcttctgaggattgggtgggataagccccagggccagtgtatttctttcatttaccctgtcctgtgttgctttgtgcacggtggggtggaccatccgggcagcaggattgggtcctcccgagtcctccttgaacagcctcaggaatgggtcgtagttttctataggcttgctttggaagtttgcactgttttggcctacttcatgaatttcgtctttctcttcctcctctttctcatcctcgattttgggggcatattaaatgtctggttaatcagctgaacaccagtgtgggccaacatagagcagcttacgcccctcacacagcttccttttcccagtcccgtgctaagtagacaatcattggctgccatgttggagtctggacatgactgggccaccgcagtgcatggcccagtcccagggtatgaacagggtgtcgaggccttgctggatgaaagggctggagccccacgttgtgattctgggcacctctcatttcccccttctccgtttctgccgtttcattgccagcaggagtctgtttgaggcttctagagcttgtctttgtttcacctgggaaagtcccttcagggagagcgaagatctccccagaggaatggctggaggcctgacctctgtcacctgaattgtttagatgaagaagcccccagaggggttaggagggtgatcaattggaaacttaaggagcaaagacctctctctccctctcctccctctgctcattgtgctcagaagggcagcggggtcagcggtagcaaactgaagggccaactagccgcgccttgaaaggcgctcgttttgtgtttcagtaatgagcgctctctttctccccttggatgcactcagatttcacgagttacagggaacctgtcaactgctgttttcattgtatgggactcacagggaacttgggtatagggcaagctcgtttcaaagagagcagggggaggaaaagtcctgaatagatgcaaagtgctgtcatatgcagatcacagccccagttgctatgggacacctctgcccgcctaaaggacgagacgctgaagtcctgtgttgaggtggctgcttccttggagatgggaatgccactgccgaaagggcacagccagcaagcctgcactgcctcaggctcccgggtttgccacggagcccggcttaacacggcttggatcccagcagcctctgccccagactggctctgcagtcaggagcctctcactgaggcctgagggaacaggcccattaaccctggaggagtggagacaggcaagtagaaagggggtctctttaagggccaccaggtctctgctcccagatgagccaccagagcccatggacccgaactgggacctgatgtgaaaggcaggttttcaccttctttgtttgccatgccctctgagaacacttggcagtaacactgctttcctgatgggttcattttgtagctggcagacattgttttctttcccctgtttacctagagtgacccagggtaacaggacaggccgtgcctaaaagagggaaaagcgggcctgccttggctccccacacccaggtccttctgccctgcatccacctatggggacagggacgagcccggggactgtcctgcctggagtagagaccagagcaggacctacagaggagtccaacactatagaagtgcccagaattaagactctctctataagactctctctaaggcgtccttcacctggaggtccttggagtgaaagcatctggtagagctcatggtaggacctaaaagaaaccaggggagagtcctaagggaaatgttgccagcaactgtttactgaacaccttactctgtctacaattaaagggccaaggaatggccctgtctctgggggagtctgagtctgagagctgtggctaagccaggagttaggggccagtgcccttggcaa

SEQ ID NO: 33087 - DNA, 751 bp, Bovine  19866880437219
  misc_feature (1)..(1): n is a, c, g, or t
naaaccccatttaaattttatactctagtatctgcccttcatttctggcattctttgaatctggtcctaataaaggtgattcatatccatagtcatcttttgagagggtccatgtcttaactgtctctatatcccatcaccacccctgtcaccaaccgttggtgttaggatggtgccttctacaagtttattggagagaactgaactcagcagagacactgttaataagactgagttagagacaccatgttgcctggtcacactgctgcccagtaccatcctactgaagatgttactgaagctgtcctgcagttctgctgaactttttttaaaaagaagtcaaacagatgcaattttcaccttctaataccccagtatctaagaaagagaatgacaacaagccaactgcttaaagaggagcatgacagtaagggtgttctgtgggcttgatgtatgaaggtggagggagtgagatccctggggcagccatcacttcccctttgctaaatcaaggaaaccgtctatcttcacttaattctatttacttaacacaagcctaaagaaaacttgttttactttatccttctgtctcatggttgccacgatataattttcaaatgaaatttctaaatgcagaccacacacgatattccagtggacctaacattgatttatgctaaactggggtgggggaggggagatactctgaagaaagatgcttagcccagcagttttctgactgccagccttt

SEQ ID NO: 33088 - DNA, 2834 bp, Bovine  19866880441533
  misc_feature (1)..(1): n is a, c, g, or t
ncctaaaggaaatcctaaaggaaatcaagcctgaatattcactggaaggactgatgctgaagctgaagctccaatactttggccaccagatgcaaagagccgactcataggaaaagaccttgatgtgggagagacagaaggcaaaaggagaagagggcggcagaggattagatggttagatagcatcaccgactcatcggacttgaacttgagccaactccaggagacagtggaggacaggaaagcctggtgtgctgcagtccacggggtcaaaaagagtcagacacgacttagaaactgaataccaaccaaatgctggatggagagggaagacagaagaggcacttgtggtaactcattcacttcaaggggctctaacatcagtctttactgttcctctgtgtgctcccaatgccgcctctccttttgcagtatgcttggcacacagcacagaaaccttgtattcctgctaattgctccacgtgcatctgtctcttccatgcctttgtggacattgggaggtaggctctgatttaattcctaccctccctaacactggcagatttgtcaagccattcccctcaataaacttggagaataacagttggaacagcatcacaatatgctttgtggcttggcttttgctctttcacatgtgattgctgatgtcttttatcatggctgccagggaggttacaactgcatggatggaagcaagcccccacaaaagtgtgagcccgcaggactccccaggctcacctatggacttgtatggacgccagggtccatggtggagaggcagggctgcttctgtagaacttggtgcttattcagggtgcctcctcattatacctcaatcttctaacgagacctgggaagttctggtgcttcacaatctgagttcgagccccagctttatctcttattggctgtgtgatcttgttcgagttgcctaacctctctgaacctcgagttcctcatcagtatagtaagaatagtaatattcttcatctgtgggttgcctggggattctatgagatcctgctagcaaagtaagcattctgctccatggctggtgcctgcgggtgctcaaggaattgttggctcctactgtatgcacttccctcaaggcatgggtaggctgtggatgtgcagttatctgcaaggtcctgactgatgtagcaggagtggtttttacttagaaaaatcaacaggaatgatggggctagaggagggagactcacctgggaatgaaattgcccagggtgatggatgttccagtcatctgctgcttgggagatcaagcaggacccatacgacactgacttgattttcctggccgaggtgctcacatgtgccccaccacccagaactgccccagcattccatgagtttcacatggccctgggagccttggctcctcttcctgaagccagggatagacttgcccccactaatccccccagggtcattcgcagggaattgcctggcccaggtgccatagagtatttggagctggcgcgggagggaattgagcttgggggggccctagagcctcgggaagcattttggttccatcccttgatcgaatttcaggctccagcctgtggacacgtcaggagcactaggcgagctgtgacttgcagtctctgctccttccttatctttcctctcagtgtccccagcccatagtttgtttttcaacctccaggaagatggggcagatagacagctaccaaaggagaccatgttggaaggcatttctgagagggggcagcagcgcctgcccaggattataagttagccttggccaaacgtgcctgcggtgtagagcggcgcgtgagggacatcagcgccctgtcctcagggtccatcaagtgtttgctggggtcacagtgcctttcccaagcagtgcatcgtgttaggccacctttcagaaggtcctgtcagggaatcgttctcagtatggagtgcgttctctggtgagaagcctggccttccacagggagggtcgttttcctgagaaaatgccggctttacctcatctttcaggggcctacttcctgaccaacaggctctagatacgtgaagctagagccctgtgtctgggaaagattccaaaactctggtgttttcaacggttatacttactgtaaatctttactctccttaaagtagtttaacagaaagaagacattcgatcctcctttagtacatctcaatagttcattttctctgtcatctgaactcaggacatagagaaataaaaccttactggacctagtggtttatccatcatattctattaccttctaagaaggctgccctatttgcatatctgatcagttgaggaacacctggttaaactatttaggtgatgacaaggttaggattggcttatttcctttctcagatgcaattctttgggctctccacccagggtcactgctcatccacatggcacctatttgcaaattagaacaagccaccccttcccctgtgtggatgtagctatgccagggggcacagcttggcaagcagagtgagggctggattttagcccctgctttgtgcagtgaacagcctgtgcaactgtgcatggtggccctgcctgcgcatgttgtcactagttcagtttcttttcttggagaggtgtttgctggagagggagagggaagagaatgcctattgctgtatgttagagacaggttcctggaggcccaagagcagcacttgaatgcaggcatgttttgagagtttcagggcattttccagtagggtgtacttttcctgggacagagaacccagtctttgaagttaagacagacctgggg

SEQ ID NO: 33089 - DNA, 956 bp, Bovine  19866880456433
  misc_feature (1)..(1): n is a, c, g, or t
ntcccttacacccctgctgattgagctcagctggctggctctcattcagaatctcttgcagttagaatcaaatggcggctcctgttagagtcatctgaaggctctactgagctagacagccacgtgatcctcactcacaagctggcagtgatgtgaatgctggtggagagctcagctagggttcttgacaagagcacctacctctggcctttcagtgtagcctggacttcttacaggatggtgactggcttctagaggtagtgtgtcaggagtgaaggttctaacagacgcagcagagatcacaaggttctcatgaccaagtcttaacagttccaggatgtcactcccaccatattctgttggtcaagcaagtctctatggtctgcccagattcaagaggtgagaagcagcacaccaaccctagcccaaaaatggttgagggctgccattttggaaactgtctaccacaacgtactgtagataaagataaaattcttttattgagctgggagagggagaggaaatgagctctgggctaaggaagtcgagaggaaagagactgtgtccctgtgtccagaagaaggtacttggccaagtccctccccacactgttctcttacctcacatcccaaggtacattcttaaactgtcctagactcagaacgtgaaggagagtggaaaaaaaccactgacatcatcctaactaagcagccttcatcgagaatgagtctgctacgtgactgttgccacaaaaccgttttatctgcccttgctgcagcgtggcctttaagggacacgatctggtgccagtgacatcccagtggtggttgccctggagacccagaggtcaaggatgatgagggagagtgttgccaagatgacctcacatagaaatctttttgctttcttgtgaccacctggtaactgagctacaaaggaaagagaaaaagccataa

SEQ ID NO: 33090 - DNA, 1186 bp, Bovine  19866880461648
  misc_feature (1)..(1): n is a, c, g, or t
nagctgggactatccccaaaaggaaggctcagtaactgctggggccctctgccctgctcattctagaaagctataggagccagcagccacccctgtgcctggcctattcgcccaacaggcagccagtttcatcctttgtgggtcaccaggttttggagaatgagatgttaagacctttgcaggaaggctgaggatgcataaacataaaatccttgttcaaaggcaagtctctttggcatccttctcatgctgccgggtgatgaggaatgagtcttactttagggacacagacactaaagctgtgggcatgactagccctgagggatgcagggaaacattctcaggcaatgatccaggccttggtacttgggagcttctagtgtgggagatatcttcgcctcttaacaagtaggtcactattgctcctctgaactctattgttggattgagctgtgttggaggcaagatctggtttggactttgattcagggcaggagcatgatgtgaggtcagcgaggggtcagagatgggcctgagcttgatctctgcctcttcattcagaatcattgttctttactgtgctcttttctgaactcaccacggcctcagtacagcagatcccagcatgcagatatttcaagagcaagagaagacagttaattttatcttatttagaaacaagcctggatgaaggagaaataaacagggccattctctttgtggtttgctgagattccctggaaagcaagcttaggaggccagagcctatgtcagagcaggagagaccaacgccctctgcaagatatgtgcaaacagaaagggcttcagaactggctggaagtcatggagagggaagcaaaatttccagtttgggtccaagtcttttcaggccttgacctttaacctaaaagccagagaaccaaactgatctccatgatgaccatggctccagaggagacccatgggccaggagatgggggaaatgctagctttgcatggccagggtcacaggaacccaaggaactgccctcccctttgcaggataactaaagcaaagctcctggttcctcctcatcccaagaccttatcgtgcccttgtctgtgactttaatcattttgaaaatgaagtcccaaaaaggattaactaaggatgaatcctgtcacctctactctagatattccacag

SEQ ID NO: 33091 - DNA, 2068 bp, Bovine  19866880566038
  misc_feature (1)..(1): n is a, c, g, or t
ngcgctgaaactctctgaaaagaaggaatcacagaaccgggccagatgcgagggacaggctccgactggcttctggctgcctgtgcatcacgtgttctcctgcctgagtttttctgagcaatgcctcggccacagactcatgagtaagaggtgcccatgagcctgtaaatgctttccatctggcctcttctctcagaggagaccagcaaggcgccttcatgagggagacacccagcccacccggacccaggatactctagcctggctgggaagcgttttactgttgttgtctgacaggggttctgttctgctgccactctctgctcatgctgggcatcagtggacgtggacacttgggtccacagacctgggcattaacccctatctgccataaactagcctcagtgcagtctctgactttgcagggttttgattccctcgcctgtaaacagggctgatacctcctaccttgttgttgggatgaaataagattcaggatgtgtaacagccagcatggtagctgcaagagagacagggaaacacgaccgtggctgtttcagagggtgggagcctggagccccctgcagacacaggagcagcccaaccctgacatagccctgctccagggcagcccgcaaaggcagccagcaccttgcaccccgagaaaggcaaagaaagccatccctctggcgaagcctacctcccaaggccaatctcaggagtggccagtgcctggggtgccactgcagggcaggagggagagacaacagacgaggagaagaaaagagggaggcagagagaagcatgggaggggttcataaaaagcccccatctgggctgagctgccccacctccactgctgcctcagcgctgggacctgcagggaccagagacagtcacttcctggctcctcaggaatgcacaggaatgtgtgtgtcaggagagaggtatttggggcctagggagggtggagacccagctccttctctagcgaggggttccccttctccaatcaggccgacttgccatcaagcagcatgccctggcagagaggaaaggagatggtcaaagtggtggttaggactgcaggctgtggctgggcaactctggcttcacaggccagaatgccacgcaagaacttgggtgtgcatgctgtgtgctcagtcatgtctgcttctttaagaccccatgaactgtagcccgccaagcccctctctgtctatggcttgggcagattatttaatctcaataatgcttaagtgcttctgtaaagtggagatgaaaatgtattagcacctagatcttacgggtggttatgccaattcagtgctaagtgctaacatcaggaccactagcatcaccagcactggtccctctgaccatttctggctccctcctcaactgcaaaatcagaagccggtgccaggaacatctgagcgtaagggcagccatgcaaagggcccacctgtctatccatcaccacctccacccagtagagtacagctgtcagcatgtgtgaaattcacctgaacttgaccaccacccacacagatccccagcagccccacctgccttcagagcacagaggctcacctcgtctatctgtcggcaggtgttctggagcccactggcaaggatgacttcagttgttgatttatatgtccccagaataatttttttacttaaaccagccccacaaggaatgaactcaaagcagtgtgtccttggacaagacagatcaccaccatggacctcagtctctttatctgatgtgcagaagctcaggtgacagcacgggttcccttctggttgggcctcctgtgatttgatttcttcagactgctaccagggaaaggatagagctgggttctgggagtaaacaaagtgaaacacaaggctgcccattgacaccagtcccttgggcagattccaggctgaaacccttgttccctggctccggcaggagtttggagtttcttctacccacagaacccacgggcaggccgcctccctcccaccaggccgtgggtcagccaagccacacaaagggctgattatgagtggccca

SEQ ID NO: 33092 - DNA, 806 bp, Bovine  19866880575427
  misc_feature (1)..(1): n is a, c, g, or t
ntacatttcattctggaaacaatcccatatatatatatcaagagtcataaaaatgtctaacttttggtcccatcaccccactctaggcacttatctcaggaaaagacctctcaggatgcccttctttcctagaaagggccaagctcattcccacacaagtccttgcccttgttattttctctgtctggaagccggtccctccagacttgctcacggttggaagcccttcaagtctccgcttcatgtcaacgcctctgacaggttgctggtggtcactctctagactggctccatcactccgcagaatcaagtggcacagagtaggaacgtacatttcgagttgagaggagaaatgtgcagtcgtgaagccaccaccagactacttagatagggagtattacctgactcactttggaacccaggaagccacttctgcaaagaaactctccttgcagggggtttcaagactcttaagatactggcagtgtgggaagcaccagccaggggccatccggtcctttcttccagcatctgaaaggctgcctttcagatgtagatagtgcatggtgggctatctgccctccctctcaatcctgttctttcttggcttctaaaacaaacaagtggtaaagaatatctgcagggtgagagtctctgtcaaaacaacacctagtcctacttaattacgatgaataatttgaacactctcaaatcagacaatggaaacattaagagtttccacaaaaacagaaagttggccaagtgggagggagccccagaagcctccacagcattctgagttgggg

SEQ ID NO: 33093 - DNA, 627 bp, Bovine  19866880614663
  misc_feature (1)..(1): n is a, c, g, or t
ntggttttctgtgagttgggtggggaggatgcagttaaacttcatttcagatgcatcataaaatttggagaggcaggcctatggcctctgtgagcaagtggggtacggttggctgctgcagcggctcctctgcggggtggtgtcaatttggagaggtttccaagaattccgtcactcctagtagacaggcagcagagggacacagtcctgtcccacctttcctcggcctggtctctccaattagcattgtgaatttctcctttttttaaggatacttaaactccatggcatagtttatcataaacatgcaatactctgaaaatatccttctaatggtttttaaaaatttctttactgtaggctttcatatcatgccatctaactgaagaataatttatagcccacatcctgcattccatggaccaaccagaccatagccctcccagagtttccagtctggactaaacaagccattcacaataggaaaaatacaaacaggcgatatacacacaaaagatgctcgacctctctaggagctgaagtaaagcaagtacaatcagcaacgagatatcattttcatatgacagtcacaaagacgaaagaaaatacaatcccccagtgtaggca

SEQ ID NO: 33094 - DNA, 2758 bp, Bovine  19866880625905
  misc_feature (1)..(1): n is a, c, g, or t
nccacaaatcccagggctgtgtggcaaatggaattccagtgtgtgtgtgtgtgtgggtgtgttgcagccttgatggtgctgtttgaaatcctccccatgcctggaatttgacaagcaacagagtagagaagggtcaaaaaacccaaaataaaggggatgggaaaacaaagagctttcccaaagccatggttcaagttgtgggtagaatatcttcctgtttctcatgcagagcccctgccttcaggccccaggggctggctgggctggtttggccagttcaaggccagagctgaactcctgattccaacccctgctgcccccaccaggcttccctgggtgcagggcctacgtgctctggggagggaagcatgcagtgggggagacgaggaggctgttagggtttcagacactttctaggtgcctcgggggacctacatatttcctatgtaaagttcagtctgtttgcaattaggcctgtcttctttgcttatttccggagagattaaaaatagcgaaatcagcttaatctgggactctctgagatcaacaaggccactgtttccaacagtatgaaaataccaagcagccccaccctcattcacggatcacatggcgtggtaggcagggtaggctttttgtaatgtaggaacttgaagttgcacgaattctcaacagataagactctgtgttttgatcctagcaaggatgtcttcaactgaagtagaaagggttccatacagtttagggtctgaaattctctctttcctcctaactgagctcaaagctgtgaaagccttttcagaaaaaacctactgtggttcaattacttcactaatttgtgcctttccttagggatttgggacagagcagatcctgagcaactgtagacacaaagatgctgctcctgacctgccaccatcagcacagcagatgtccaagtctgtttcatcagagattgagagagatgcggggaataccctccatctgtgagatggctcactgaggtgaggagggccatgggtcagaggaacactccttcttacgctctgcattagtcagtacaggaaagactgggctacagtaacaaatacacccccacatctcagttgtcacaccatctgaaacttgggacatcaggattgccgtagtcagggaaggtaggacaggaggattgctgagatgctgttaaggccctgtaaaattggctaataccatttctgcccatgtctctttggctggaacacagtcacctggctttgccctaacaagggacctaacaatttcccagcaagggaagctgggaaatatcagatttgggatgagtaggcatcactggaggctttgacctggtgtcatcagccatggcatggaagcctaaagaacatcctcagaaaaacttaatgaagctgtagcagtgcagtcctatggactgacagggcctgctatcaccaccactgtcccctcctggcatagatgcctgaaggaaggtagctgcttcaaggagacatcctggggcataaagcagggctagaagccaagatgggacctagaacaggtagccaaagagaataaaaaaaagtacctggcttatagtgtaagtagacatatctcagatcttcagaaggcaggaccaaaatccttcagttgaaagcacatggaactgtagtaacttgtgcttaccgccgtgagaggtggctcagtgggtaaagaaactgcctgcaatgcaggagatgtaggttcgatccctggcttgggaagatcctctggaggaggtcatggcaacccactctggtattcttgcctggggaattccatggacagaggagcctggtgggctatatagtccataggtcacagcagttggacataagtgactgagcacacacacgtgcttatggggaccaaaggtcaacttctctactagactcaggccaggtgaaatgtcttctttgtgtctgtttcacttcaggctctcctacaggcagaactcatgggacaaatgctttctcctgctcgaggtgcttcatcccaacatcccagggctcctttgttgccttcaactaggatacagtggtcacatctgtggggcagggctcaagtgcttttctgggatggtagttaagaagggaaattctgcaaatagtgaaaactaaaccaagggagatttaataaatgagagctgatttacatacttcaacagcaacagaaatagtgaagcaaatcatccaaactgaactgagtgatcattatgaattttcctctatgctgggaactaatagaactttgacaagaggatgtcatttgtatagagtcctccttggtattggcttgagaatccggagctgaaccctcactaatatgtggatgagctgatgggactattggttacaactgggtgtgatggttaattttatttgtcaacttatataggctgtggtgccaggttatctggtcaaacactagtctagatgtttctgtgaaggtattttttagacgtgattaacatttgcaatctgttgattttgaagtaaagtagatgaccttccataatgtggggtgggtcttatccaatcagttgaaggcctttaggacaaaggatgaggtttcccaaagaagaaggaattctgcctccaaattgcaacatgaaaattttgcctgagtgtctaacctttggattcaatactgtaacatcaactcttatctgaatccaggctgcctgctgccaattagggaaaaaatctctcaacctctctcttgg

SEQ ID NO: 33095 - DNA, 1688 bp, Bovine  19866880629840
  misc_feature (1)..(1): n is a, c, g, or t
ntggagtgtgcctctgtctcctgccggatgctgatggatgcactcctgttctgaatcatgttgcccaaagccttagacaacagtgttcaggtgtgtgggaggttgtgtaggtgctggtgagaacattatagtggttaagtgcacagaatctatggtctaaccaactggagttgaattttatctccaccattttctcattttgtggctatttcacttcgtgaacctctgctttctcttctgcaaaatgggaacaggggcttccctgatagctcagttggtaaagaatccccctgcaatgcaggagaccctggtttgattcctgggtcaggatgatccactggagaagggataggctacccactccagtattcttgggcttctcttgtagctcagctggtaaagaatccacatgcaatgtgggagacctgggtttgatccctgtgttgggaagatcccctggagaaggaaaagtgtacccactccagtattctggcctggagaatttcatggactgtatagtccatggggttgcaaagagtcagacacgagtgagcgaccttcactttcactttcaatcccttctcacaagctcattgcaaggactcaatgagattatagtagtaaaacactgagtttagcatcaagttataatgcatcactctataaatgagagttatcatagattattattaaaagaaaatccaaccattgagggtgttgctttggcaataggatcagctatcagtatgcttctagattttgctagatttcttatagctaccggggaatttggacctcaggttatctgtccacatgctacaggagaaagaaaacaaacataattgttgttattttaataggtaaagaaactgtcaattctattattaatactcagtttcaagagaagttttaacagagaatactctagaagactattttttatatttgatctaaactttcctaccccttcttggcatgatcttaaagtcccccaatcacaaagcatgattcctacaagtttaaactccagaaatgtgatgccctttcgcctgcccttgcagagctccccccaccatcccatccttccccaaatgatgttcttaaccaaaataaggctcagaagagagtctcttaactctgtccaaaagctaaaaccaagagaggacaaaggttctctggttagtcacatttcacccaactatttttagctggcatagggtgaaacaaggttccccaaagatctgggtcctgtgaaagttggaagctctgccaagatggaggaatacagctccccccgttggaagagagagaacaattccctccttcatcacttgctgccaaggagtcttccacctgctctgtcttgcttacatttgatcccattgggttggtctgcttgttcactgtttcagccccaacttttgctactgagctgtcaatttgtcaattcattctgtggaccatctcatgccacattatcctccagctcttgtgttggaagcttggtgggtttctgaatctctatcctaatggaaatgcatgacaaagcgtcctggattctcaacctggacacacttctttttcctggtttatctctcctaagagccccaagctctgccatacccttctcctttcagccctttccttctcctactcacatggatgcatcaaggacaagtatcttcctg

SEQ ID NO: 33096 - DNA, 1615 bp, Bovine  19866880635177
  misc_feature (1)..(1): n is a, c, g, or t
natttctctttttttaagattaaaaaaagttttttttgatgtggaccatttctaatgtatttattaaatttgtcatgatattgcttctgttgtttatgtcttgttttctgggcatgacgcatgtgggattttaacttcctgaccaaggattgaacctgtaaagtcctgaactggaaggtgaagtcttaaccattggatcaccagggaagtccccctcatctagagtatttctaatgcatttgctccttgtctaataaaaaccaaataagctcctttgtgagagccttcaggatagctgtctctccgagtaattaaatcaggaatttgggctagagatgccagttgtcaagaagacgttattaaaagctggctcaggatgtggaattcctgctctccttgcacctgcccttgcagaagtggttctggttgctctcctccccgtcgtgagaacaaggggtgcatcattacaggaccttatctttcttgactgcctcctcctccaattccctgtcttcccaatggtcttggtgtcttctgtgatgactagatgtctttaagaatcagagtctcaggcacaggtttggcatgaggtttgtgtgagttcctttctgacttttttttttttaaacaaaggaggaagaatatgaacacaaataagtggaaagtattttttctttgaattttatatatgacatttcataggtggtcttctagcttcttctagcagtaaacaatccacctgcaattggaagaccggggtttgatcttgtgtcaggaagatttcctggagaagggaatggcaacccactccagtattcttacttggagaattccatggacagaggagcctggtgggcttacagtttgtggggtcgcaaagagtcagatgtgactgagtgactaacacatacacttctagcttcttacaatgtagtaaaaccaatttgaaattatggagtttctcagcatcgggtctggcaagtgtcagtgaggagaagaggctcaaaaccatctgtgcccaccataacaatggagacttgtgcccttgcccctctctccaacactacaatgggcagaagtttggggagctgaaggcaggggcctgctcttctacagaacatgcagacactgaccatgataacttgtctctgatgggaacattcttacacaaagattgctgtggatctgaagtggcctttgagatgccacccccgagtgctggaatggaaagaggaccccactgatccccagacacagacagcaacagggctcttcatggccatagtggcctcaaaaggcactggaagacacagattcataaaattcctctttatagagaataaattaaaaacataataaatatgaagggaaagcaaaaagttatgaaaagtaactttataagaattttaaatcttgtttactgaaccataagataggaaaaaaatagtattaaaagtgtataaaaccagaaaaaaaagtgttatagtggggacttccccagtgggtgaagtggataagaattctcatgacaatggaggggacacagtttcaatttctggtctggggaagatttcacatgcagcagagcaactgagctcgttccccacaacaaatg

SEQ ID NO: 33097 - DNA, 639 bp, Bovine  19866880645502
  misc_feature (1)..(1): n is a, c, g, or t
natttctaatagtctttctttgaagctttctaacccctaccaatttactgtggtttcagtttctactttccctaaacaacttcctctttcccgtcaaaatcatgatcttagcaatgagagtcagagaggcaactctgtgaatctcgcttccacaatattatcccaaagttatccaattaagaccaggctttcaactgttgtttaccaaaatgcccagtgatcaagatataggcaccatatcaaggctctcctacaaactatctgggcagaatgggctctttccctcctgaaattaccttataatcttgcatagaacatcttgaaatcttcgtctaaatctgctatttgctggagttctaatcttttaaagcaaggctctaaatatgaaaagccgaagggcataccgcacagggtaaacccaagtccagctctctgattgcttattacttatacacccttagagagtccgtaacaaagaggcctgctgtttgctttgcttaatctggtcttaaaatctctgcttctttgtcagaaaacaatatttgcaattgtaaaaaaaaatatttaccaaggaacttggatagcataagtcaaaggctaagagccaaaggtcaggagttcttactccaaatttccttg

SEQ ID NO: 33098 - DNA, 1483 bp, Bovine  19866880695197
  misc_feature (1)..(1): n is a, c, g, or t
ntgagggaccatgctgagtttctgcctgaccccagatcaccactgagggcaatgctatgggaaggttgcctccccataggcctaggggctatctcattgggatgacaccattggagactcaatatccactcttctgttccttcagtcttcaggcaggatactgggcagatggaaactgagtttcaagttaaaggagtgggtagaactccatacagtgatttatggtctaggccagggctttcaaaactgtataaagagctattcctggccaagttccttattagtcatatgtgtgaaatggaaacatcactttgtcagaaatatactcccccacctcctccccaactgtgtctataatcaggttctggaaatagagctgggtgttgggaaaaggacttaagggaagaacactttactaatagaccttgcattaccctggcagcggcatttgcaccaaacactgatggaaagagatcctggggcaggcgaaaaaaggataaaccaacttcacgttggcattgcccccagaggtgcttttccgtaaatgaatagattgtgaatgtttcagctttctcatttgtcattttatctattcagcactcatctactcgtctggtacccatgccccattttcctcttggggaatcccaccgtgtcctctgttctcagtccatgagattccaggtcagctcaagacgaagcacatgatccaggcttaagccaatcagtgcagtccattctcctggggatagaggttagtttaagaactggcagctgatcaatcaaattcaattagataccttgaggttttctctaggatttctgggaaaaagattcactctttctcttaaacctcaaatctgggagatgtagggcctggaactcggctattttttgatcatgtgaaaactgagtctgaagccagcagagctgagagatggaaagtaatcacgtcctgacaatggtcctgaatccagttgtgtctgatgctagttctcattctagatcttttggttgcagggaccattagatttcccttttgcgaaagcagtttgagacagattttctgtccctggcctttgttaacagttgtttaaaagaatacataaggcttaaatggaactaaaagaaaagcaggagggccagcacgaggcctgtaatgtgcaagcacaatctgtggctcaggtgcacagactgaggttcatcacacactttaatgtgagcaaagcacaccaggacgtacccagacaggaagatgaagagccccagacaggaagttcccccagcaaacaccaccttttagagatgaaattgctaagacactagaccatttctattgagttcagtctgtgttacatcccactttatatatttaatgcaatagtaaatactactactttagtaaaactccctcatttataccatttcaacttataattccctataatttattccttttccttagaattcataaaaaaaaaat

SEQ ID NO: 33099 - DNA, 812 bp, Bovine  19866880817752
  misc_feature (1)..(1): n is a, c, g, or t
naaggagactgagccaagagaactccttttctcatgccattcaagaagcactgcacaaaatgtttgccctctaagacagcccagtccaggaacccaactctcaggactggagaatcatggcagacagaggagccctctggggaacagaaccaatggagatgatttagggtctcatatccatgtgctaaccaaagagctaatgtagatcatggcagtcaaggtccatcagaaaaatgggactcaccccaggtagtttaagagagagagtttaatgttgagaactaattacaaatgtgttggaagagcttgaaaggagaataaggaacagtgaagcaacatagagactaacaagagtaagaagccaccgtcacccctagggctggattaacaaaggaaggggtgctgttgttagggctcagacgatagagctgcccatctccagctcttcacagagctgggtccacaaagggattgtgctcagttgctcagtcatgtccagctctttgcgaccctacagactgcagccctccaggctcctctgtccatgggattctccaggcaagaatactggagtgggttgctccagagaatcttcctgacccagggattgaacccatgtctctcacatctcctgcatggatgggttttctacctctagcaccatctagaagcccatacaaagggatcacggaggaggaattggggtcattggagacatcactggaaaaagagagagggaggcagaaatgtgtggcttctcccatatttttcatttctccctccagggccccaaactaagcagaatcaatgga

SEQ ID NO: 33100 - DNA, 2681 bp, Bovine  19866880839574
  misc_feature (1)..(1): n is a, c, g, or t
ntgacttatgagatgtaaaaatgacagaaaggcacgtttggtgctgattttgagatttctattagattgacccatataaaattgtcattgttgtaggttgaaaatgcttcaatgtcagcggttccttaaaagttaaccctaacaatttagataattacttgaatggtgataataactgagaaacggaatccgtgaaacaagaggaagtatttgtgcaggtgagaagaactaaaatcttagttttagatctgctgcatttaaactacttttggaacacaaggtagatatccagtggggaaatctgcagcgcagaagagaaagtgttagtcgcttaatcatgtccgactccttgtgatcccatggactgtagcccatcaggttcctctgtccatgtaattctccaggcaagaatactggagtggattgccagtccctcctccaggggatcttcccaacccagggactgaacccaggtctcctacactgcaggaagattctttactgtctgagctaccatggaagcagaagagaggtcaggcctagaaatgtagtggtcagacaggagtgtgattgatggatgccatcaagaggctggcttgactgcaagccattccagttataccccaacataacatgttttcaaaaaagagccactaatgggtcataataccaactggaatcaaaacctttaaaatctttaaaaacagaatagaaaaaaaaaaaaatcagagtgagtcacacatagtaaagttaagtactctttctaatatgtatctgtgtaccagactgcaatgtgaagttttctaccaaaaaagatagaaagaaacaagagcaaaggagagaaaggacagacagacattagtctgatatgtgtatctaaactgctatcatacagagaagacaagctatgggaaaccaatatttccacaactcagtgggctaaaagaaaggaaatttggagtaattttagcactcctttatctgaaatcccagccacagtcaatttcccaaggggaaatctcccttctgctcacctccagagaatactttggtgttcccactgttgaaagccaggcaaaaaatgttggaatgatgctctcctttcagctgtatgggcttaactctggagtggatagcttgttccatgtgccatagtagaacccgacgatcatctcctccttgagaggggagcaagaatctagggttaaaacagctggcatttcaaggctgatatttcatttttccagcctgaatcccatacttttcaaaactgcatctccccacctccatgagactctgatgcacataaacccaggactctatccccttaatcttcagtggacatgtggcctctaagtcactcactcttccccaggaattacatcttgaacagacacacagaaattcctgaattttcagagacccagtcatttacacatttcttcatttgctacctaaaattcttccactaaagtttccccactttttttctggtctaacagaacctgagttgctttctactgcttgcaaagaactctaaagaaattatccccgaatttaaagcataatagttttccaaagcactctccttgatgagatctcattgactatgggacactagacaaaggataactgaggaactgcctgtcacagcagcaggatcaagacagaacttggctctcaagaagctcggtccagctctttcctctgcacaactctctatagtctgagtagaatgagcaatattctactgcatgcgccagctcctagagaatgagaagatacatgttctacatattctttatttttgcaaatgcattatacatgtctggaaggatgaacaatggactgttaaaagggtttactacttccagggagtaggattaaaaaagagttagaacacatgttagaaagtttttacttttatagatttggcatggcttgactctttataataagcctatattatattcctaataaaaatgtaactttcaacagggcagaaaaatagtaagttctatacttcagcctccccttctccattcaatataatagctacaaattgtatcacaatcatacaaaagcgtaccactagatgcaaccactaaatcaataagtctataagaattaacacagaaagatgaccacaggtctttgtcaggggaaaaacatgaagtgtaaaatagtatgcataccaacatccttttgtgtaaaacaaatttttaagaagctccatgacagcaggaaccttgtcagttttgttcactgcagactttctagcacctaagtgaatgccccaaggagtagacactgaattaacatgcttatgtttgcatgtctatgcttgtatttgcatatctagatggctgtaaaaggagttgttttcagtggacaccacttctaggctagggctactgggagacttttcactgtgataaaatttatgtaacagccaatgcagcattttaatcatttatgaatgtacaattcagggcattaagtatatttgcagtgatgtgcaaacatcaccattatccatctccagaacttgtacatctcctcaaacttttagtttgagtactgtacccaatatttattctgtacccaatacacggtctctctccccagtgctcagtaaccattattttactttctgcctctagaattgatactctaggtac

SEQ ID NO: 33101 - DNA, 1735 bp, Bovine  19866880868831
  misc_feature (1)..(1): n is a, c, g, or t
nctgtaactttctaggttgctttactggcctggattgcgcttcctgacaaattcctatacctctgctatgcccatacaatatcaacacagaaaggttgagtggtgatgtaatgtctgaggccaagccaggtatacaaggctattttgttggcttcacagggtacaagtcaggagatgagatatggtgatttaattatcatgattttaggggttctgccatctatcaagttcaaaagaaagacctgtgtaaatgataccaatgttcaggcactcaagggctcagccctttcaagaaaactttattccctctcctactttcagcaagatgtagtgactattaggccaggtgttaaatgagactaaagcaaaagaagaattttaaattaccacagtctatctccaagccacacaaacccattagcctgagctcctctgctggacttgagcaatctagcacaagagccatttaaggaattgtgaaagaaaaggaacaaaagccgagtgctgtcttaaaagtgagtgccagaaaagctagcaggtggaaaactggccttcttttttaaccctgttaagagactgactcactaagtatacagaggggaatatgaagcttgggagacagaatgtacctagtcaggcttcagggagaaaagcaaaaacaaacaaacaaaaatccaagtatgacacacaagcaaggaggagaatcctttagatttaggcagcctccagaggaaggaatgctatttgctgttttactgaaagattcctcattataccgcaagactggaaggcaggctgccttaaaaaaaaaagttaaggctttatttggggctaattgtttctgttgatacccaaccaatctgatgtcacttatgtcaccttatctgatgacagacgttatcaaatttgaataagattgtgcttaatcactcagttgtgtccaactctttgcaaccccatggactgtagcccaccaggctcttctgtccatggggattctccaggaaagaataccggagcaggtagccatgccctccttcaggggatcttcccaacccagggactgaaaccaggtctcccgcactgcaggcagattctttaccatctgagccaccagagaagccctatattattattattattatatgtatcaataaataaactgtgtatctgtagccaaaagtgggggtgacagagtgtatacaaggctttgaatcaaagtctcaaagaggatacaaactggcagtcatgtaaatgtgtctaccacagcatgtggcacacagtagatgctcagtaaatatctgtcttcttattttataagatggaagggggaaagggcatgaagttaggacaggttcagtaggaaacaggaaaaatggatgttttcctgctgaagcagaggtttgaaacttgtggctctagaacagaacagatgcacctgttcatttaattcatacaatgaagtatgaatttgctgcaatacttaaaattcaagaaacttcattatcagttagtcagtcagttcagtcactcagtcgtgtccgactctgagatcccatggattgcagcacgccagaccgccctatctatcactaactccaggagtttactccaactcatgtccgttgagtcggtgatgccatccaaccatctcatcctctgttgtcaccttctcctcccgccttcaatctttcccagcatcagggtcttttcccagagtcagttcttcacatca

SEQ ID NO: 33102 - DNA, 1608 bp, Bovine  19866880870843
  misc_feature (1)..(1): n is a, c, g, or t
ntccccccactcccgttaagaatttatgggttatttagatgctcctgaactgagagcctgtaggaggctgcgtggaggctgctctcctacaagtcctgtctggggagtgtggttccacacgtctgttccacacagagccaccagggggcacacgcctcctcttcagggcttgtgttgaggctgggccgttccctgcccctaaccctgcctctcactgctgtccagctcagggtccaaactgacctctgtggcattttccaatggagtataatttcagaaggtcctcatttggggataaggggctaagaagaccaaggaaccccgcatagaaaggccaaggagggcagtactggtttctgtccccttaaagatttccttggctcagggggttcacacaggcgggtgggcacaggggagggaagcaagctgttgaaccgttttctgtgcaccctgaccccacccttcatagccctgttacctccttggacctcagatctccccccatcccctactcccccagcccttggcaatgaccccttggtgagctacttccatgccagcttgtacccaatccctctggcaaacaggcctgggcactgaccccggggcccggtggctgcagggcagagctgctgtcctggccaggcctacctccctgcaggaggcagcagcaaggccctctcggccaccacccccacctccacctcgggaagggccaatggatctcttgttcctcttttcctcccagcaggggttggcacggcaacgcctggcctggggtcctcttacacaatcaagcaatggccggtcgatgactgaccaggccggcccggtacttggtcatggagcgtgtgtaccttggcgggcagggccccttgttctggagacttgctgtctcaggagggaggtctacagggtattcttcacggttagctagcactagatgggccacccagcttcccagaaacctcggtccttcttgtcctccagaggccattcgatggagcagtggttgcttttcccttctgagccctttagctgtcctactatttggatcttagtctacttgcctacctgtccacttgctcaatggctcggtggctgtggaagtggagatacttctgccctcactcatgctgcccactgcccactgcccacttgtccactccctggtcctctcaccctctcatccagagggagtctgaacagctcagttgccggtcttggcactgaacccagccattagggaagctctaagtgaccgagggcaaagcttttggggtcagagagaccagatgtgaatcctgactgtactgtttccaggccacgtggcaatgggaacatttgtcaaatctccgagcctcagtctcctcatctgtaaaatggggaccctcttcctcccacagtgggcataaagattggattcggaattaattagggtgctttaaccagagcccagggaacgccggctgtggtcactgggcctctcagtggccatgtccccggctgtggggactccacttggcctgtttcccatggcttccctgtgcctcaggttacacccgggaccggcaggggctcatccctgcttcttgaccaggctgtcct

SEQ ID NO: 33103 - DNA, 1575 bp, Bovine  19866880881127
  misc_feature (1)..(1): n is a, c, g, or t
ngagttggaagcgggaatggtggcttggagggcagcagctctccccttcccgtaacatctgccactgacatgaacggagcctccaggacggctgggacacttgtagtgctgactcctgtggtgaggagggagacagtataggccgttttgtttagatgaggagccgctaaaaaagctacacggtgttagttgctcagtcatgtccgactcttcgtgaccccctccggactgtagcccaccaggctcctctgtccacgggattctccaggcaagaatactggaaccggttgccatttcctcctccaggggatctcccccaacccaggggtcgaacccaggtctcctgccttacaggcagattctttaccatctgagccactagggaaaaccaaatctgtggcagaaatggtgcgcgctaaggtctgtctctcttcatcagtagacttctccacgctccagctgttccctcctgagaactcacttcttacccccttcatccactctctgggcactccttcctctgtgtgagaccctgccctaggaactagatacaccaagccagattgtctcagcccctcagttttgttctctccatttcccttccttatccttccatgaaagaagcaggggtcacggctcttccagctccttcccatgtcactgtgacagcaggtttttaaaactctgagggatgggatgctgtaaaaagtgctgggagaagagatgattcactctcccatttgaaaacccatggagcagctgttgaggtttgtaattgtcctctgtaagcccctgtatacatattaaaagatcccttggagaagctcattcctgattagggggaaaaaaaaaaagatttgggtacaattaattcccagtgtcagatggaaatgaaatctttccaaagctgttgctgtcgttactgtcagtgactaattcaccttggcactgttcaggacatcagctactccagcccccctgctccagggtctgtggtgggaaagcctgaggcatctgaatctccaaaatcaaatgcagaatagacatgggataagaaacaggaaacacatctgtggatccctgagataataattttttaaatacaattctttcccccctgatttggaataatatgtattcatgggagaaaatttgaaaaacagagacaaatccaagaaagaaaataaaagtcaagccaaatcttaatacccagagacagcactgttaacatttttgtatgtattcttccagttaaaaaatgtacacaatatttttttcttgcacaactgctacattctatgcatactgccttataatccactttttccttaatgatatgttgtgaatattttcccatgagattaagcctgcttctagcccataattctatcgactgtcttccatcatatagatggtcattcaactaatacctcgtgggtgaatatttaggttgtgcctaatattttttgctattgtagataacagtttgtacccactcacgagactaactcaggctgcctcattgtcctagacgtatatcacttagttcttcctcagcagccatcagtcatgtgt

SEQ ID NO: 33104 - DNA, 2412 bp, Bovine  19866880893751
  misc_feature (1)..(1): n is a, c, g, or t
ncagccttttctgtctcctgcttctagaatccagtctgtcccctcatcctttcaggaataggggtattagtggagccctactgtaattaaccctggcagacctgcacaagcccctgttcattccactaagagtactccttttatcattaaagtctccgaatgattctaatgaaagccatctcttgatgggatcttggctgatacaacatgtaatatattcagctgaagaaaaagtaattcagttgtagaaaaagttctaatcgcaacctgtgcctcgtttcatttctagtcctcacatttactactatttttatgagagctgaatgcaggccaagccaaggcataaggaggtttatgaccaaaaaagccttcagtcctctaccctctatctagacatagataccaagcgtggagcaaggactgctcggctttcagcatgttgacatgaccctgccttctcctccccactgtcctcaaaatccccacctcatctttcagcttgtcactctttccttccactgggtagtggtggggcaaacagcactgcctgtaatagtgtccaggacagtactaagcacacagtcagttcactcagggagatgagtcttacttactcatgagctataaaattattcaattagtgtttaataaaagattaaaggcaactgttagaaccccaagtacctccatagcagaaaccatgtccgactcacaggtctgggtccccagacctagctcagcgcctgacactctataggggcccattaaaacatttatcgagatgaactggagtgtctgttcatggggacaggagggtggcaagtgccgtgggaagccacacttgtgtgtcctgagtgtacatttccaccgtgtgcacaacggtgcactttctgactttcctcactcttcttatcagaatatcaccaacgtctcccgcagtggtattaaaacctattttgggtcatggacttccccctttgagaatctgatgaaaacaatatacctgctctgacaccaatagataaatataggtcaaagactacaggtagaggaaaaaaatactctgagtcaagatggtccatatgaccctgaagcagacatgttccctgtgtagaaaaaaggcaggatacaaggtactccatgagggatctaagaagatgcatcctagtccagacttcacagaacataacctaggtctgtggtccccaactttgtggcaccagggactggttttgtggaagaaaatttttccatggactagcgggggggtggttttggggtgattcaagtgtattacacttattgtgcactttatttctattatatcagctttacctgagatcatcgtgtgttagatcccagaggttggggacccctgacttagaggaattagctttctttattcaaaccccggcagctgataatgaatttgggccctgggctaagtgtggtacttatctgaactcttaagttagcccttaccttcatcacctaagtactactgttgtcttcattttaaagatgaagaagttgagatccagggaggtttggcagacttctcaaagtcataaatgtagctagtgatgaggccaagattagaacccaggcagtcccactcaaatgcttgtactcttaactagtctgctcctgctccctcaccaatgagctaatacctgctcctaactaccttgtctcactaatggaatttatttgcacccatttattgagcatctactagagtgaaaggcattgtgctagttgctatgggaagcacagagatgcacgcaagagagttttctctggacccataaatggcaagaaagagaatgggtaatgccccattgacattaataaggccatacagcacaggcaaggaagaactggggcagagtgtgaaggacaggtagataaagcactgagcagatgggtcaaaagcaacctgagaggtgatataaacttcacaagagtcatccctgcccagacatgcagactgggggaagatgatctgttcaggccacctgggctcagattctatgcttgcagtatccaagtggactttagaacataaaacaagaggttaatttgaaaaccaaccaagaggactgtaagtaaactgcacagtttgctatgctgagcacttatcaaatgaacgacagtatgttcaagtgaagatatggtgctatttatggccctgaaagaggtttggcgattgcaggtatctgtgctgcctccttttctcagcttcttctcctgctcctcctggctggctgtgtagcttcagaagactcacaatggcataccctggctggaagggtctctgaactccttctgcaagttctccgagtatctgaataccacagtacaaagtcaggtctgaattctcagaaaaatgttgcggctccggctgctgct

SEQ ID NO: 33105 - DNA, 1005 bp, Bovine  19866880909448
  misc_feature (1)..(1): n is a, c, g, or t
nttcaggagcatacatggattaagcactactctgtgcagacgctactggaggcctctggctcccgttcttgagtcccggagctctcagaggagcccaccagggtgtgagcccactggggagatccgccacttactaggacaggcgtagagcaggcaggctccacgaacttaaaggtgtttcttcgctcttgccctccttcctccaataacaataaggctttgtatgtcaggcataaggttaccgggttggcttgtggagctctgagaacccgaaaagtccccgttttaagctcatcttcgggaaattcagtttctccgtcgggtcaggggtgtgtattgagggggcgtggagtaggtagattgctcagagctattagggtgctgcccaggtgcgtataaggatagctcggccctgccagcccgcgggaacccgcagcggaacccgggaagctgggcgacttagaccctgagcccaagggagggcggcaaaggagcctggggcgaggcgggaaagctgtgtggcttcggaggccgatggctggttagaaacctggctccggcagggcaggggtccgccgggtcgcgccgcgcggggcggggccgggggcggaatcaggaaattcccaggaaattccttaacattccggcactccccgccccccttccccgggtgccgatctctccggaccctgggaaacagaaaatgaaatgcttttcgggtttcttcgcgtcggtcctccagcccctggcagttgtgggctctggagcgcgtgggagcgcaggacgccgcagcaacggagtaccgggccttcctgcgggctgggagcgtgtccaatgccccggcggttcctcctggggctcccgagcgcgcggccgctcggtccccgagctcggggaggcgtccgccggcttcggtcccgttcagcttaagctggtgtcacatgagccgcgcgggggagtgggaacccggggagtgggcgggggcgtgtgcgccgggagggggcc

SEQ ID NO: 33106 - DNA, 1132 bp, Bovine  19866880942267
  misc_feature (1)..(1): n is a, c, g, or t
nttaaacctggtatattacatcatgaacgcctttgggcctcattctcagcttacagtgatgctcaggtatctgaattaagttcagaaatcacagcttattgaaggacacagattattaagtcacttcacttcattggactgaagctgtggacattgcttgtttggagaagctgagcactgagtgatctcttaattcctgtggacctgggctagctggagctatttaatgaagggtgtggccatcagatgtcatgaagcccatagaggctaacaggaaggagggaagggacaatgatgtactggagctagcttacattgactgattgttaaatttttaggaatttcgcgagctgcttgttcaacacagccattacagtaaattaaattttataaacttaaattaatattaaaaacaaaggtaatcaatactaaagacagatcacaccctaattattttgctgccctttgctattatccatgctctggagttatttgcctttacatggatgtagtggaaatactacatggtgctatgtccctgtgcctctcttcccaaattcatgtttagtggcatcacattggatagttgggaatcagatatagggagactatttgtaccacagaaactggcacacactacgaacgggggcttgatatattggtttgttgcttgtccagacttaagaaagtgatagagaaaatgcttagaaggcagaataagcataaaagtatgctatctctgtagcaatgacatggtgaaagacccaacgaatcaaggcaatttttttccagtattcaaaaacaactatccagttcagcaaagaaatcactcctgacattgacaaatgagtgaagttctcggatgcatccttgttgtttcacttttgacttactgatgcttgtaagtgtgattatcaaccaacattcaatgtcagttctccatgtaggaaaccgatggtgaaacaatggctgtcagttcagttcagtcagttcagtctctcagtcgtgtccagctctttgcgacttcatgaaccgccacacgccaggcctccctgaccatcaccaattgccggagtctacccaaatccatgtccatgagtcggtgatgccattcaaccgtcccatcctctgc

SEQ ID NO: 33107 - DNA, 1374 bp, Bovine  19866880997397
  misc_feature (1)..(1): n is a, c, g, or t
ntgagctggaagataccttaaagatcctctcggaaacccctcaatttcccgtagggaacgttgaaaatcagaggtgaaatgacttatccaaaccagttaggaccacccccgtggggcttctccagtcgactcttgtcctacttcctccagcagttctgtggacctgttgattacaacactgcccacggccagaaaatcctgccccatcagcggggggggtttccaggctgacataggacatgtcccgttagaagacggctgagttttagttccagttctgcccctgctttgttggctcaaatgagtcacttcttcctttgtctatttcccctattggtaaggagaagataatgaacctttccacctatcaggctcacttgagtgttgtaaagaataatgaggtgatatttgtaaagtgctttgagcggctgggaaagaggagggggtgggctcagtagaaagcattattagctgcaagcacttatcaattgagctgtttaacaatagcagagagtaagaataccccagaaatgaattccagggactcaccctgctttgaatttaggaggaggattaagtggggacctaataggtattccacttctccagtttctttagagtaccgtcaaactaggaaaggtaattacattcttctatggcggcttcagcctggagtttcaattgggatgtcaaagcgtacttgtcttctattctcctcctgaggctgtgttctgttgtaattgttaaagccttgggcatcttctatccccaggggtaaattcacttaggagctatacaaagtcatttctgtgtagtggctgggctgctgtttataaggttgattagtggagctttctaaatctaaagcgcctggggagcaatttggatgaagctgggaaataaaaaggcaaagtcttcatcatggttgatctttttttattacactgctccatgggaattttctcagtaactcagtatgtgcacagtgcagtatggctggatagccattgccacatcctctttcctggggaaacggagacctagcccaggttaagatgactgtgccaggtcactaaatatatttagagccaccttttaacttctcttactcccactgagggctttctggtggttcagtgtaaagagtccatctgccaatgcaggagacacgggttcaatccctgggtcgggaagatccccttggaggaagaaatggcagcccactccaggattcttgcttgggaaatcttacagacagaggagcctggtgggctacagtccatggagttgcaaagagtcggacactgtgactaaacaacaactcccactggaggttagatgagaggtatttgtgggggtcttagatgtgtagga

SEQ ID NO: 33108 - DNA, 2020 bp, Bovine  19866881022465
  misc_feature (1)..(1): n is a, c, g, or t
ngtgggtgtggtgggcttaatggtgcccccacaaaggtatgtccacacctcaatccttggaacctgtgaatgtgaccttctctggaagatgggtctttgcagatgtaattaagttagggatcttgagatgagatcatcctggattaccctggtgggctaaatccaatgacaactgtccctgtaacagaaggccacatgaccatggcagactagagtgatgcccacaggccaaggagcatctggagccacctgaagctggcagagccaggacatatcctcccctggggagaaacacgaccctgccaacaccttgactttggacttctggcttccagaactgtggaagaataaagttctgttgtttaagccaaaaggcttgtggtcacttgctgcagctaatacagggcagatgcacggagagaattagggactgcagagcggaagggtctggaaaaccaagttcagtcctggatctgctgctgctgactgaggtgaactttatgcttcaggttcatttcctctctgttcctcacatgcctggccctcacagctgggcgcggggctcacatctcacttgaagaagttactcaaaatctaaggaggtcaggtgagatactccctacctgtttggaacagtggtaacaggaataaccacactcgtagaatgttgaatacatactagatacgtttacacacattatcttgtgtaatcctcaaaatattcccacgagattagcattcacatccccatcttctaggtgaggagactgaggttccgagaggtcctatagcctgttcaaggtcattcaccgagcgagcccatgtctacctgtgctcgatccacaacattacaaaaggctcaagctccacaaagacagtgggtccagattcccacaacatcccacagcactcacagcactcagctggatgacggaagggggtttgtttattttctgaatattagcagcactggcactacagctcggtggcggatgacagagtaagtttgctgagagaacctgtttggactctgctaacagagtggactctgctagcatggtgcatgcatgtgtactcagtcgtgcccaactcttcacgacccccatggactgtagcctgtcaggctcctctgtccatgggatactccaggcaagagtactggagcgggttgccatgtcctcctccaagggatcttccccaaaccagagatggaacttgcgtctcttatgcctcctgcattggcaggtgggttctttaccactagcatcacctgcgaagccctgctaacagtagagggttagcaaaatatccacattagggagaaatatagtctcaactaagacccatcttggtcctcttggccccaagtctccgaggctttcttctctctcaccttgctggagaaagagatgaaacccctagccaaggggcttctgccaggtgagagtctggatggacagtcacacacacagagagaacatatcccacatcactccctccccagccaagacgaagaagagaaggaaccaactgagaggctctagagaagccctgtcctgagcagcccgacacatctggggccccctcttgtctggctggagtccctgtgcctttcccagagtccccgtcagaggtttaggtgatctataccgatcccctgctggctgtggtttaggcagggccatggctaacatggcagctgcttccctgttcttccagcgcttagggttggagagagagctggagcccagagatgacccaaggacctgccagatttcctcccaggcagacctctgtgcgagataaagtcaggcaaggctgagccgcaggacagcagcataataaattcccctggcctcctcccaggctcattgttctattgctggagttgttttgagtaggatcaaaaggaaggaagagctctgtgctatcaggctggggaagaaggatgctctcctgaccgctcctgttgcccttggccaccctcgtgttaaatatgaggaaatcgaagggcagtgtg

SEQ ID NO: 33109 - DNA, 1909 bp, Bovine  19866881024614
  misc_feature (1)..(1): n is a, c, g, or t
naaaacatgctagttgcttggctttagaatttagtgcaactcagtcagtgatctacctcttccataaactcctcctgttctttaaacgggtgccacatccttcattttccctcccaagtcattatacattatttctggctgctagattccattccagagcatactaaatttaagtaatagatggaataatctcaatgactaactcagtacaagttgcagaattggaaactgcagcctagtcatctctctgggtcacacagaagtcacttaggacaaaaagtgctgtatacaacatatatttttaaaaacgatctttcttctactttgtgctgcaaaaacaaactttgaggggatggttctcccacaggatatggaaatggccttggagcacatccagggttagtgacacagctgctgtttcctgctagggacatcccacagccagaaagggaaaaagacaaagttaaatatatagcaggaagttaatgactgaacctattaacaagaatgaaaggatcagcctgttacacagtctgtttataataatatacagccattggccaaacttaacagtttatgtttagaagacatatttaaaactctttaccagagggcaactgatgcaataatagccgtagcatcaacaacattgtctgcttatggtagccaataattttaaagttcctttgggtacttaggtctatattcacaacaacctggtgaagctggtaagttgggtagagaggttggtggcttagatggtaaagaatccgcctgcaatatgggaacctgggttcgatccctgggttgggaagatgccctggcgaagggaatggctactcactccagtatcctggcctggagaattccatggactatattgtccatggggtcacaaagagttggacatgactgaccgactttcactttcatttctttcagggtgtgtaagcaaggaaaggagtttggatttcattttaagaatgatgtaaatttttaagcaaggccattgcatggcatgtcttacattttagaaagatcgttcaacttgctctatggaacatggactatagggtgccagagcagaagatgagggactagtcaggaaacatgacactaattcaggtgaaaaatgatatggtttggactgggtagtggtggtgaaggggtggttaggtagattttgaagaaactacttaaaagtaaatgttgctcagtcgtgtccgactctttgcgaccccatggactgtagcctaccaggttcctccgtccatgggattttctacttgcaagatctacaaatagattggaggtaatgtgtgaattttttaaaattaagaatatctaaatttggaagcctagataacttagaattctggggtgtttttctcccccctatgaagttctgtgatgttatttaggccccaagatctaggaatgctgaaggaaagagcagatttgtgtggagaagagtagggtagggatttctatcctggaaatgttgagtttgaaatgattgttaaacatgcaagtggagatatcacataggcagctgaatataggagcctagaactcttgggaatgggctgaactggggatggggagaggcctaaggactgatctcagaggtacagcagcatttggagacagagaagtctgggagggaagggataataagctgggggaatccctgagagtatgatttttctggaagtcaaaggaagcaagtactttgagaaggaaggggctaaacccagtgctgagaagtcaagtaagatgatgactgagaattgacccttggatttgacaggatacagtcaatgttgaacttgataataatggtgccagtagagtgttggggacttaagcctgcctggagtaggtttaagggagaatcagagataaagaa

SEQ ID NO: 33110 - DNA, 1302 bp, Bovine  19866881025060
  misc_feature (1)..(1): n is a, c, g, or t
nttttttaaaaaatgtgcaaccaacctatttcatgtactgcatttttttcatgtccttgtgaatatgcatgtgagtgtaacagatgcagatgtgtgtgcatctgaaggtgtctgtgggtgggtgtataaacatgaatatgtatgagtgtgtgtctaagtgtgggtgcatggaggttgggtgtaggtgtgtgtgtgtgtatatgtgtgcgtgtatatgaatatgtgagcgtttgaatgtaagtgtacgagttcctgactgtatagtgtgtgtgagtgttggggtgggagggggctggaggaagactagatccactacgcagtgatgagtcatagtgagaggtgaccacctttccctgcccccgacaacgagcctcgatcaccaggaaacaggcagggcagagaaaaggcatgtgggccaccagcgcctccaactgcttcctgcttattatccacaggctctcagaggaggcagggtggggtgggggtggggtgggaaagtctccttctcagccaagggagcacctggatacagctggcatcctggtaaccatcaccagggactggtggtacatctgggaaccgcaggagccagcaggcgggggcagtcctctgctgctatatttacaggtctggatttagcacaggaccttgaggcggggggccgagctcctaagttttcaatatgctcgtctccttggcaaccttgtgcagtggagattttgtagcagctcagagaggttagataaattgcttaaggtcacaccgctagaatattcagaaccagagcaggaaccagggccagggttaaagctcaggcggtaccgaatcccccatatcccccccagccattcccggcacatgagaacctgcataaaattgccaagatttcaccgtggctgttatcatatgggtcaaccctgcggtcttagctaaatggatttttttttttttgcacgggaattccgtgccaaacccctcagccaggaaacagctggtgtcttgtgtacggaaagcccatgagcaggctgacactccatacaggaactggcacgcaagggcagtgatcaaacagaactgcagggtcttggaggtgggggagggcctctggggagggacaggggcagccagagcattgagggtgtttggggacctcagggctgtggctacttaccaaacaacatagaagcatctcagtatttaaataattttggcacattctggctgcacgtcagccttgtacaaaggatcccagtgttttcagtcttcttagaagtagaaggtaaggaagctcctctctctgtc

SEQ ID NO: 33111 - DNA, 893 bp, Bovine  19866881032604
  misc_feature (1)..(1): n is a, c, g, or t
natcccagattaggggagcagagagaggaagtcagtagtcagacggagctgctcactggactcagttgacctcacaaggaagacacacagcaccccgaatcaataggagccaagcctagggcatcctctccagtctctctgtagaaggacactctgggagagttgtaggatttggacactggcctgagcagaaggacaaacttgcctttgtgtcagctcttgcccccatggtcagccagacatgaacgaggcagggtctctgccagctcttccatctgttggggctgccctgctgtccccagtcaggctaaactaggtggcacctgctcatggaatgccaacccaggcaggtgcttgcagagcaaagtgttggagttttctttgagcagggaagtttaaaactgagataaagatgaagagatctgaactgtaagctgcttctcacagctagtttaggaaaaagatcttaccaggaccccacagccaagatgagtacagagatttggacagtcttctttggtctccaactgggtagattccatttgaaatgtgttccttcctcttctggtccttgggtgctcgtaactggaaagttcttctctcattcttcagtgccagcatacctaaaacctaatgagcttacacaaaaaatctacaaacaataaatgctggagagggtgtagagaaaagggagacttcttgcactggagatgcctttaaaaactaggaataaaactaccatatgacccaacaatcccacataggcatgtaccctgagaaagtcataattgaaaaaagttacatgtaccccaatgtttaccgcagcactagttacaatagctagggcatggaagcaacctagatgtccattgacaggtgaatgggtaaagaag

SEQ ID NO: 33112 - DNA, 1300 bp, Bovine  19866881098947
  misc_feature (1)..(1): n is a, c, g, or t
ngtcaagataacctgtgaacagacaaggagaaggtggagggaagggaaaagagagaccaaattaattattagagctatcaaaaggcagactgtggtttaggggaagactgctaaatacacaggtaggaaaaccccagctctgactttcatcaattttatcttgaggccagaatatctggccaagtctccaggtcattcaaatcatagaaaacccaggaaacagactaactttttttttccagcttaaactatttatcaattatttctaaatgctgagcaaattgcgacagagaggtattggcgtatcagctgaataatattaacacaaggccaaccagagaatgaaaatgcacatgtacacattttatcatttttaagattatatccacaacatacaatatcagtgctgaagagaggcaatgatttaacatctgaatgcctggggcttcttcccttgtcaacgtgaaaatcagaattttctttccaaatctgtgaaattggaataaaactcatctctaaaggactagcactcttctcttaaacaagttgaattctaacaaaagaaattcgaagtctcactacgtatttaaaacacaaatgaatagaatctgacctatacaaaataaagtccataacatttaaaattcctagaaagaactctgaaattacttaattcacatggtttatttccacacaatattttaatatgtggttctatcaagaaattattcttttccttaaaaatcctcatttgtaaaatttactctattgtttataaagctaaagaacaaaacacagattctcttttggaaaactgcagcccgactaatgccacgatcagtttcccagatttgggtgttcccatcatggacacattggtgagccattttggtccctcttctgaaaaaccaggcatttggtgcctggaatacgcatctggccagactgtcttggtctgtcccaagggtcagctatggttttgttgccatcctgactggagtagaaatggaaatcgtctccattcttaattgtccagcttttcagctgcacctctgttgctgtctcttgaatggaccaatgacacgttataaatcctatgccaatggcagcttaattgggggcggagagggcagcaggatggcagggtcaggtaaagaaatgaagtactctattagcaaagacagcctgtccaagctctttgtgtgtcaacaaggctcgtgtgagtccccagtttctctgcagcgatgatctgcagatatctgccagatattgtatctgccataatatgtataaaacataa

SEQ ID NO: 33113 - DNA, 1693 bp, Bovine  19866881113346
  misc_feature (1)..(1): n is a, c, g, or t
ncagctgtgggccaggcctcactgcccagtgcctgcaccttgccaatcacagagcaacacgcagttttgccctctcttttgtggaaggggatgaggtattagaattaatttccttacaggaatccactctttgtttaaaaggtttgtgggaagcaaacccaagtggatgttggctcaggggatcaggggtccttggccattgtctcttctcatggtcttgttgggtgtcccccaaatctactgttgtcaggagggaaaaatgagatactctttcgatgtgagagtcttaactgagagtagctcaccacgggggccaggttactgtctcctggcctgggagcaggaaaggtaaggagtctgtctgttatctgctcagtctccaagcctgtaaatgactacatcttttaggatccttaaagacagggcttatttatctttgtatgtcctgcctctaagcctggggcaaaaaaaaaacttcatagaatttatagcattaaaataaaaacctagaaggtgctgcttagattgaatttagtggggtatctcttaattttgattttgaagctgctgtttgtttttttatgaaaaaataccaagttatggcatcatgaacttgatttgtgagttagtggatccttctagtagcagtttgtaaacctttgtcaggttggttaatttctgttgcctgcactgacttcccaggtgggtgggtgggtggctgttgtgagagctgtgcttgcccagaggtcctccgctctggaggtgccaggacatttgcgatggcgtagaagtcctttccctcttctctgttaggcttgtggacactgcccaggttcaagatgcccccttctctgttgcctttcctgttgtacccagttgaactgaccacactctcctggtcccccaggacacccccaaatagacttccctcctggcacctgcgatatatgattgtgctgactttttgacttccctctagaagtggaatgtgtggcctttgacttcctaagtggtgcacagagtgatgtgagcactcaggaaatgtgacctttgtccctgctgagacccatcctaacgtgtcctgctgctgtttctgtagaaatcgtggatgggaatgtgaaaatgaccctgggcatgatctggaccatcatcctccgctttgccatccaggacatctctgtggaaggtaggtcttctgctctgctccatgctgtccccaggcttccacctctcccatgccttcaccatcacatcttcctccctgatccatggggcaagaggtccttcatcgcaagctgcatcctgggccgcttgtctatcgatggcatcctcgctctctcctagtctacagacaagtaaaaactggagtgctggcccctagagttgcgttggcctcctcactttgagaaagcccgagatggctgtggggaagtgtactggaaccactgctctggggttgtcaaatcccagagtaggggaatagcagtcaggagagagccatgagagagatagggcctccactttgctcccatagcaccctctggtggccaccttgcacgtccgcaaggggccaccatggtctggggccgtggtctctctaaacttttggtttcacactcccgcagtttttgacctttatgtctgataggtgtgtatttatttttcagcaaattatattcatgtatttctatat

SEQ ID NO: 33114 - DNA, 1801 bp, Bovine  19866881116953
  misc_feature (1)..(1): n is a, c, g, or t
ntaggaccaggtacaacaataaagaaggaagaaaaaaatgtggaggctactatgaaccaatcttgtctgttttcttaggtagctagatagattccatgtgctcctccagatccagcctccacccttcgccctaactggtaccccagatgatgaacctgtccatatggcatccatgctgctcctgtgacctctggtctctagtcatacccaggcaaagggaggtaacagcaggaagttggaagattatttatccccctagttccttcgctgccaatcaccgtggattagtgtctccaccaaaggtcacaagtcaggtcaggcagccttctccttacaggtcctctctctgggttctagtaatgattccttcttcttgacacttcgaacttagagatggtaatacttcctccaagttattaaatctgaagtatcacaccatcctttgtcagttccttaagccctgcccataccttgctaaataatcccttcactaaactccctctattttccccaccaggcccctaactgatactatggagtgcttgatgcccctaaatgtgaacaatctactgtccactaattgtgtgacctctggcagatcccttgactgacttcatccatcctcagtttgccctaattcaggagactacaccacagcagcagccctggaataaacagtggccccactatgtcccttagctgttttttctgtcccctactcccaacgctgcaattcctggcttagctgctctgcttcacagggtcattcaagtccctccctccagatcttagaaatggatacaacctgctgaaggcgaagctagctggccaaataaagaacacttacatagagatgaccatcaagcggggatcatagtcaaggtcaagttcatacaagccactcaatttttagcctgaactagtagggctcaacaaataggagcctctttcccctcctgacacatgcttcctggaaaaacatttatttttagtttttaactagaaagacagatgaatagcataaataaagaaaaatgttgaaagttcaagattttaaataataaagaagggaaagtcatgagtttttaagggtttgtgttatataaaggtagtcagtccataatgcaaaaaaaaaagaaaggtcaataaagcaaatcagacagagctggtactgcagcccccctccacctcgcaggctgaagcagatttagaaatggatgccaaaggtatggtggaaggaatcgacaagcaagaggagtcagagttggtggcaacctatcctcaaagaccttcaggacctgtgaagaccctacatgtgaacacatgactacccggacaggcatccaccagcttcctgtcctgtgagaaggatgatgaagtggccttctgcccttctctgaaaacccactaaacccccttgccttcctggggaggttatttctgcatagtgcaccttttgtgtcttccccttgatcaaaagaacatgtaaggcccctctgaggcatctaacatgaccagtctattcactctccagggttgacattttcccagagtttcactcgacccttgcccaaatacaatgtgccttttctcagcccaccttggaacgcagcgccaaagcctccagggccttgctcctgggcccgtccttctctcccttgctcactcttcctcctacagctccttccaagatttttcaggtaaggtttacacttctttgggaatgagccctcctcatccctattcttacacagtcttaaacagacattgcatctctttttagagaaaccgccattctttt

SEQ ID NO: 33115 - DNA, 1147 bp, Bovine  19866881188989
  misc_feature (1)..(1): n is a, c, g, or t
ncggcttgtgaaggcgccggtagtcccggaagtcctccaggcttctgctgcatggcgtgcatggtgttctcgggtgcccggttctccagccatgggatggtgcggcggatccactccagcagctgtggagggagaaggggaggacgctgggaggggggccgcatctctcctgagggcacactctttcccaaccatcaccccaggccgttcccaggccacagggccaggctgcctctgagaatcaaaggctccatgacgcctggccactaggatatatcaaaccacagccagcatcactcaacctccctgctccccaaggggaaacctgggggcaagatggctcaactcagcaggagacccaagctctagttcttcatctactacctggctgggcctcaatttccctatcttaccatggaggggtgaatggttgctggccagaggccctgccatctgacctttgaggattctagaatgtgggtccttgactcaaaagagaaaaggttgcagaggacagcctgaattttgtttcttcaatgaggtgatggggggtggaggagtggaaacgatgagaggaaactcgtgatcccctgcaactggatcacgtggcccagactaactcatctgaataatgatgacgagctaagtcatcacgggattaagtgctgtgaccgtccccgccagtggcggaggacataaccaaagcatggtgagcttctgtgacttgccaaggtgaccgaagtagggcagggattaaatccaggcactgggaccccagaacctgggctcttactatgctgggggacagtaagtccaccaagaggccgggctaagctgttcaggggctgaattaaggaaggagcaagtggtgctctaacccaaatgcagtcagtggcagaacagcaaacccatcctgtcccccccgtcctctgggtgggcccagccgctaagctagcctgagccagcctgatttatccctggttcacatcctctcagaactgcacgctccttttaagttcaaacgaaactcccagagtaacagtacactgggcccaaaaggcctctgaggtctcttggcacagctttcatttgtcaagtgaaaaaaaatcaagagcagaagaggtgatagaaaaagcgcggaactcag

SEQ ID NO: 33116 - DNA, 689 bp, Bovine  19866881246359
  misc_feature (1)..(1): n is a, c, g, or t
ncccctggaagtcattattttttcctttagcaattgctgagttaagcagtaaaaatatggtttccatcttgcgcacacacacacacacacacacacactcacacatacacattcacacagccgatctgctggacatatgttgagaagaaagcagggatgtgggggtgggagaagattcacatgtcgtgagtcaagagcttgaacatttgaaaagaaaaagtgggagagggtggggagtttgcagccctggaaagggactatccaaaggatttattgcctttgagcatctcacaaggcattttttttttataaaaatctgtaacttatggcttttttttttcctgtatagggtagtaaacaagagctctgaaaggggaaggaaaccaggagaaagccagctccattagtcacgcagctgcatatcctgtcacaaaggaccccagttgagtaatcgcccaaaatatgcctgttatttttttttctgtcagaaaaaaaaatggggcctgccaaaatgtactgtaaaaaaaaaagaaaaaaatctggtctctcagccccagagggggaaaagaaaagaaagaagaaacaggcgtaacttctcagcactcctctaaccctctccccaacttatctttaaaagaaaaagccttcagattctccacaacgatggagccggcttgaaaagagctggg

SEQ ID NO: 33117 - DNA, 1503 bp, Bovine  19866881271363
  misc_feature (1)..(1): n is a, c, g, or t
nggctggacagtgtgtcctgatccttcccaatacaagttctaattctatactccattctgttcacatggctgtgagtattacatttaggaatattccagtgtcggtctctcccttgacctttgacactgtccttaggatggaaatgtgataggactttagaggtaattcactccagtccccttgggctccaaatgaggaaacagaccctgagagatgaattgactcacccgaggtcacacagatagtaagtggccgagctagatctagagctcagctcactagctcaggattctttcttctctcccaggaaagtccccagtgatggccttgctttccaaccctaaccctcctggtctttatctgcagccactcatgacatccaggttggcgcctcccatcctcccaccagcacacatctttgggatttctctgggaacaatgctggtcccaagggctgtctgaaatatgaggcacaggagggtgcctggaatttgcagtgaatcctagattccctggtggctcagatggtaaagaatccacctgctacatgggagacccaggttcgacccctgggctggaacgatcccttggagaagtgaatggcaacccactccagtattcttgcctggagaattccatggacaagggagccttgcggggctatggttcatggggtcccaaagagtcggacatgactgagaaactaacaccagattcaaggatgggcggcatcgccgctcccacacttgctcttgtctgcaacatcagccctctgaatcacggctctcgcttgagtgctgaaagcacttagcgcatgtgggaatattttccgatgacagtgacttcttctgtgtcacagataacatctgtgttaggtaaacgctttcacctaccctgcttgcccctgtcttccagcatgtcgtcacatgactgacctcagagccctcccctggtcagtctagtgctggcgtcttgggcaaacctcggtccatggccttctgcctctcatcgggtgtcttctggagcctcctggaccagccacatgatctcgcttcacttctccttacgtggtgtccacacgtgaagctctcggtgcaaatgtggacagatggccagaggtgcaaatgatcgactctttaagtttctattttgatgttgatttggtgttttttgtttgtttgtttttcaacttttttctctcttgggtccagggagcaggggtctttgacttggtagcctccctggaccgtttccttgggtgtgatcacacagatctcacaaatgctgctgctgctggggtgacactattggaaaattctccccatttcttctggagtacagctggcctgatcctctccattccttaggggcttgccgtgaaggcagtacagctctggtttacagaaaggcaggaagggaggtgggaaagatcctgatgcagtgggggcaagaaattgccaattgtgctggtaaaatgagtcccccgtggccagaaggtgaca

SEQ ID NO: 33118 - DNA, 1264 bp, Bovine  19866881275507
  misc_feature (1)..(1): n is a, c, g, or t
ntgattctcctaatcaccatgtcaaaatgtatgtaactacaaagcttctgtcagaaagctggccatatttctcctgattaactaacccctggaccaagatattcattctaattaaacatgtgagaagtttattaataaagtcagaattcatttaactggctaaagccaaacactttacctacaggtaatatgttcttacaagagttaatttacagaaaactgattccataaaatgaaatatagggacttcgtcagtagtccagtggttagactgcgtgcttccactgcagggaccgtgggtttaatccctggtcagggaagatctaagattcctcatacctcaaggtgaagacaaaaaaattaatttaattaaaaataaataaataaagcttaattacataaacttagtggcccaacccaccccccacccccgcaaaagaaatacagctggtgactgggcaacaggaaatgatcatcagttaacaggttccaattaagcatatagttattatcacagctattatttgatgcttaaaattatgctgtgccaatagtatggggttaagcttattcataaagcgtttctaatagttcccctcactgagatcattcttaatttttcacactgttctgtgccatctgcaataaatgttagatgttgaggtgtcactctcttaaaagcttttttgtgaggttcaagttaaacaacaacagtaacaacaactgcagcaggagcagcaaccagagcaacagtatggtctagatccttgttagaaaaactttacaagtattatttcattcaacacttatcacaaccccgtgagatgtatcactgtccttattgtatgaacacgggaacacaaaggatgagtgacttgtcaaaggtaacccagtaagcaagcagtttagttgattttcatcccgaggcactctcaatccagaatttatgctcttaacctctatgtgtaactgtggatacttataatgataagtgaagtcggagacccacagaaaacagaaataggactaaatagtgagtccaattataaatattatgaccaagtaattaagtgcctctccccattcacagctcctacttaattaacactttgaaatagtgtagttgctgatggtatctgaaaaggttctgaaggtgctttttctacattggggtcataagggttaaaaaagagatcataatctctcaccataactcaaaacttctcactatgggctattaatctgctggtgctacaagttccaa

SEQ ID NO: 33119 - DNA, 1172 bp, Bovine  19866881381967
  misc_feature (1)..(1): n is a, c, g, or t
nacaaactcccggagttcactcagactccgtccatcgagtcagtgatgccatccagccatctcatcctctgttgtccccttctccttctgcccccaatccctcccagcatcagagtcttttccaatgagtcaactcttcgcatgaggtggccaaactaccgagtgtcagcttcagcatcattccctccaaagaaatcccagggttgatctccttcagaatggactggttggatctccttgcagtccaagggactctcaagagtcttctccaacaccacagttcaaaagcatcaattcttcagtgctcagccttcttcacagtccaactctcacatccaatacatgaccacagggaaaaaccatagccttgactaggcgaacctttgttggcaaagtaatgtctctgcttttgaatatgctatctaggttggtcataactttccctaccaaggagtaagggtcttttaatttcatggctgcagtcaccatctgcagtgattttggagcccagaaaaatactgttttggagcccagaaacactgtttccccatctatttcccatgaagtgatgggaccagatgccatgattttcgttttctgaatgttgagcttgaagccaactttttcactgtccactttcactttcatcaagaggctttttagttcctcttcactttctgccataagggtggtgtcatctgcataaatgcattaaatttgtaaaatacataaagccagtaatattgtaataatattttcagttctactgtgttttaaatgtgatctcagatatatatatatatatataaatcatctaaatgctaatactattgcaactttggtttagaactctgcataatttttgctttctgcataatttaagagattaaagtttaaaagaattattagtttatgttttgtaacacataatgtataaagacataatattgtgacatcaataaccaaagaagtgtggacagagctgtaaaggagtaatgtttttgtatgttattgaggttaagatgctaattattcaaattagtgtgttataaacttagaaggttagatgtaatctccatggaaacccacaaaatagctgtaaaatatatacaaaagaaataaaaaggaatttaaatattttcttacaaaaaaatagttaaacccccttccag

SEQ ID NO: 33120 - DNA, 1909 bp, Bovine  19866881400041
  misc_feature (1)..(1): n is a, c, g, or t
nccctgtaataagttcttacagcaggattgcctaggccttgtgaactcttggaaagtgtaatggaggttttgctggagatatcacatttaggtcacaggggttcagctggtctttggctgctatgccgagcagttttatgggaatagttgtataatgctaacatctgtaggctgagagcttgacgaagacatcacccagattgcctcggaaagctgcttactttgggagctcattctttatgggttaaatatatgcccctcctctttcccccttgcctctacacagtcacccaaccttcccatttccatctgcaatggtggaagagctctgtgcgtatttgcttgtcaccttgcactatgcatttttggcaatttaggaggccaagcaaaggcccttggcttttgaacttttctgctttcttagtgtttccccatgagataagatgttaaagggctagaggatttctctttaaagatttctggtgaggagatagggaactgactgatactcacatgcctgctgcctcagcaacttcaagtccatatttctcctttcccatgaagcctctcttgcccgttttgtttaaaatcacagcctgttccaacaccttatactaaatcccctttactctggtttgtctccccgagaaatgattactcctggacatgcagtattctttaccacttactgtgttcatcgtctgcctccattgtctgccgtaacatagactcctcaagggcaaggatttctagctgttttattcactgtgtatccgaagagcctagaatgctgcctggtgtgtagttaagtcttgacacagagtccttgtaagaatgagctaacagcccagcaaaaggagagatgatgtagtgtcatggtgaaaagcttgagctttggagtcaaatgatcctggatttgaaccccagctttgcgacttaccagctctatgtcttcagaaagtgatttaaactctctgagtctcaattttctcatctgtaaagtaagaattgtagcactaaccttggaggtttgttgtaaagatcagaagggagaaagaggcaacatgacttgatggttatgaggcaaggctttgcattcctgtagatctggagtctgggctttaccttcaagttctggctctcccagtaccttgtgcaatttttatacaaactctctaagcccgccttcttcacatgtcaaatggatataataccctggcctatctcataggatactggtaagaagctaattcatatgaagctcatagcaagggatccattaacttgagcgggttggaggaaggtgataatgatgtttgtaaagttagcctcattacttgcacaaagtaactactcaataaatggtaggtttgagaaaagagcatgcttgtagaaccttggaactctcctaaattgatatggccattttctttgcattccccttcttcagggagagtaaagcaaatgcttattatctttgtaatgtacttgtttcaacttaaaatggaacagcgaacattttttatgtaccatagccccttctttgatctgtaatcaattctatttggatatcaggggttatttttgaattttccttttgagttgccacaggggctctgctccacccagtgaccttcagggggacttcatataacttggggtgttgagtcagcacattcgcagccaatggaattggctccagcagccatgggtttgggagattgtgctgtttccagggttccatcagcttccgcctgcttttatgagagatgcttcctcccacctctaatcctcacttgcagtatgagtctcagcaagacacttcacatcatccaaaccctttaactgtatggttcctatggaaatccatgctttgtcttgccatgtgaccctggccagattattcaac

SEQ ID NO: 33121 - DNA, 907 bp, Bovine  19866881417529
  misc_feature (1)..(1): n is a, c, g, or t
ncaaaagcccttagggatgtttcagagtcgtagtctatatgctgggctaaatctcactccccccagttaaaaatggaaaatgttactaaccatgttatataatgtgaagataaatccttatgtacttcccagaaactcagaatttaacagaagaacaaaacgttcatggtgagatgcttgctggcccaactatccaacgagcctgggtttagtctactgcccagccccctgcatcttcacttcaggaatgaaaatcacaacactgaaagctggcatttatatgcgctctggaatgtattaagctgaggtagacttcattcctgaagcctggagtaatggaacaaaatgctggatcagaaggcaagaggcttgagtgtgggttcccacacagctctcgtttgctcagctccccatccaaacagtgaaattagacgggtctcatgcaacccgaagattcagagcaaaacaaaagatccatcccagatggccagtctccagtcctcaagggacctatagcacagagctgtgggagaggcagaacaggtagggacctgagcctcctcactcacatggcccagagcaaatgacttcgcccttgaaggctctttcctcagttgtagacatgagaaggatgaaatgatgcaacatataccaaagtaccaataactgtagtgcttcctccttcatttggcaaacgagtaccttaactagaggtttgagactcatcctcaaacagacttttgaacaccagaggcactgaccatcccaattatgttagtcctcatccttaaaacatcaatttcaaacatttgtgaaattatctttttaatactgaaagtcaacaactcagaagtgaagcaatgaaagcacagcttcctgttgcatgtaactgggctagacatccctc

SEQ ID NO: 33122 - DNA, 1852 bp, Bovine  19866881515340
  misc_feature (1)..(1): n is a, c, g, or t
nctgaagtggattcagccaagtggctgtttatggatgacctttgtcttttaaggggcagtagcaggaggagatatagattcctctagaatgtctgatcatgtctcgtcacaattagaattataaaccatgggccttgtgagtgcattcatctgagacagagatggaccaggtatccaaagactcgggactgagctctgtctttaaatatctccacatatgtgaaggtagccctgtaccactgtgcatcttttccctcttccttctgtcttccccatgagcttttctaatcttcaaaggcacattgcatctgtaatttacacagtattcactttttcatctttttctattcctgctctgcatttagtagggatgtgataatgacttgacaatagagtgagaacatatcctgccttggatgaactggaattctttgaaagtgttgccagctagaaatattctgcttcagggccatcactactgttaagaatatgctggaacagtgtgatcagataccgtatcctcccaggtctcactctctggtccccctgagaagatggggctatgagagtactcccctggctccagtctatacccttaatgggtctttctcctattgtgctgtgtttctgagaccctgtattgaagtccgtacacctctctcaattcttagcatcctgaagagtcttagtggatacttttcttcctttctcctttcctttctttctatctccctctgtccctttctttcaaacaagagggagtgaactcatgaatatctgaagtagatttcatagaacgtaaaatttcacaagggggatacagaggtggagttttaattcctcagaatcatcacactttaaaacataaaccagatcatgtcagtcccctactttaaacccactcgtggcctcccactacctttaaattcaaacccacagtctttgtactggcctacaagacgctgtctgagtctaccttgtccacctctctcactaaccttcagccacgtgggtcttctttggcttctcagagcaccccaagttggtttctgtttcaggaccttagcacccatcttttgcctgggactctctgccctgaactctgtgctgccccagagcccctcagatctctgcccaagtgccctctctcagacaggcctgccctgaccatcccatcaataacccccacacagtactgtttccttcatgtcactcatcatatctgaaatgtccaacccatctccattttcttgtatgttgctagaccctggctagcgtgggtactccctccacagggcagatggaggctttattagtcctgttctgttatctcccagtggggctccatgaacatataacatgttactcagtgagggattgaatctgaatttatttccgtctctcttggcttttccttcacttgctctctcatttcttttgcagaaactaaatcatgaacagcagtgtgatctgatgctggagcacaggtcctggatcagggccctgggttttgctgctcagttgatcgtacacagctgccaattaaaacagctgttctcaaacgactctctttttttccattgatcaacaaggaaatcaaaagtaggaataagtttcaaatagtctgtaagactttactagcgttaagtctggtaataacctttcagtcttaacttccatgaccaaactgctgcttcacttcccctactttgtgagttactctgtgatctaacccaatagaggagataatgtaggatatatactgctgtatccttggggcttttcaggtggcactagtgataacccgcctgccaatgtaggcagacataaaaaacatgggttcaatccctgg

SEQ ID NO: 33123 - DNA, 737 bp, Bovine  19866881565420
  misc_feature (1)..(1): n is a, c, g, or t
nttgtcggggcggaggctgaggccgtttggagacatttcgagtactgaataagatgttagaagctttcagaatccaaggagaatggatgtcaggaagtaagagagagttgttcactttgtgttttaatgtcctttaccacttctcatctgccttgtctgtatgttacttatctcaaattaaaggtgtatctctggaggttgaatactgggaaaaacatgaaatatagagtctgaagacctttgaactcaacctttacggtggaatatgtttaccacaggctttggtgtgaaataaatgggataatctaggtcaagtggattggacagaacagtggccaagtgaccagatgtcttgggatgagtgggatagtcttggatttcagcttcctattctgtatcaagttcactttactgatagagcttcctgttaccctgatatgtggaatgaataaatctttatgaactagataccagtggtaacttttatcagtgattagaacagaattcttaagctggatttatatgtttaagtagcattataatggcagagtactgtgtctttgggacagtgatttggccttagtaaaatttggtctgttaagattcatcactcacttatggctaaagtgttagtcgctcagttgtgtccaactctttgcgaccccatggactgtagtctgccagcctcctcagtccatggaattctccaggcaagaatactggagaggattgccatt

SEQ ID NO: 33124 - DNA, 942 bp, Bovine  19866881687449
  misc_feature (1)..(1): n is a, c, g, or t
naatcattacctaagagggctttgtagattgtcacagttggcagccctccaggcttgagctaatcctggaaattctttaacttcccagaaagaaggttccacaaggtcaggctgaggtcctcagagacagcagatggaataaagcttgcggctagtcacttttgcagctggatatgaagataaataaaattatacccattttttttttttttttgcatcatcaagtctttgactttcatttgttctttactcttttttccctgtatgtggaggggggggaaaaaaaaagaatgtgctgcaatcagtgaaataaaagcaagcaaacttgttgactcagttcccatggtgaatgcaaggaaggccaggccaatagaaacaactgagatattacaaaaatgtgtttctttctggcggctacacagtcagtcctttatatccagtcattgtaatcagcccatcacccaagactctttccaaggtcattattctggttgcgggggctgcttctcctgcaaacaaatgttgattttactaaaagtcctgtctctccaaccctctttgtgacaaagagtatcaaagcatcattcttgaaaagaaagtataaaagatcagagagataaaatacttcgggttttctaaatgcttagacatatctggctcaagcaacacaaattataaactatgaagccacctgtaaaatcctgttttaattaacttgaaggcacactaatgttatttcattaaaatgaaattctctttaaatggaaaaccaccactgcagggtacattgagggcattgttcacatggcttttagggttggcaagtgaaccctgtatttagaaaaactaaagcaaatgctatttccttggagccttcttaaactttgaacgacttgtcatagttttcttggaatgtaaggagtatccctcggtaagccctgg

SEQ ID NO: 33125 - DNA, 1330 bp, Bovine  19866880436423
  misc_feature (1)..(1): n is a, c, g, or t
nccaggggttgaacccaggccccctacattggcagcatggagtcttagccactggtccaccagggaagtctcttattttgattttctattgctgttttccttgtgcctatatttctacttatgtttttttgttcttcccaggagcagtttgctgtgtccctgatataagccatttttttgttgttgttaaaagagatagggtaaaaacaaacagacaaaccaaattctagctttcttttttttttttaagccattgaagacgtatcaaggcctccctgccactattgagcaaattctttcccaggctggtctgagttgcacccagactttacattaggctttgttccaagggggtggaggtgccagaggggagactgcagcctgaaagacatccaaggaaaaaggcttcatttacaagcacccgcatcacacggttggcagtgctgagctgagctgtctcccagcttccaggggaaaatgagagacatttccccagagcttccctttcaagctctcacagctggaagggtcgcacagccaagttccaccctcttcaatgcaggttgtcacttggatgccggggtctgctgatctattagtcaaatacctaatgtgagaaaaagagccatcacacatctttctgcttatccatcattcaatgctccatttagcacaaaagaacctctctcccctttttctcttctgctgcagctaaaaggcccctcccaagagataaaaattacaaaggaaataaaagaaaaaaacacgatttctgagccgatgctcattcgtaattccgtacctgaggctgtttgtttccttgaatctgagaacaggaagggggcttggggaccctctcatgtaaccccttattttacagatggagaagcagttgcctggtgaggtcaagtgactcaccccaacaccatacaactagcaagggcacgggcagcatcagacccacatcacctgatcctaagctagactttacccgctgcaccactgatgatttcttatgaccacagtcacagactcttgtaagatttcatgattcaactagatgccgcccttgcagaaggacaacatgagaggcagcccggtggcttctagcctattttaaaccaacaacccaaacagtcaaatttaagaacccagcttatttttcttgtcatgcggaatcaaatggtttcaggcagactttccctaactcacaaataagctgtgttctaacagtgtgtttggaatttgctatttaggacgcaggatgtgttttcttcccaggaaatcatgtgatctgatgtggtgagaaccccaggccaggtcacaaagg

SEQ ID NO: 33126 - DNA, 845 bp, Bovine  19866880601558
  misc_feature (1)..(1): n is a, c, g, or t
ntgaatgaccttcaactgctagtgatcagttaaagcatcaaattaagacccttctcctgtccctccctccccacccccaaaatacacacacacacagaagtcacaccagggccccaagcgacagtcaaatggtcactaccacagctccatggtctccggtctctggcaggtggtagcctatttgggcctccttctccaaggatgggaaaggacaggctgcccggctccccacagcaggaaggatcccaggccaggggagcaagcccacatgttgcagccaagagatgtagggaccccggaggccttgcacaggcacagggggactcgcggccctctgtaggctgcctgctccctacccccgcatctgctgctcctctccaagctccgggttcgctcgctctctctccctctgtgtctcttgtctttgtgcttttctgtgtgctcggaaggcgcgattcagagtggccaggccagctgggggggcgtgggggggacggtggctgttcacccccattctctccgagtgacaggcatttgtggctgaactgctatttatcaccgcatacacttgctgggatcccggaggctgccatgtgggtggcaggatgcgtctggctgtgcgcgtctacgtgtgcattgtccagtccttcgtgtccatggagggttctccctctgtttttgacagattgctggatgaggaagcaggaaaagatctcaggctggccccgggcacctcccgggcatcaccgcgctccacttgccacaccctggtccccatgccccaacggagccgcgccctcaagcgcagccgcactcctccacgatcatgttgggcacgtcccgct

SEQ ID NO: 33127 - DNA, 1417 bp, Bovine  19866880660630
  misc_feature (1)..(1): n is a, c, g, or t
ncatgttgctgagattcctccagtaaagggctgacatttcacaatactcctctgatgctggggattacagcttaagatgatgaaaacgtggtttattcaaaacagattggggcggaagaaaacaaaggcaggcccccaagaggcccaacactctgtgctcccgctcccgggagaggggagcagcactgtcccccacctccccagcataggaagccccagtgctcagggggcctggattccagggctgggggagaactgggtcagacagagccattggccacctcagggagtaataatggccattgttcctgggggcatgcctaagtgccatgcagaacagggtgcagcacccgccatgcccagcacccgccattagcatcgctctacccattccgaaaagggagacctgagtctaagtaacttgcccaatgcacagagcggagtcaggattaagaacccagatttccatccaaggatcttatttttaaccacaggcccaaggcagaagaggcccagacacagggcagctgactgctatgtgaccctgcgtgagtaactttacctctctaggcctcagtttcctcacctggaagatgaaggtgataaccaggtcttccctgacagcctcaaaggtatggtctccagatggtccagtcggggctggcaagggagcagagagaggcgtctgggctcctctccctgtgatgtccctgagaggagctgtggtagtcaggctggctcatctctcctttgcagcggccctgagcaggtgacttgggcctctggacctccgtttcatgctctgtgtggtgagggatgagggctcggccagcttcaaggaggccctgaaggagcctggatgtagcttgggtttggcacagacccaggtcctaaccaaccctgctgctgaggatggcggactctttctcccttcaagcctgaacccccaagaccactgtgacagaaaagtgttctgtccagggtgggatccagatacaagggagcccctcccagcccccatcctgaggcaggggtctctgctccccttctcattagatgttgcatagggaccaccctcaggcccagagagcggaatcctccccagggagtgtgtgtttgccccctcacctggggctcaggggcacaggtgccaccttgtatcccctcctccccaggccaacatgctttggacgacagtaagcacctgactacccctggctcatgttttctaggcagtttttgtatctccacgaaattttcaaatctgctcctcacccaccccctaatcccctcacacacccacatgttatttggtccttgagctgatggcagaggggaagggtggtgggcagggaaagctgggccatggggcccaggtcacagtgaccacagaaggcagtgaccttggtgagcagtg

SEQ ID NO: 33128 - DNA, 2401 bp, Bovine  19866880664603
  misc_feature (1)..(1): n is a, c, g, or t
ngattatttgattgagtggtcatgttgggcatcatctgttcaagttttgtctgtttatgatatgaactttgataattgataggatttttctctttttctcttgctctcagtttgtttacctgaaatctaatgagtttctgttggtgatctcaaggtttgggtcagctttctgtgcaaccagctcttccttcatggtggtgggtcaacagtggttggtgattattttcagtctttgctatgtaattgtttttcactgttattttggcttaactaacagcaaggtgctttgctcttgatgattgggcatatttttgcttcagttccaaataacttgataagtttctaagatcaaggggtttttgccctcgtgttttccgatgaccctcccccgccctttctacttgagaatatgataagggtactttgtgtgtgtgtgtgcatgtgggcacacacttaaaggataaacagcaaggcttctacatgtcaaattttagtctttatttttttaagccattaaaaacagtttctgtggtttcttactgaaaacacagctccagtaagaggctgtgttttgtctctctgttaccgccaagtctttggcaaagaaacatagtactgagatttcaactaaaaaagagctcatttaatacatgcttacattttatgttaatatggaatgagagtctggtttgtttgtatctgtataatgtttaaatctttagcttctcaattttaattggtacatatttaaatctatttgatttgttaggcattactcagttcctttgatgcagcattaaaaaagagaatgctgattctctgagtattgaatttcaagaaaaataaatttggagctgtatgtccttctttatataactgtattgtgactgcttttgtggaaatggagcacagtggtggccctcaggcccagcatgcctcagtgtgtgtcagcaagacctgggactaagcatagagctggcctgtcttggagctgatgggttccccagccttaagatgaatctacattttaatttctatttctgcatgttctgattctaatactttcacatgaatctaaaacagtcctcctttagaaagtgatgttaataaaatttggaaatgctccctgggtttggacggttgggtggaataatggactattctatttctggtagataacttttaaccagtttaatctaaatgtactctttgttcagttctgtagctttttatggctgatatcttctaaatgacaccattatttgagtgaatgatttggtatgtcagtatagaattacccaatatttaaactatcttttgagaatttatgtatttaaagcccattatctacttataaacaaaactgaatactatgtggaaaatcttgcatatgtaggggagaatataaaccaaattttctaaatttttagagaccctagattgcgggctgtgagttttctgggttagatctgatgaacagcttgtattgcagttgaaggaaagatgataattttattgtttaaaaaaaaaaaacgaaaaaggcttccaaatttgttctgaaaatccttttagctaatttattttcagtttccttaaggaagaaaggtgaagatgcatgccttagttgaatagaatgtctgtccttagacatttttataattgaggtgattttttccctttgtagttaccttaaatgtgtgctgcccttttggtcatgcacaaaactctggcaaatgtgttctttctactggaggactttgatcatttctaatcagaaactgcttctttgcatgtttcactctcttactttcatatgttgtttatagcaattgtgataaaaggcattaacactttcttggaggggctttttctcatcacattatctgtacctgttgaatttcattcactgtagaagaaacagtgtttctccattgttaattggaaacattgatgtccaattacacagcctctgtgagggcagattttttttttaatgttctttctgaattttgtttcctggacttcagttttatgccacttgatttgtgaaataagttttcacaattgccctttgctgtatgtggctttgtccttatgtaaaattgtcctttctgatacttgaatgaaatagattataagcattttttcttctcattaggacctcaggcaacttttctgcctttgattttgataacgatatcagggacagatacaaagtgtcttggtctctgtgaatttccttctttatttaattcacctgattctgattacttgtgcatatttccatattgccattttctactacatgtaactttgtggatttccccatttgttggtcttgggatgttctcattgcatggagtagatgctggtaactgctcgtagcagtggtgcatgctgg

SEQ ID NO: 33129 - DNA, 683 bp, Bovine  19866880696426
  misc_feature (1)..(1): n is a, c, g, or t
natctgtctgaggagaaaattatttgaactgggacttacgggacatgaaggagcccacacaggtctgtggccgaagtaaaccagaaacaaggaccaggggatgcaaatgccctggatgagagcctgcccggcgtagtggagtgacagcggtcgccactgcggctgtactgcagtgagaaagacgagagggaggtagaggccagtggaagccttgcagatcatggccacgcgtgcgaagggctagggaaggacttggtctcaagtctgttttaaggacattcctctgctaagtgcaaaagggactggatcagaatgagactcaatcaggaacatcagttgagctcttgaaacaatctaggatttagtcttgaaaggtagtaaaagaattagggagaaggagagaattatgtttggagatggaattgtttgagcttgccctagaggaaaagagatgaataataagtcattatacgtgttctcttggttgtaattcattttgattgagaaatagttgttcaggttcaaacatgaaaagactctagctgtgactttgaattgttcagttgcaaaataaagaggtgctttagtaatttaataaaaggatgactctaggttttttggtttgaacaactgggtaggtagcttggtagtgttacttaggagcttgggaatactggggaagg

SEQ ID NO: 33130 - DNA, 1619 bp, Bovine  19866880810612
  misc_feature (1)..(1): n is a, c, g, or t
naagaaaaggaacagagaggcaaggaccacagatgcacaggaaggaagccgggtgaccccactggagaagaagccccagccctgctgtctgtcctcacgagaacaggaggagccacctgccatcccccagggggcctgaccccacagaggcacacacaggccagctcagggcagcagggcacccctcaggtgcatgccagccactggcctgccacttcaagtcctgggaatttcctgggctcctgtgggacccacgggccaccctgtgacccaggagggtgcctggggatgctcagcatctgaagagcagaaacacgctggtgactcacatgccgccccctcttggaggctgcaacaaaaattcctgggccagggccagggtaggggctaggctgagggcttagaccaccacagagccacaggcagctggatggtaacctctacaccctaacgtgcccaggccagtcctgtcttcgtgaaattttgttcttagcccccactaattttcataccatctctatatttcacagggtaacaaatccacccctcagacaaacgcctggcagggcagtagctctcttgaacgagagaaggatggaaaaagacagaggccagaggctgcctcctgccaccagctgaccatgtggattgaggtgggcctctccagtttccccattgttgcttaatggggttagatataaccccttaaggtcccactactcaaatgccctgaggtttctgggaagaccccatgtgaccccccccaagctacaagttgcagcccctctgaccccagagggcctctgatgaaggcaaggtcttagccccaaagtcctcccacggaaacaagaagaccagccatggcacgtggactccagtgcccagggtgcctgtcctggctgtgtgacctcaggtaagccctgaaactctctgagcctcagattccaaaccctaggaaacaaagatgaaatcatttcccgcaaaggtatgatacaagggttgcctgataacaccatccagtgggtatctccaggaatcccatcaactgtagttgggcatgtgttactaccaccaccacccaatctaccacctgctaaaatccccacagcaaaaggacaactggcatcctcaggatagatggaagccttgcttctggcttccattccaagatattaacctcttcccagttgcagtcatctctattaataaacagagatgggcatggggtcaggtgggcttcaacctctcaggtttcacatttcctcccagggacaggggcttcactggcactttcaaatggtaatacactcggccctggtgcaacataattagtcttgggactagaagggtaaacaaatgtgtaattcatgaatttgctaattgtccttcattttgatctcctgccatttttcctagactctgcctgacatccgagcttgtggcaaggactcaaaagagtgccgggtgcggcccagggaggcactggcttcaaagtcggacacctggactcaccctccccccagctgccccctccagcctggagcccaccaccccagatatcacacaaggcagggagcccgtggcactccatcttttattttcttcaactgtacacaaat

SEQ ID NO: 33131 - DNA, 1616 bp, Bovine  19866880811341
  misc_feature (1)..(1): n is a, c, g, or t
ntatattaatataaagcagttactttgttgatgtggtcgtttacatacagaagttgtggcacaatttatctttctcttgtattattaaaaggtatttgttctaacaaatattttccttaatgtaaatgacttaaatgcaaattgatcagaactacaaaataattactacaaaataaaagaggtgtaaacatatcccacattattgtggtataaataatttttatgaattcaaactactttggcaaccttaccatcagaatatctttaaatattcaaaacacagatattacacagaacattgttaaaaatccttatttccttcttccttcctgatttaagattataaaacaaatataaatgctttaattctacatgttcacattatgaacataaattatttaagtggacatacattcgaaatcttcgttctatgtttcaagtgcttttaaaaaatcagtcttctaatttgctttttcaaatgttttcacactgcatgtacatcagcccaaatacttgacaaaagctattgtttagtcagggaagcatgacaagcagacagagtggagccctaattagattgctttttaaagcctacttgttttctaaattaagtaaaaatactgcctgagtataattcttgagctgaaatagactataaacttcacaagaatttatgatattcacaagttacctatagtaatagaaggtgagccttgataaaatctttcaagtttctttcagctctcaggttgtggtacatctagtggagacgggagacttttgttcaaatagctgattagacctggctaatcacctgccaagagattataaacaactcccatagttaacataatcctttacccctgtttgtatcagccttggtgaaatacacaaatgcataatcgcataaaacatctctatgtgtatatactagtacttgaaatcttcaagcagctgtcataatggcttaaaatatttttatacactcgaagtcagtttttatatataaattttctctttactcttaatcaacatggtcaaccctttccgccctcctacttgtgccagcaggctgtacaaaggaagtgaattcttacgctatttactctgcctttattttgaattatgcactgatttaataaatactaagtgttcttcttatgaatgcagtctattccagaatattcctcaacctgtgtacacagtgctgacacaagtcagatggtcaacacaacaccttcaaagaacgtggtaaaaccatcctgaatcagaggcaaggttttttacaaacattcttagcatttacaaaagtcctttgattcaccaggacctatttccagttgtgagaataccaacattgatttcttgcacgtgtgggttgtttgggggaggcagggttggctgctggagaggggagtagtttagatacaaggaatttggcatttttgtcacacattattacattgatatgaatggaacctagaactactaagtgtacaaaaactgcgattattcctagaactctacttagatttatgaacagatcaaaaacattcccaggcagggagtcccctggaagtccagtggttaggaattggctctttcactgccatgca

SEQ ID NO: 33132 - DNA, 1172 bp, Bovine  19866880830075
  misc_feature (1)..(1): n is a, c, g, or t
ntcctctgataaaacataatggaaaaagaatatatatatatatatatacacacacacacacacacacacacatatacatacataactgaatcactgtgctgtacagcagaaactaacacaatcaattagaaatcaattataaattgatttataaaaccaattatacttttaaatcaattatacttcaataaaataaaacttaaagaataaacaaaaattaaaaattgaggtttttaaccagaaactgtcacacgacagaagaaactctggcgggggctgctgtccccacttcgcagttgaggacactgcggcaccaaggctgaaagagctcctcccggatcccatatccgtggtggagctggagccagtgctctggtgtctgacttcctgtcttgtttgacaaggggagcgagggggcaaggaacccacccagggacccaccctgaggatcagcatgcagacaggggcgtggacagcaaagtgaagtcactcaggcgtgtcctactctttgcgaccccatgaactgtagcctaccaggctcctccattcatgagattttccaggcaagagtactggagtgggttgccatttccttctctagggcatcttcccaacccagggatggaacctgggcctccagggttgctggcagacactttaccatctgagccaccagggaagcccttggacagcaaagggggaaaaaaaatggagaccaagaggagaaagcagagtgtgggaaggaggtgcctgtatagggtgccgataatctcaaattgatgcctgacttgtggacatgttggaaaaaaaacactctgtgaaaaggtaagcaagttaaaaattattaaaaatctcttggtaagaggatttctagaaaattgcttatatgcttaaaaaataagcatataaagagctgctgacaattagaatccaaataaagaaaagttactcacttctttcaggtcgtgtaaaatccgtttggggtgaacttctgtcttgcgtcgctggaattcctcatacaaaataggatctcctctatctagctggggttttcaatcattgaaaatattaaaattgaatacagatgcacacaactacaactgttatttctctttaaaatgggtagaaacacattaagcaattggtctaatccatccatgatgttccctctg

SEQ ID NO: 33133 - DNA, 4553 bp, Bovine  19866880882873
  misc_feature (1)..(1): n is a, c, g, or t
ncctctggcccctccaaagggctcccagcctctcagcacttggaagcctttgtgcccacattaagtcttgcagcaagaagctccaaacactgccatcatactaacaacattttatttcttaaaagaaaaaactgtaagtttaaaatatgtacatcatctatatttcagtcttttctctaaaactttaattccccaaatggccggaacataagcagacacagaggaccatggtgacctgcagaaaggaagtgagaggcactggtctcctggtggttttcattctaggatcaggtaggagctgagcgctttgctccgcaggttcttcatctcctcgagcaccttctctcctgccttctccgttggctgtgcttggtctttcacctctctaaatatatacatatatatatagaacacaaacccgatgaggacacatcagggcacctcttaaaacttcagttcacccatcaccaccctgcttctgggcccagtgtcaccagtgatgcctcatgaagatgggaggagctgtttatacacaaacacagtataaaccatactttgtgatcatttagttaccagtgaaaacacctggctgaaggtgattccaacctgatttcctgtctcagttgcactaggttcttagcagagccaagtgacctaaactctcagcctccgtttccagaggtacacgtggtgggaattcccatctctgaggattgttgcaaagagaaatgagaacttatgcatggacatcccggcatgatgggttctaaatgctcagtgggcaggagctgattctttatgtttatgagtaaagtggacacacagtatctctgactctgacaatggctctggaacaggggactcaagaaggaggattctgcgcctgggtggaggagtgcctgatgtggagcctggatgttgctggcatggtgaagggtagaactttccaaatacctgggaggacaggattagtgtatttggttgaaagcacagatgtctaaggatggtgagctcagctatatgatctgtccagttagaaaaattcaagacaaaattaagtgcttctcctctgtgttcacagcagcactattgacaatagcaaagacatggaagccacctaagtgtccatgaacagaggaatggataaagaagatgtggtacgtatacacactggaatattactcagccataaaaagtatgaaataatgccatttgcagcaacatggatggacctggagattattatactaagtgaagtcaggagagaaagacaaataccatatgatatcactcacatgtggaacataaaaaattaatacaaatgaacttatttacaaaatagaaacagactcacagatctgcggttgccaaggggtagggggtgggggggatggaccgggaatttggggttagtagatgcaaacattatgtagagaatggacaaacaaggtccttctgtacagcacgggaactatactcaatgtcctatgataacccataatagaaaagaatatgaaaaagaatatatgtataactgaatcactttgctgtacagcagaaattaacacaaccattgtaactcaactatacttcaaaaaaataaaattaagtgcttgtgaaatatttcctaaggagagtgaaacttcctaaagttttggcaaatgcctgaaagttttgaaaaaggagaagtatctcaaaatgagaaaattaaaacttccctaatgcatataattaaaaaaattaattggcaccactttatgaaatccatctaaaaatacatagttcatgtcagcccttaaatatgttaatggctgagtgatattgtgataatctaaggggagctgaatgatgtgtcaacaactaaagtcactcacacagtttcttgggtattttgcaatataattctccttagtaggtcttgagagggtgagatcaccatcaagatagcaaggaagctcttgggttgattacaaccttcaagaaagagcagatgattctttgcatccatgaaaataagtattttccagaaaccaaattgacagcagtcttcatggggacattaagtatcactgatgtgttttttatttctgtccgtctgtccaagctctcatgtgtgtctgtctgacactctgtctgcttccagctgaagctgaaggaggtgaaaaaaggcacaagtaaggactgaaaagacagaactgagcatcgggtcatgcttggtatacatggagagaatttcagaactgaatctcttgtaataacctataagggaaaagaatctgaaaaaaacagatacacacacatacgtgagaatcccatggacagaggagcctggtgggctgcagtccatagggtccgacagagttggacatgactggagcgacttagcacacacagtggtggtggttgaaattgataagttgtgtctgactctttggacccccatgaactgtaacccaccaggcttctctgttcatgggattttccaggtaagaatactggggtgggctgccatttccttccccatatttcatatttatatatatacatatacacacatcactgtgctgtacaccttaaactaataaacattgtaaatcaactatactccaataaaactttgaaaaaaatcatctgtgagatatcattggaatactatacagccaataaactgataattatattgataattttggcacatgaaaaaatgtacaaaaataatttaaactgcaaaataggtgaattcaaaatgccatggatctatttattgaaaatgtgtgaaatgtatgtgtattttgaaaaaaaaataacttggtgtgcagaaaatgcttagagttattgttgttttttctgttttttttttttttttggtaaagtagctgaaatacattaaaaaagaagagggaatttttttctttgggtgaagatatataaagtaataagttctatttcatttaatactcatttgataatcaaatggcatttgagactactttctgtagtcaaaatggcgaaaaaaccaggtgaaacagcaaggtaaacaatgaggtattgggtattaccctgctcatggggcaaactgttctaagtccaggggtagtttttcaaactgaaaaaaaaggttttatttaaaactcttagccatatgtttgaaacctgaaacaaaatgcaaagtgcatctctttgttgaggcgtcagatgtactatgtagtatagcatattttgttgctaaatagctgattaaaacagatgctcactgaaattctattaaaatttttttcccctaaattttgttttagaagctgctaatctactttctgagaagtgctggtttgctataggtttctgttactattacaaatgaaccaaaggaaccccttgctcctctaagatatgtgggcattcctttctgaaaaggcagggcctcctccaaacaccctgaacaaagaagacaagctaaaaaatgtacagcacacacaaggaagggtaattatccttaatatatgaggcattcttataaataagaataagataaagactttctgcaatataggcaaaagagccccagataaaagaagaaaaatatttggtaagtgtaggaaaatttttaccatcactcataaacgaagaagttaaaattaaaacaataatgtggtcattaaaaacctatcatattggaaaagaagaaaaaaacgtctgataatatccacgttgttcagggcatttgattgtgggcatcctgacctctgctggtaggatgtttgttgatattttcctggatggcgcaaagcactatgtattaaaaccttaaaatgaacatggatttagtgtttatgtttcaaagtttatcctaaggagacagtttgataagtttgcaaggaattatggcactaggaaatttgctgaagccctactggcgagagcaagacactgaagagctgacatgatcatcagtagaaagatcggttagcacatgatgggatatctaccagtaagatataaagacggatatctatatttataaacatatgataatatgctaaatgaaagtctagaagataaaacaatacgaacaatatgatagaattcacttaaacacatacagttggccctttgtgtccataggtccagcattttcagactcaaccaacccccaggtgggaaaaaatatgagaaagttccaaaaagcaaaacttgaatttgctgcatgctgaaaattatttaaaaatcatttacactggatgaggtattataagtaatgcagagatgatttaaagtataggaggatgtgtataggttataggcaaattctacgccattttacataaaggacttgagcatccacagattttagtacccaggctgaggggtgtcctggaaccaatcccccatggatactgtgggacgattgtatatacagtttaacaaaatacagtaggtgtttgtgagttatttaaataattaaagtattaatacttggaagaccacataccaaaatgtacaaggtactgaccctgggtgggaaggaataattgggttttatttcattcctttat

SEQ ID NO: 33134 - DNA, 851 bp, Bovine  19866881075428
  misc_feature (1)..(1): n is a, c, g, or t
naaattaagtcagagccagaaagataaacatcgtatactaacacatatatatgaaatctagaaagatggtaccgattaatttatttctgaagaaagagatatagagaccagatttatggacacggggagtggattagaagagggtgagatgtatggagagagaaacatggaaacttacattaccatatgtaaaatagatagccaatgggaacttgctgtatgactcatggatctcaaacaggggctctgtatcaacctagaggggtgggatggggagagagatgggagggaggttcgagagggaggggacatatgtataatacttacagctgattcatgttgaggtttgacagaaaacaacaaaattctgtaaagcaattatccttcaattaagaaacaaatcaactttttaaaaaagtcctcatcacaggtacaaagtaaagttgatcctcattaattatggattcaagaacaaacctcaaagtttagatcagcccctcttattataaacgacaaaggtataattaaaaaaaaaaacttacatttatataatttgcattgatatagtcttcattaccctttaaaatgacccgtgtagcatcatctgaaaaaatttaaaagaaagaatattttaataaagttatgttaagaagattaaacttaacacacaaagagaatagatacttacaaggcgaaatatctctgtatctatttttggaaatgttctgaggtaatttggcacaacacattgtcattccaggctttttccgatatagttgctaaaaaaagaaagtacaagacaggttcacaaagccatcgagagtttttacttttttaaacttgattctatg

SEQ ID NO: 33135 - DNA, 1187 bp, Bovine  19866881082589
  misc_feature (1)..(1): n is a, c, g, or t
ntatctttttttctttaactttagtatagttgatttacactgttgtgttcatttccggggtttagcacagtgattcagttatacatatattacacactgaggcccactgccctccagccacagcctccacttcaagaggctctctccctgtattagggacccactgacctcacaagctggtcccacaaaggggccctgccatctttgggaacaatgtcgcctgtttatctgacagagcgtctgctttcttttcatcttggaggaaaagagctcctgctgggagccgctaagcccagagtaaacggatgacctcgtggtgcctttctgcccgaggtggggtgaccagcttgtgccccaactgtgcaaacagacctgaggctcgggccgcaggggccgggctgcccggctgggaggggcctgccctctcccaacccctcctcttccctttgtggtttcgggttgaatggggagaagctcaaaggcagggcagggaaggtcaaagccaatttgcagggccaagcgtgggggaggaaagcggggcagaaaccacgtgtttctggaggcctgaccttcacctggaaactaccccggcctcccctccccgcgcttctgccggcagcgcccaggcagggccggctggtgtccctgctactgagcctcagtttcctcatcctcaaggcaggggtgaagacagcatctactaggcctgagcccttctccagggatagtgatttatgatgagggagctgctgctgctgctaactcacttcagtcttgtcccactctgtgccaccccatagatggtagcccaccagcctccgaagtccctgggattctccaggcaagaacactggagtgggttgccatttccttctccaatgcatgaaagtgaaaagtgaaagtgaagtcgctcagtcacgtccgactcttagcgaccccatgggctgcagcttaccaggctcctccgtccatgggattttccaggcaagagtctggggtggggtgccattgccgtctccaatgatgagagagggagagctccaactgtgggagctggagccaggtgcctgtggagcaggcaaggtgtccccaggggaaggccagacaaagccgtcagctggggctgactagcacctgccagggacacagtgaagacacccactcgctctctgcaacaacataatccc

SEQ ID NO: 33136 - DNA, 875 bp, Bovine  19866881723181
  misc_feature (1)..(1): n is a, c, g, or t
ntctacaatttaatgatcttatacttaaaaacagtatacacacattttttgtgaaaatttctattctagagctaacacaaagcaaagtgaaaaagaaggtatttgaaatattgaaatatgcttcaataatgatcattgtttataaataaagtgacattttcttctaaaattgcattttgtataatgaaatgggaaacactctttccttttcaattccttgctaacttttttttaaaacaaagcgtatccttacccttaagatcaagtcttaattctagtaacatttgaaagatacattcatttctttacagcatgaaagacatacaaatattattttttttcctttttaaagaacaaagcaaaagaagttaacagtttcaatcttttgtccatagaaaaatattttctatatcatttacacaacaataggtaggaaaattctacagtgtttaactgaaactttctatgagcaaaacaaggctttcaaacattttcattcttgtactggttttaggaacacattagaacctcttcctaaaactatagtcttaaacttgcaatattgctaatacctttcactttgtaaattaaaaaaacaaaacaaacaaaaactggtttacttatttattcactgaaccctgcctagtcagcattgatggactgtaccccagtacccctggctgcccaatcagcttagattacgacaataaagataacaataaccaccaaacttttgaaatcaacaataaactgtagaaaaagcatacaaataagtagcagcaaatttagatatgggaacaaaaataactatttggtgtctacccacaacaatttcacccagattataaaaataaaatgtgtcatttctcactgaa

SEQ ID NO: 33137 - DNA, 723 bp, Bovine  19866881734467
  misc_feature (1)..(1): n is a, c, g, or t
ntaaaatttgcatcttccactcgtggccatgagggtctccctccccgccccctcaccaagtcgccttggtacagggttggtcagaacagatgtcagcatctgggtggggtgaatggtccagggtcttggtggaacttccctcccacccaccaagcacatacactgcatttgcaaaaacaattccctatttggcagagggcagtgtttgccctgggataggaccttgcagccctgtgccaggccctgtttattctggcatggaccacagtgatgtccaagcactccaagtgtgttgaacttcctggatttcttatcacgcagtcaaccccgctggggagcaggtgaaacgctgctgtgtgcccagaagaggatattaagaagttccacaaacacgactcctgccgcccaaaggggcaggtagcacaggggcagggcccctgagggcaagcgggaggaggtagcaggaacagctcagatgcagagataaagcctttcctctcctccactccacctggacctcctttcccatcaccgagtccccactcccgaatcctctgttctggtcaggctggtctcctcactttacctggaacacagcttgccctgtctgacccctgaacctctgcgtgggcctgcccaccatctggaattcgcttcctgtcatctctcccattgaaatcctacttgatgggtagaagaaatgcatgactggaccatttggtg

SEQ ID NO: 33138 - DNA, 1640 bp, Bovine  19866881923245
  misc_feature (1)..(1): n is a, c, g, or t
ncaattgccaatattcattggagaaagcaagggaatgccagaaaaatatctgcttcattgactatgctaaagcctatgactttgtgcaccacagcagactgtggaaaattcttaaagagatgggagtaccagaccaccttccctgtctcctgagaaacctgtatctgggtcaagaaacagcaattagaaccagacatgaaacaactggttcaaaattgggaaaggagtatgataaggctgtatattgtcaccctgcttatttaactcctattcagagaacatcatgcaaaattccaggctggataaatcacaagctgaaatcaagattaccaggagaaatatcaacaacctcagatatgcagatgataccactctaatgggagaaaattaagaggaataaaagagcctcttgaggagggtgaaagaggaaaatgaaaaaatctggtttgaaacgcagtattaaaaaaattgagatcatggcatctgatcccatcacttcatggtaaatagaaggggaaaaactggaagcagtgacaggttttattttcttgagctccaaaatcgctgtggacggtgactgtagctgtgaaattaaaagacgcttgcttcttggaaggaaagctatgacaaacctagaccgtgtattgaaaagcagagacatcactttgccagcaaaggtctgtatagtcaaagctgtggtttttcccagtagtcatgtatggctgtgagagttggaccataaagaaggctgagcaccaaagaattgatgctttcgaactgtggttctagagaacgcttcagagttccttggacaggaaatcagaccagtcaatcctaaagaaaagcaaccctgaatatccattggaaggactgatgacgaagctgaagctccaatactttggccacctgatgcaaagagccgactcattggaaaagaccctgacactgggaaagattgaggacaggaggagaagggggtgacagaggatgagatggttggatggcatcatcaactcaatggatatgagtttgagcaaactccaggagatagtgaaggtcagggaagcctgttctgctgcagtccatagggtcacaaagagtcggacatgacttagccactgaacaacaacaactataacaacaaaccccatttttaaactgcttgttattctctgcttataaataaccattcctactgttgtttttaatagaaagctatttatcagtcttatactttctttaatgtagacccaagaagtataggtgtgattaatgttgaaggaatcatgtaacttttaaatgattgcagtacttttctattttcttcctttcagtgagctctgtgaacagagtatggacattatgctgactccagaaatgatcgaagcggaattcccaatgctggattacagggacaccaagaaagagaagtaagtgaatgctttatgccttaggaagaggtagcccaggataaaatttgtcctacatgacatacagaactgtttgaatctaaaaacatgtccaaagagacacgtttccagtgctttaggtatttagacatgtatcctatttaccacccatgccacctccagcctcgttgcttatcttcagtcactgggcctcagtctccccattcagaa

SEQ ID NO: 33139 - DNA, 2109 bp, Bovine  19866880498178
  misc_feature (1)..(1): n is a, c, g, or t
ntggggcgctggcctctggagcaactgaaggcgtttcatagcaacctaaatcttaacggctgaaataggaaacagagcaaagaacgtggaaactaggtcaaggaggaaactctggtaaacctcctgaaatggctgacgtttcaaacgttacaattcctcttatcagtcattttcaaaaggaaagtatgtattcccaaagggtatcctttccagaccaaaacaagacatgtaagcagacaggtatggagaaatagagaaacaaaacccaagtcagccacgcacgcctcacctctgtactgcccagccttctatgtctgtctctcctgagctgcactgcctcctggacatgtggtgtcaggaaagtgggatccacttgacctgagatgagaagtatcagtaaggaaacaaattcattcacagcttgaggtcattatctttaatccattttagatggattgcttggctgatctgatggactggctagatggtggcaagtgtccaggcaggcataagctccagccagtctcctgttcaatatccactcacataccaaggagcaaaatgcaaccagaaatcaaaagaaagattagatgaggtatcacctacactttctaaaatgccattggcattctcttcctgtaatggtgttcctttgtgaataaagaaaagatcttacctagtctacctgaatattcccttcaaaggactatcacaaaataaacaaacaatcattcttatgtcagattaaaacatgtgggacaagacatgggtgtttcagtggaaaagagtgttcatggcagtcattgtgtgagaccttccagtcccacacaatgtgggagaaaaaatgccccagtgaggaaaaggggccctcaggcagtaattccagtagggttggcaatgttcaagtcacatgacctgttccagcacaaaaggtaccagttcgcaggtgggcctgggacctgtgatgtggccttgcacaaagagctctatgcaaagagagatgatgataattgggtggccagccagacctttcctcaggattgggagtggaaagtgtggcgtgaatcagcagtgaggaaacactgagaagacacaaagacaagcagaagctaagaccagcagagccgcagaaaggcagagcactgggagaagagaccctggggcccccgctggagtgcctgaaggtgtgtgtgagggggttactgccatcccgacctctcctggctttgtgaggccaggctttccagccccttgctctctctctggaggctgatgagtcaattcttcctacgtttccataagatccagctatcagctaaggttcccattggcggcacatgagtcaccaccccaatccatggtaaccaaagagaccaaatgtttaaccaattagaacttagaaagacagggagactggagagagaaaagatagaaaacagacaggaatgtaggccttgaaaggaaaatttgagtagttccagtaatttgttcatgagtagaagtcctaccaacatctctgtcaggcaagacactttcatttcagagacttctcactaaaaatgaacagcagctactgaaaaccaagagtaaaaagatatgggatattattagctttttaaatcattccaaaatatttttatcatattttaaataattttcatcattagtttcaaggtatccaaaatcattctttggccttctcagtttcccttttttaaactcacagatcaactttactcattttgctatgttttaatattcagaaagaaggaaaaatttctcagataaaaaacaccaccttcatctttactttcttatcctctctggttttgagaaacagaaaaagaaagaaagactcatttagtttcatgcctcaaccctcttctccactcaaaccatccccaaagaggcagattttttttcagaaactcagagatatgactacagtgaagacagaaagaaaggatagaaagctctctcaagccccagggttattgctagtttagaaaaaaaagttctttataaaattccttttttggcgggggtcactccataacagctcctcctgtcattcaaagcctttaatgcatcatctgaattgcattaaat

SEQ ID NO: 33140 - DNA, 1471 bp, Bovine  19866880503742
  misc_feature (1)..(1): n is a, c, g, or t
ncccatggactgtagcctgccaggatcctctgtccatgaaattctccaggccaagaatactggagtggggtgccattcccatctccagcagagtctttctgacccagggataaaacctgggtctcccccccttaaaagcagattcataattaaaagttgaatgatataaacctacaattaaataagttatattaacgataagggcgatcagtactaaaagcttgtccctttctaattgttttactacattttaccagtatctatgtttttgaggttattcatgcttatgctatctatgtggagtaaatataatggtgtattacagcacattgatcccagttccatgttcattgacatcagcttgatatcagctatgtcaacagtctttaccctgaatgaaaaagtgaaagaaagaaattgaaagtcacttagtcgtgtccaactctttaccaccccgtggactttacagtccatggaattctccaggccagaatactggggtgggtagcctttcccttctctagaggatcttcccaacccagggatcaaatctatgtctcccacattgtgagcagattctttaccagctgaaccacaagggaagcccaagaatattggaatgggaagcctatcccttctccagcagatcttcccaacccaggaatcaaaccagggtctcctgcattgcaggcagattctttaccaactgaggtatcagggaagctttaccctgaaggaaactggaaaatgcaacaaattagacatttttccctcctgagagtcagtggttcaatatgtcctggcatagtgcaggaaggatattcctgagaaccagtgaagacgcacatcctctgctcacagaatttctaactaaatcaggctacatttggttctttgggttctgaaatggcaaccttattcaggagaaagtttccagtctttgaaaaagtggtatttcaaaaatatggcatagaggttacccccaggttctgattcagtgggttggtgagggctgcacagtatgagcacaaggtcctatgtgtcattgggaaatgagatcacatttgcaagcaaacacccatcagaggatgtctcagtcaccctctgcttcattttgatagaaaagaaagtagatgaaaaaattattaccacttcaaataagtcatcgactttctaaataaagactgggataattagacctgaaaatacctgtagttttaaaatgagaagaacaataggactctgtttctgccttgcagtggctgcattataaaaacccaacagttatctgctttcaattgttatccctcatgaaagaggagataaagaagatgaagagggaaaaacaggaggggcaaagagaatcactttcagaaagtcagtaatagttaagagcaaagacatcaaagtctgctgttaagtcataattatgatgtttaggtgataataaaaagaattaggaggttcccag

SEQ ID NO: 33141 - DNA, 861 bp, Bovine  19866880613631
  misc_feature (1)..(1): n is a, c, g, or t
ncacccactcttcagcttgacctgtgtacccaacctccctgagatgccatctagcttctgaatctacaggcagcctcaaggttgctcttgttgagacatgcgacaggctaagacactaaactgtcatgggacatcgttatcctatggtgtctgttcttggcacatttggacctgctatatttgagtacattcttaatatacaggagcatatatgttccagatgatagatgtcatgcgatcacccaaagagacagttgatttttaaataggtggccacattgttttggcaatgctgagttgcctcctcttaaaacatccagtaactagtaggggagcatgaacaaggcagaatattctgcagtaataggctctgcggcatgaagaagactcattagaaatagaaatgtgggggagtgcctccttgtcctcactgtccctcactgtcctgcccagcaggtgccacctcctactcagttgcaaacaagaagctcccactagttctccagcagcaactctgttgtcataatcaccaagcaaggtttgaagccaagcagcccaaatgccattctaagtttgtaaaatacgcaaagatacatcaatacagcaggtggagggtaagcctgcagaatgcaacacacaggctctgtaaacagggaggaagctctcggcataactcttaaaaaaggattgtgcagagtcccttaaagataatgagaagcaaattgatgtcatcatttgggagaagaaagggtgatgatcctgagcagatctagccatcctttccctcaggtcacaaggccccaccacatgcttcacactatccctagactccatgtgtcattactgtttgcagttcatacg

SEQ ID NO: 33142 - DNA, 3616 bp, Bovine  19866880649221
  misc_feature (1)..(1): n is a, c, g, or t
nctatcctagttttcccctggagcttcgaatagggcttttgggagaaaacaaaaagctcccatcattacggctgcctccctttgagcccgttagtatttgctgctctgcctagtagtgttaatactacgaacagttcactttttagtattccattaaaaagaaaagaacagtgaacatgaaaaagaaacaaagaacagtttcttcttctagtgagtctggaatgctgtgttactgccaagatcttcaccaggagagtctctggaccatagcttagaaggccaacagaatgtactagaaagcaaaagtaggttgttggagtcaggaacaagccgttaggttttaaacttaaaagaagtgttttgtattttacacatattttcaacagtttacattttttgtagttaaagttttaaaatcttggatttggttactatagcactgatttgagcttatcccatgtctaattgcatgaaacagatttgggccaaaaacctctctataaaactcatataaaacagaatggttattagatacatatattttctattaaagctaaggcatgccccaagtaaatttgctagcagtactacatagaacaaacgagaaatttgaaagcagagcattgacatcgtggatattttctggctatacactttaggacttaattcaataaaatagtattcataatatgaggtttcaatgctaggatccctagcaaatgcaaaattgagaaaagattattctgggaaaaggtctttgtcacttgtccaaattcattttgactcttgttattctttgcaattgacaaaactagccatggtcagcttttagaagtatctggtttgttttccagttacaaatggagtcatcctaataagtcatgagcaccatatacagttctcagtagtgtaaaaatgttaggttcttggttacagtgtaaaataatccatagtttaaccgagtactaattgtgagattatagctgttcaattgcagtgagatagataaacatctagacatttcagattaaaatattagaaagtggttctttctctacttgtgtaaccatcagaaaaaaagaaggtattatcctagaatattttgcaagctgtctagaaatgaaaatgaagacataaagatgtatttactaaagatgatagatatgaaaaaaatagaagcgccctcaagcatgattttgtttgaacatatgtctcttaaggtcacttttcacatgaatatcctacaattctgagataattaactcttgagtgagaagaaataaatttaataaagaaaatccaccagattttatccttgattctacctgtaactcctcccattacagttaataacaaaataacaattcaggcttgaacgttgggtttactttgacccatcttttccattatccagtcatcttgttggacactggttactaccgactccaccgccacggtgtcattcatatccactccatcttttctaggtttacaatcaaggttctagggtccaggtgttcacagcctctcacccagccttttgaagcagcctgtgattgtgctatttaatttttccctcttgtccctacacgttgcccctcagttaatattcctataaaatggtttcgatcttgccatgcatgtgacctaaatacctgatggttttagcagtgtccaaactccagagcccagtaaactaggctgcctgcaatatgaccactgccttggacagcttcctttacatgtctttaatacattctgtctttcaggcacattagagtaacattccatcaaaagaagacatactgtacagtcccatctctgaatctcaagtcttatgcttttggttcctttgaagcagcaactgaaaatcttaaaaaccattctcaccccttatctcatcatcctaataggtagcactggttaatataatcatgttgcttgcttgtttagatcatctgtgctgctcagaatctttctaaacttttgtccagacaactattttgacttgacctggtactcgtgatgaaattacttgcctcctatcacttaatactctaacggaactttgaattaaaataggtggtggatgtagactagaaatcattgtgtttgggaggaaggaaagaaattaaagtcgaagacatttttccagcttacagagaactgaatctgtttctcatacagcagcaagaatctacgtggacacaagcataatcaaatctaaaacgtaaaatgtagaacaagaaagatgaattacactctgatcagagagaagaagaagaaatgttgacttgtttgaatattcttgcacaactttctttggtagctcaatatgttctgggaaagaaccctgatgatgaatccagaaaccgaggttctggttctagctctgtaactgagttaatatgggacttccagaacaccttctctgtgtactttgtctttttatgaaacagatggaccagttctctgagtccctaccaccctgatcaactgtattagaattcatggagtctataaaaactgcacctcccttttatacaaacacaatgaatactgtgtaagacaaaaagaatggttacattctttctgtttgtgttaaaatatctgataggaattctccttgatgctctctctcataatactgagcttcagcaaccatcaaatgcttgagttattatggaattgaacagcagattgacagtttcttcccaggccctcccctcctcccctttctcaggccaatcagaatcttctcctacccttagtcatgaagatcacaaccctcttaaacaccagtgtatctgacaaggaaaatggttttagcttgcagtctctaaaatctaatgttgcttaggtgcaatattcaccacatattttagcaaatgggagataattcaagaggcagatttttctcagaaacagaatttatgtgccttaaaaccaatggatttgataatacctttagtcaaaggaagcttaaaacattgggttcccagcaagctattattacttactctgtttccattttgctctcaagagtctaattgatataattggtataagaggaaaacaacaggaatacttaggaccgaaaccattcactcaacagtggagattatttaataatttcacttagcaaaccccttgcactttccacagtagcagtatgtattctcactgtcattaacagtacctttcatccactgatttcccagaagtgttaatgacacagtctgtaagtaattgctacacttatctaattttctttcaggtaatgcagcatgtttgtcagtttaactgaataggctcatgaataactttattttcttccaacttctaaaatgtgaaaaggagaaggagaaaacatctatctgcggacatcctaactatcaagtgattcctaatccactgacgggtgattgctccctagcttcagtgtttgcactttggggcaggtttgaatctcttttctggaagatggtcgttgactccacctgtaggtatgctgtgactcagctcctacgggggacgttctgtgctctatttagataaaaacatttcaggttccttaatttccaaaaagaacaacaacactgctgctttactgttt

SEQ ID NO: 33143 - DNA, 1576 bp, Bovine  19866880696441
  misc_feature (1)..(1): n is a, c, g, or t
ntcaattgaaatattacaaaatatcccctaactctgtagtgaatgaattagcaaacatgtcaatttgtttgacctgttaaaatatattcaacagttgagctgaggaaacatagtaacagtaactctacactgcttgaatgggtttgaaggcacatctgtgacctaataagcaaataaggtgtggtgggaaccaaaagggaaaatcaggatcccaaggcaccaccctcacagcatgttctctgtaatgggacacactaagccaatctcagccagaaagcattaaaaactaggagagactaaccctgactaagaagaatgtgaatgtctcaccacagagtcagaagcagaaaatgaggagtcctgttctctgactccacgtggaaaagagagccatttctttttgctcctttgaacacaagacatcctgtacatctgtcacgagtgcatttggcttcaagccacagaaactccaagtaagcaatggattaaacaatttaagggattttccttctccttgtgtccaactgcccatgatggagtagctccataatgttgtcaggtacggggctgcttctactctccgattcagtcattttagtcggtggcccttaccctcatgcttgttacactgtggtgacaagacggtgctgtccaagcagaaagggcatagagaaataagagaaaagcaaaaattcatgctaaggaagctgtcaccttaaaaatctttcttgcccaggaacttccactcatgtctcattggccaggatgatgctcatgaccacttcttgcagcatgggaggctggaaatacacttttttacctgagcacattatttccccttgctgaataataagaagaagtgtgggaaatggacaggcggcaatcactgtcttccacactctggtaccaacagtctgtggcatccactaccaaaagctgacagtttgtatgggccaagagatggcctcaggtctatataaccaattccccacaagctctcttgatggaggttgctacatctattacctttacaacttcatagtacaagagcataaaatctccagctgcaaacttggaaagcgagggagaaaagaataagtcaaaagaatatttctatcctcaatcacagtcgctgttagttctacccatgatcccctcccttctttcttgctcataagtgaatctccctttggcttgtcagcaatgtgccaagttgcatggtaggggctggtaaattatagcctcccatcaaatcagttctgctgccagttttataaataaagttttattggaacacaaacaagcccattcatttacacattgtctatgggccacttttatactgtggaagccacacaactgagcagctgctacagagaccatctggattgcaaaacttaaattacctactatgtggccctttaaagaaaaagtttcaaacccctgtcctagataattacccatggttggactgacccagctaagacatggttcttcattcttccaccctctcagacacctggggtgaccatagaaccatataactggacaactgccgggacgcttctgggggaag

SEQ ID NO: 33144 - DNA, 712 bp, Bovine  19866880713367
  misc_feature (1)..(1): n is a, c, g, or t
nttaactcccatatgcagtgttggaatttaataccatggttcatcaatgtttggaattcaattgaatataatagatcttgcccctggaattagctttataatacaattatatgtaaagcaaaattgattttaatgattgaggtacaataacttcactaccaagttaaggtgaaaataataaatttactgcaatatctcggctctgaaatactgactgattagatattttaacccaaccatgcaagttagaacaaattctctttttttaggcctgtagcaaattagttagtactgcaagaaaccaggcagcacacctacaggagataaaatcatcactgcctttctttggtaccatttcggaatcaatggcagcagaatgacctttaaagttgggatcacgtagaacacaccataaaaaattttaaactgaattaaaaaatatttttgcaaatggactatacatgcattcataaatggcagtgagaccaaactgagttgaatgtgaatatgaaagctaatacgttttccaagtcttcgtgtgtaagaaattacatgttttctttgaggttaactgtaagttatattttttgtttatgatacaaaacttgtgacaaaaagccagtttctcaaataagaaacatttgtagtaaaacaaaaccaaaattgaacaaattataaacatatatgatgtaataggaaaagtttgggaatt

SEQ ID NO: 33145 - DNA, 1459 bp, Bovine  19866880728557
  misc_feature (1)..(1): n is a, c, g, or t
nttagtagataatgcttgaaatgggttgtggttacatggagaattaattacaccattgtctctactttttttacatgttggaaattttccatattttcctacatggattgtatttattatatacataaacataagcatgtattttaatgaatatatgtatgttgatccagattctaagtatttataaattcatatatatatatatatatatatatacacacacacacacataagtaaatatgcctcgtaagaacaataaaaatgtatagatttttgattaacccagttgccctatccttcaatttattggcatcgaattagtgttgccttttgtgtaattatcccctttcccgtgggcagcaatatcaatcatagtcatcaaacaaagcacactcaccttccctttggaacacttacctacacatatgggaattccataggaaaacaatagaaattccagcaattcccagttttctagttaacttctcagccccaaccactccagatttcctgaggcccaacatgatgtagatgcggaaattacagtactgagtagattgtgggtgttctcttgctgaatttgtgcaacaagtttgaaatgtgtcaccactgacaccaatttcttcgccaggcaatgccagatgcctcgtaggtttgatctaattagatgttgtatcttcttacgttaatcttttacttactggttttcacatcagtgctaaagttcaaccacgctaaagcgtgacgatgaatcagataaatcacctcttctgtcctcggaaggaatgagtaaggatctggagaaggaacctgggtagggggtgactctggtgaaagcccttctgtggcagacatcagccagaaatatagaggctccactctaaaacttctgtgaacttctcacctcttctcttcagtgccaacatgtcagctattaccgtgtctcctttctcaccttcaaatcacactcttatttttagatatatgtatgaccaacctagatagcatattcaaaagcagagacattactttgccaacaaaggttcgtctagtcaaggctatggtttttcctgtggtcatgtatggatgtgagagttggactgtgaagaaggctgaggctatggcttttcctgtggtcatgtatggatgtgagagttggactgtgaagaaggctgagcgccgaagaattgatgcttttcaactgtggtgttggagaagactcttgagagtcccttggactgcaaggagatccaaccagtccattctgaaggagatcagccctgggatttctttggaaggactgatgctaaagctgaaactccagtactttggccacctcatgcgaagagttgattcattggaaaagaccctgatgctgggagggattgggggcaggaggagaaggggacgacagaggatgagatggctggatggcatcgctgactcaatggacgtgagt

SEQ ID NO: 33146 - DNA, 1755 bp, Bovine  19866880775941
  misc_feature (1)..(1): n is a, c, g, or t
ntgattcagctaatgcagtttttcaatcattcagttaaaatttactgagcacattctgtgtatcagcagttctgcagttagagacacagtgatgaacaggcatgcatagtccctgtcctcaaggagtttacattacagagtactgaaggtgagttagccaattgacacacatcacaattgctgatggtgaagagtttctcagagtaaaacaagtcctagtggagatacaatgggttgaggaatgggagtcagggatggctttctaaggacagcctgcacatttaaaactaagacatgaatttagactggctgatgggtaggatgtgaggctgagagggagagacaagagacatgagaggccttaggaatttgggcctgaacaactgagtatgtgcttgtgacatttctctgactggaaacgctatgggaagagcaagtttggggaatgtcaggattcattctgggacagactatatgtgccttgcctgtgatcacagaggagacatggagaaggccattgcatttaaggttagaactcggtctccagtgtagaatgtataggttgaattggtttattggtaagacccttccaattccaatattctgtgatgctatgaactaaagtcaaagcagctgaaagaagctgtaaactaaagaataaaagagtaggaaagagaaccaaatcaattttcaatggagatgaacaaaagcattcatttagaaaagagacaaaagtaatttgccaaaatgggaggtgaaactacagtggaataagaatagaatagttcctatctgatatgtacaacttaggtttccgtgaaagctaaaacaaaagttttcaaagtgaatgcttggtagtaaatttcttattatcaaatgacattgaagttaataatctcctgctcatgaatgacttttccaagtgctttaatttatatagagggtttgttgaatgaactattcccaagacagctgtaaatcccagaagtaagtagttcaacaaatatataccagttaggtatttttgtgcggtttttcaacattttcatggaaatcacaacctgaaactgatctctgaatatgacacctttcccttagtaatcccaaggcagcctggatacattaataattcataaaacaccaatattttctatttaaagaatgaggcaggaagttgacaaaataaaagaataatcacaaaaatttccattttaaatttcaaagtgtgtttcagtatatcagtgaccaagaaactgacaggtatgggtaatacgaaagatgactccaagtgaataaacttatatttctgccttctatagtttccatggctacaggcccatctgaattgcattagtcacacacagcaccaagaacgaacaaaagaaaatggaagaaataaatggcatcagaatgtcatagaaagggaaaagtaatcacagattattttttaaaggaacacaatttttcttatcaagaactatctgctttagagtccacctccttcagaaggaaatgtttccagtcaggtctggaacttttttatgaaattgataaataattactctgtgtttttaaaaataaatcaatttattggtggctactcggggagttggtgatggacagggaggcctggcatgctgtgtgattcatggggtcacaaagagtcggacacaactgagcaactgaactgaactgaactgatgtggtaattagagcattcagaacattctgacatattcacagaaatgcaactta

SEQ ID NO: 33147 - DNA, 916 bp, Bovine  19866880814895
  misc_feature (1)..(1): n is a, c, g, or t
nactgagcacttaactaccaccttctcagccttttatttaatgcatttaaaatactcttataggcaatgacttattcccatgcatcaatggctatgccatggtgtgaaatactatttgtttccgtaagatattctggggaattgttttcttttttcacccctaggaaaaacctcaacaccatttggggcactatgactatttccaacttcagtttgagagaaaaaaaaattgcaactgttctttcattccataaaaatcatagtgcagtaaatccttttcatctcccattgttaaaaatctgtgatctgtccataggtttctatttccaaactcctaaatgagaagactttctgtttccagattctagttgcggtttcagtgtcttccccttcctgtggaatggaatgaaccagagcagcaaggaaaggtcattctgttgccaggtgggtgacatttgggccagaacttgagactgctgagcagcaggccaagctacgatattagctcgttccctgctgggccccagcttggagacagactttagaggaattgatgaggattttgacccacttacctgaagaaggctccacagaaagcagaccaaagctggagaataggagttcagccaaagggttcgttttactaaaacaaaaggtcaagtatgctagcccttagccaggcctaactggacgttagcttttctcctgttttattagtatgctgaaactgtgcaaggatcattctgtgcctttgacaaatcccgctcaatgcagaggttccctcctggtccttctctccccagacattagcttaacacacttcatatgtgggaaaggctcagcacaacaacagagagggaaagaagtatctgagtttgctgatgtagcagctgcccatgccatggttcatcattct

SEQ ID NO: 33148 - DNA, 1027 bp, Bovine  19866880824485
  misc_feature (1)..(1): n is a, c, g, or t
naaaaaacccagtgcagccaaaaacaaataaataatttaaaaaaaaaagacaagaaccaagagaaaatgtgtccaacaaacttgagtttggggcaaacacagtatttttcaacaagattgtggtcatcagaccaacaatgttttggtacttagtgtgttcatggattgttctaattcttaccaaagacctctgaaatgtggccacaacgattctcattgagagtcaaagatgagagtacagaggtttaactatgttacataatgtgaccaaggtaaaacagacagaaatttgtagggatgggtcttaaagacaggtctaacctgcatgaagctctcagagacccaaagcctagttttgttaggctgtcttcttctctgaagatactggatgggaggcagcatgccataacaacatgagtataggctttggatttggacattcttggattcaaatctttcctccatatgctagtttctgacttctgtgatcatcaacttccttattccttaaactgttataaatgatgcatgcaatgcctgccacaatgctcaatgtaatgcttaatatgtgttgtgtgtgtgtgcgcaaagtcatgtcagactctttgtgaccaccatggactgtagcctgccgggctctgtccatggaattttccaggcaagaatactagagtgggttgccatttcctattccaggggatcttctagatccagggatcaaacctgtgtctcttgcgtcagcagacagattctttacctctgagccacctgggaagcccctaatatgtgttaggtattattatttatatgctagagtagacaaggctcggagaaggcaatggcaccccactccagtactcttgcctggaaaatcctatggatggaggagcctggtgggctgcagtccatggggtcgctaagagtcaagacacgactgagcgacttcactttcatgcattggagaaggaaacggcaacccactccagtgttcttgcctggagaatcccagggacgggggagcctggtg

SEQ ID NO: 33149 - DNA, 1512 bp, Bovine  19866881170393
  misc_feature (1)..(1): n is a, c, g, or t
ncttccattgtgtagtgcgtctagcccggcttcctgcgtgagaccttaacctcacttggagcaggagcgattactgagaatttcggaaccttgagttgcaatggagctgtacggaaaggtaagcagaagggagctcctccgccggctccgcgtgaaatctcgctttcatggactttgtgtgtgtgagtgtgtgtgtgtgtgtgtgagtacactcgcgcgcgtgggcgccttctcagtgcaactgtgtgagtaaaccgctttctttatgtgtgtaccattcattgtcgttctcccccgcgtttgctgaatgagattgtaaaaccaccctactctgcctatggaaatgtacaaactttcccgattgggaatggggacgtgtagggcggagagttccagaacacagtgcaggtttcgtttagattgtaaattagcacaaggtagtgcgtttcctaaccaggaaaatcacaatgtagcttcggaagccgataggtagcaaagaaaaatctccagctgagatgaatgaactgaggtcactttcgcctgcaccttgcgaggaaatagctcgggaggctgagagcactaacaaccaggagcgagtccaaaagagaagggaggctccgcggccgagtcctactggagaagcagcccgtttaaatgctggcttgccgggaaatgtagtttactgctccccggtttgcggggaagctcagctaggctagactacaactcccaggagcactcggggctccgggccagtacgcgtgtgcggcgccaggaagggacagctccagtgctgatgttggagccggttagcgaaccccgagtgcagagtggagcgtgaagcgcgcgggctgtgcacgcttgaccgggcgcccgagccagcactgtgttagccagggagaaaggacactttgcgaacaatgagacacgaagctcccatgcaggtgggtctatatagaaagtgtggcctcgggaggaattgagagagacgctttctccctcgctccaagtacaaactgcgcccgatctaagggaaggtcttaggcagccatccgccgggacgcggttcagacttggtcctggggacagaaccccgctccgcggggctgtgattggggctgttttgaggagggataggagtatacattatcttcccgggctccacaaggaggataagagtgtctagaacgtcaacccgggcaaacaaaagtcagaggaacatgccatctcgtattggtattgattgttcctcctgtcttgcctggttcgtgatcacggggcagacacaccaggtctggtgttgcgagctgtctactggagtcggtatagagcaaattccgcttaattaagagctctctaagaaaggagaaaccaatgttagagtccccaaagtctctttcttcaattagggttctagtaataatgagcaaacacttcagggcttcactcttcccagaagtatgcaagccctttatctgtgtccacacggtttactcttgcgtttcagagact

SEQ ID NO: 33150 - DNA, 742 bp, Bovine  19866881209203
  misc_feature (1)..(1): n is a, c, g, or t
nttatagttctgtgtatttctagccccagttagatgcctgttttatgggaggaccctgagccagtgggctgagaagcagcttcatccaacccacaaccccctacaccttgtgccaaacactgtctccagaaacaaagcaggatgcaaacccaggaccagaaagtattcccacaggactcccccacatcgcctggggtcttctacataagccctatcttggcccacgggcctgctttacagcaacggcagcttccctctttgcttcacactacttgcttgtccaagtctgagcttggcagactacctcacctacggcaggggtatctgagggacagcccacggatgagctcatctgtgcactttccacagatttcaagaacgcttttgtctggtcttctgcaaccacatgagcacaaagtacatgaatgtctgaaaaatatgggtgcatctgtgcccctctgggcaggcacagatttgggacactttatactagaaaatgctctgatctaagaaaggatatgttactgcatggctaataaaatgcatcatctgtgtgcattaaagagccctttcaatccttaattattatcattatacccaaacagttagtgctctggaatttcatactgggatgggctttgcaaactagcacctcaatttccccaatggctggctgagggcagcagggagcaggcccactgagatttggacataccacagacaattcctttagaggaatgtt

SEQ ID NO: 33151 - DNA, 3581 bp, Bovine  19866881252439
  misc_feature (1)..(1): n is a, c, g, or t
ntgcccatttgttttccgttccgattcctgtttaagtccgttcttatgtttgcttcctttgactccctgcaaaggtgcctctgcctaagcatcgtgcttaagttctgtttttaagtaaagatgagtgatgctttctcgtttgtatgtacaatcagttattactaaccatcagcctgtgttcattatcaaggagagtgatcccattgcgtaacagaaaggcactttatgaatgaattgagagggaatggaacacaccgtttggaacgtgttgtctctcttgagaacccacccctgctgccaaatccagcaatataaatgtttgactttaatttgaattcaaaggttttccaactgtttttcctcaaaaaatcaagggctttaaacgtatgcgtcaatttacttttcctttatggtgtgggttatgtatggcttctcaggtggctctagtggtaaagaacgagtctgccaatgcaggagatgtaagagacgcgggtttgatccctgagtcgggaagatcccatggagaagggtatggcaacccactctaatattcattcatgggttatgtatattaagagatgttgactgttaagtgaaaaaaatttaactgtttgttgaagcattatattaatgaaagctctcaaattgccttatgagttactgaaaacttgatttgttccagagaacagttgccctgctgtgtatcttctaatacctgtctttgtgacttagtttttcattatagacctgatgtgaaaagaatctggacagacaataaaggtacaggctgttgtaatcaagatgtattggcttatgataatttcccattactggagttactgccaagagccaactggctacattaatcatatttgattacaagtaaacattgacagtagactttaaaagtagattgttagtattcaacattaaccccatatatgcactgaagtctttatgttaaaataaattactaacaaattgatcacagtgcatcttgatttttattttcttacagtatttattttcttacaggtattgcttagactgttcagaagggtcatcaaaatattacagaactacatgaaattagtgccctaagaaatatttaaaatcaattcatatcaactttgtagtaggcactgcaattctaaaatttagtcagaactttaatgaataattagtataaaaacgggtaacaaaattaatttgcttctgcagttattttcatatttgggatgtattttattcattgacttggtttttttaatttaaaaattttaatgcccaaatgctgtattgaataacatgtacatttaaaaaaataaaaaacttttttctgtagtatatttaaagcacatttattgattcagtttaccaagtaaattgttgtggtggccaactctcaattactgtcaggttttcaaaaatatataatgataggaagaaataaaaactataaacatgctttatatatatggcagatattgccttagcacttgcacttgtgaatcataatcacattccagatgactttgatatatgaaaatataatcagatgaataattgacattttttccatttaaagaccaaaccatatcatttaaaatgctaatttactttttatattttcttaagtcaaagaaccctttaaaattgttcaatatattttaaaaaagtatttattgtgcctttgtacatagcttggtgctctgttcagtatagctgtctttgatatatgcaaattttctgaagaatatttctctttgagttgatgcaaaatgcaggataatagcagtaatagtctttgctgtctgtatttccaactaaataaccaggaatagcatttggtaagtgttccaaatgatggattacaattttaatgcaggagatggtcattttgtgttttttcctttagtgcctccataaatcccgaggaccaaatgaaatggggaatagcagtgctcatgacttaagggcaacactttcatgagcaaattatcatttgattcaggagcctgattgaacaaattccagtttatctagtgctttgtctgtgccaagcactgtgctttgcagtcagatctatgtgtgtgcgtgtgtgtgcgtgtgtgtgtgtgtgagaaatataaaacagtcctagaggtcaccattaccttaattacaggcagataactagagctttatatgattaaacaacttgaccaacacggtaaattcaaaattctgctagatctctaggaagcccatgttgtttccgctattattttgggttccttaagaagacacaaaaaggtgatataaagaatgagtgccatgttgattttcatttggatcagaaaaaggaaaattgtctcttctgtttataaaattatcttatataaactaaatcaaatatttgagaagggtcagtgttttaaaaatggctagctctttgtcttcctggtttaaatttcttatagctttacttacactctccaaggaccaaagtggagttcattgtctgtgtttaaatgcttcatcttcagttttgttatccacaagctttcttcatgtaggtgtgaaagtacagagagccctctaactacttcagttcagttcagttcagttcattcactcagtcgtgtccgactctttgcgaccccatgaatcacgcacgccaggcctccctgtccatcaccagctcccggagttcactcagactcacatccatcgagtcagtgatgccatccagccatctcatcctctgtcgtccccttctcctcctgcccccaatccctcccagctacttaggaaaccaaagaaaaacaactactcaaagcgtggagcggtgtgccaaaaaaggttgtttggctaaaaatgaggaagattgaagaaagagtatgctgaaagtgtagaaagtgtaggctgaaaatgaagttgaggtggaaagcacaatagatattaaatacagccatgctgtataacagcaacaaaaaaacttagaaacaagacctaagtaacgttgtttcatttgtctgtgagaagtccacaggcaatcttgcattttattactgttgaatttctaccacatccaacttcaaattatgatccctttatctttacataacaaatggaagtttagtcctcatcccttacagagacggagaaaagccatagttaacattggagaaacaagaacttctttcttgctcgatttgagcaaattcctcaagtatccacctttcttctgtaagggaaagtggagggtagagagggaaattgccataaaagcaaatttctatggtgtaagaatgattttccgttttcagtttaaagagttgtgggatcattacatggcataaccacaatttccccctgccattttaagcttatattggaactgcaaattcctttcttgaccatcatattccatatgctaaaaattgagttttcctgggaatttatgaggagttgcaccgcctaaaaaagatgtattggttaaaggtcatccaacagttttctacatttatcattcactaataagttccagagcttctagggcagtcctcttaatagatcatagatttttaccatgcata

SEQ ID NO: 33152 - DNA, 940 bp, Bovine  19866881255484
  misc_feature (1)..(1): n is a, c, g, or t
nttatgtgaggacttgccatcaatcttgcactgttcatcagtaaaatacatatgaatcatataatctgctgtctagagtgtgaaactcaaaacataggccagatatttttaaaaaatacattctccccccctttttttgctacatttttctatttaaaaaaaaaaaaaaacagaacaaaaatctactgaaaagctttgtgaaacaaagcacatcaaggacatttccacttaactactgattgaaaagcataaaggaagatactgtatcaaaagaaatacatcgtcatccttgcaccagtaacccctgtaatggtctcagtagtagtcttgaaatttgctgagtctccaggaatttcaaattgatttcatcaattaacctcatgtgtttccaggaatctaaagaagccggcctttgggttacatatgtataagcatattctccgatgaacttcccagattgaagctgatcaaatgactcattaacagaaaaccacgtgagataccaacacatcacaagagcttcttaacaacgacgaaccattaatacctagtaagtcattaatagtgaatctaaatagcaactcccctcctgatggcattgtaagctctttgtcaatactttggaatattatggtgttcgcctacatattcattacagtttataattaaaacctaagcttaataggccacaaggctagtaaatgaaaaatccagaatttaaaaccagtgttgaatgaatataaaattagttttatttctagtatgtatatctccatgaaaagattaatagctatatatttcctagaccattttccttgcctccatcatgggggtcagtatattagtaatgatggagggaagactaactatgactaataagctaactacttatgattgggaaataattctaccttaacttttgagggttggaaaaacaaaa

SEQ ID NO: 33153 - DNA, 1989 bp, Bovine  19866881330481
  misc_feature (1)..(1): n is a, c, g, or t
ncatcctcaaggctgtgagcagtcttacagtaagcaaaaaaacccaaccaaatatgagagaaaaactgcttaactttttaaaattatagtagccaacattctgtgagcacttaggaattctaaaccttcatacgctccacagtaaatcctgaagacaccttgatgggagaggactctatttgtcctctcttacagaggagggaatgaaggaagagcggagagctaatcactccctctgtgcgggctggcagtctccctccaccacctgtgtgctaacgccaggattcgagctgtctcgctaggccgaaccacaagttttcatcacataacgcttatttaacagcacctctcagaggacaactctttggaatatcaatataggaaatgctgaattagacagacatgatgataaagtaatggaaattttgccttttaagtaaagtggtttaaaagaagatttagttactgaaataccaatcggacatttgaagaacaagacggtcagtattgactggacattgacattgtgccagggattatgctaagcaatgtgggtgcaatagggaacacaatcccttgcagcacctaaagcctagtgaaaaggcgtatctgcagatctcttcagatcaagacagtaggagctaagagagacactgctacacacaggcagtggggacaaggaaaagagacattcagctcaaaactgccagggaaaggaagacatgagcaaggcctcacagaacatgaaggacataatcaaaggcagaacagcagtgttctaggcaatgatcccagagcgcaggaggtataaagttgtgaagctttaaatgtcagttcagtctttagggctgtattttacctttagccgccctgccacgtaataatacaaacagaaacacacacacacacacgcacacaatctgcaagtaacgtaacaaagataatatttatgtaaaattacacggtctactctagaactcaggacaactggatatccatctggatttcatcttttgaacttatggaaagttgttttaccatttatccctttagttttttgaaagataaataaaatgaagggatactgcctggctttttctccagagaggatttttaaataatagatacaaccattctttgaatctataaaaaaagatgctatatacatattttgtcaaaatagaattattgtagaatcatttgtatgaatcagatattacgcccttgagtttctgttttcctactttcctatcttttgcctagcaggacgtattttattctcttcttacagttacctttgtagatgtggttgggtgcattcagggtggtatgtctgtagacaacagttccctttttaatcacagtggttatggttaggttttcttttcctgcttttctgtctatcatgtggtttgggtggcagagggcctggtaagtaatttgttctctagtgtaacttggactaaatagtttatccaaataaattttcttctattacttgatgattaacaaccaataaactgtgatttaacttcctagccatttctttggtgtagttaatatctacttattttaaccatgtgctttttcaggtgcttaaactgagtagtatcagtgacaacagacatggacaaacgtttatgtacgtggatcttatttgaagacatgcttgactaaaaaacattttcctggacattctctgtaaggagcccttgaactccatgctactggttaaaggcattatggaaacatacattttagcataaggcattatgttgcatgggaatggtaataatacacttattagctagcaaattcattaatactgattggtttatgggattagccacaaagcaactagaactttaatggaatgagtcaactcataaagtttcactgtggggaccaaggagttaagaaaactttaaaatgaggaagtcgagcagttgaaggtaaggagagaagtcatgaataagaggaagtcaaaat

SEQ ID NO: 33154 - DNA, 1477 bp, Bovine  19866881375070
  misc_feature (1)..(1): n is a, c, g, or t
nagatgactggtgaagacggcagctgatagagagctctagggtccccatggatccaggactctgtgtcagattgctcagtctcctcgtacatacatcctgaggtcttgacagtgggcacctgccctggcttccctgccaacacttgttaatccaataaattctaaacctgactgatccagagaatcacatggggagctttaacaatttagatcccggccccaccttgactattctaattttgcagaattcaggaggagtttcccaggtttggaaatcttggatgtagtgaagattcagttttgtattcctaagtaaaaacatatccagctctacagagcaggtatgtgtgtgtgtgtgttactctgttgtgtctgactctttgcagccccacggactgtagcccaccaggcttctctattaatgggattctccaggcaagaatactggagtgggttgccgtttcttaactctagggcatcttcccaacctcttacctcctgcattcgcaggtgggttctttaccgcctgagctatcaaggaagcccgagagcaggtatatgagaacacaatgtctgctatttcttgctaccaagaaatgatgagaaggcatatatattttatccatatctatgagaaagttttaaaggattttttacattttgttgctaagagaaaggctctttcatttttataaattgacatctacatttaggaagtgtgaatgtcaagaatgtttgatgacttttttatattttagacttaattttgttttaaaagagctgtatatggagaaagatgttgctaggctttgcaggatcctggattttcaaccagtccttctgattgcaccacctagaaacatctagtgtgatctaccatcccagcttgcagattttaacactgaaagttctgctgtgtaccatgaaacacctcagttttgggcaaacaagaaagttggtgactctagctacaccctaggaacaagacacttggtgtcttcaatcctaaggccattccagacttgcctgggctctggtggacttccctagcaggcctaaggttcccctttctctagtcatgcacttccagatcccaaacttttgttgacgtttctgtgctacttctctttgtctatctggaattttacttttgtggataccctttgcattattttagaaaggtgttagcaaatgatggaaataaccatcctgtatgcaagatattgtttatttattgtgggctttgaaatttttgtttctgttgagatagaattgaaatatattgataacattgtatagctttaagatgtacaccaatttgacttgatatgcttgtgtattacagtatagtcaccacgatcgtgttagctaatacctctacgtatcgtataattatcatttcttgtacatagtgggaacaataagttctagtctcctagagacttttgaagtttatcatgcagtattggtggctata

SEQ ID NO: 33155 - DNA, 2113 bp, Bovine  19866881591777
  misc_feature (1)..(1): n is a, c, g, or t
ncctttaaaatcccatgggcggaggagcctggtgggctgcagtccatggggtcgctaggagtcggacaggactgagcgacttcactttcagttttcactttcatgcattggagaaggaaatggcaacccactccaatgttcttgcctggagaatcccagggatggggagcctggtgggctgccgtctatggggttgcacagagtcggacacgactgaagagacttagcagcagcagcagcatacctggatgataataaaaatattaaactacttactagtaggatacacaaccaagtgaccacagtgctgaaacaacgtctgtgatagtcagtgtagctagtctgactataaaatagtccccagttatgcaaacactaatttaggtgttgctatgaatgtgttttgcagaggtaattaacattcatgatcagttgattttgagtaaaggagatattctatacaatcttagtgagtttgattcaatcagccaaaaggccttaagagcagaactgaagcttttcgaaagaaaagttctgctatggactgcagcttcagttcattccgacccttctagtttgcccttcctgccctacagatttgtggcttatctggccaaaccccacaagtgtataacacagatcctcgctataaatcccttattatacgtctcctgctggctttgtttctctggttgaatcctgaccaatgtagggtttacaggcctcgcatagagtcaggcattacgtctttaggagtgtggagatctagggcattccaggaaaggggcaggatggatgaatgtgggagtgggtagggacatggggtactatcacttcccaagagggtagcaaggtatttccctgctttcatgaccaatgcaagtgtatgagagtatgctggttgaatatcagctatttcaaaaagagggaaaagaatgtatttgaccctgaagacagaaagtagctggaatattcagagaaactaaaaggagggcagagaggctggatattgtaagcaagagagagtggaaggaaatgaaggaagacagggccaggtggtacagggctgagaagtacaatggcttttatctcaaagctcagtggagcattgcaaacaattgagaggctgcttcctgggtaataaattagcttggggctagagtgaagccaggtgcaggaggacatagagtgcctaggcaagagtttatagtggtttaggtaaacgtgacaacagcgaagatgcagagaaatggatggtttcaagatacatttgggagataacaatgcgagtcatgtgagtgcttgctgataaacaaaaaaaaaaccaaaacagtggagggagcagatgagcccccgtttctatagggggtgataaagagatgagtatctgtgaatgtcaagggaaggctttgcaagtcccagttggtaatccactaagtgtaggttgaggagtggtgttgtttagggttgggggtgtgacacaagagcctcctgcactgtgaccaggcatcttgtgattatgggatggagatttcacctccccttcagatttccactcattcttgcccacacccagtctttgctcctctaacccatttccttctgccttgcgtgtaaagtgctcgtttccccacggtgatttccatgttgttgtgaaggagtgtgttgtatgcttgattgctggacttgtttcatgctatggaatttttgaaataccaaggttgtttctatatgactgccagaaatattggaccaggcccaggaaatgtgttttgtcttcatgcaaaatgagtgagggaatctttgacatcctccagaagaatgttttgtgctgaggctttaaatacaccttaactaatcctcgaaaaagattagaagcacagggttagttgacatggacctgcttaagaaaaacatcagtgaggccaatagagtgatgttttttaagggtctgtggctactattgtgatttatactcaaatattaagcgttatgtgctgaattacgttactctaaaaaaaaaatagatgtgttggagttccaactctcagtacctaagaatgtaatcttatatggtgataagatttttttagaggttattacattaaaacaa

SEQ ID NO: 33156 - DNA, 725 bp, Bovine  19866881760578
  misc_feature (1)..(1): n is a, c, g, or t
ntattcgattttacaaagttcttaggctgggcctttagccaaaaatgtatttccctttatcttttgaatgaggtacatcttagtggaaatttaatgtggatgttttaggcttattaagtatttttcctcagctatatctagtgtttatatgagatgccaggtaattttgacaaataggaaaccaagtacctttttttttcttgataactgagataccttggtgcctcagaaacatctttaataaactggattcagggacattatgtctttgtccacgacccactcaaattatatattcaactggatacctacggggtgactgcatggcagagatagaaacccagtggccagtgtttctcctacaaacagactcaaattagtgttccagtttctcacttattcttgggaagaaacaaagagcttagagggagaggagtagagatcaaatatctagaggtcaaatatcagaaccatagcttgatgtgagccttctctgagccaagtactacaccatgagtgttatatacactccatttaaatgcccacaacaaacctgccagataaatattattgtctccctttttgttggaaggatgaaagtatttgaattattgccaaataaatggtacagaaaacacagactacagaaattcagaagataaggaaaaaattgctgaaatagggtttcccaggacagtctcatggtagagcttgaaatctgtgta

SEQ ID NO: 33157 - DNA, 1663 bp, Bovine  19866881762251
  misc_feature (1)..(1): n is a, c, g, or t
natgctggccccagatagctgaggtgtacatccaaaggagtgattttaatgagcccagactcttgcaccctcctatacatagaaacgtgctaaattccttaactggagatatctggttttctttaattaacagtaaacttttgatattccgtccatcctggtctttgttacaaaaactgtatatcctggctgtgcccctcgcctctttggagtggtccttcagagttatctgagatgctgcatctcgggtttaagtcctaagttttgcccgccaagtaaaacataacactcatttttataattgtgcatttttttttttcagttgacaggactgatgaaaatgcctcttaaaacgcaaacatggcaagaagaaggagtaagacggaagtctattttacccacacaattcatcactgaagattggtttacctggctagcttagttaagtgatcagaccaaggggtaaaggacaggtctggtgtatttggacaagagaggtggagcctgagagacctgggaagaccgggatggaggaagctatgtgagtgagtgggcgctgggaacagtcaggaatggaagagctaagagctccaataagcaaataaatataattaattataatacatagtttcagggatttcctgatggtccaatggttaagaatccatgcttccactgcagggggctttcagctgttcagaaaaaaagaaaaaattaagaagaggactaaaattgaagctgagagaagcattaagggattaaaaaaggcattgtttgtagagtctaaggagaaaggaaatatttgttaaaaattaaaatgaaaactgttatagcacagtcccagttcaggaatacttcatggcaaaaatagaggccagagagggctggaggagagcagaggtgcttccaaagcgcggctgtgtgaacccgtctccttatgacagttgtctgtgtctgatgacaaaggcgtaacgtgatgttctgtccttctagaggaggttgatgctggctgcctcagctaagcagatggcccacgtgattgttgacacaggtatttctttctactcatcaggtctggaagagcatttagcagatgtcttccatcaatgtgctctgtagaattccatcttataacctattgaaagaggaaaaaggaaaatttcttcaaaaaagacacatgggcactatctttataacctagagatggtggtgttttagttactaagttatgtctgactcttgtaaccccatgggctgtagcctgccaggctcctctgtccctgcgatttcccaggcaagaatactggagtgtgttgccatttccttctccaggggatcttcctgacccagggattgaacccgggtctcctgcactgcaggtggattctttaccaacctagccactagggaagcccataatctcaggataagaaagaaaatatctaaaaatatagaaatcacaaaccatagatgaaaagaataatgattggctccattaaaattagtaacatttgtaaaataaaagaatcatacaactcactgtgacttttattatttgctttggcagaagacagcattgtaaaacactgctctgcaaaactatcttggtgtcttgaatttacagacaaacttggattgaatcaatacaaacttaattactatg

SEQ ID NO: 33158 - DNA, 828 bp, Bovine  19866880716712
  misc_feature (1)..(1): n is a, c, g, or t
naaatgtagggatatgtcccatgattgtggcagtgagaaagtcctttaaaggagattgtctttaaagaagtcctttatctcattagagaattgtctgtgctggaaagatggtgatatgtgtgtcccatagtggtaaggagatttagttgttgcttctgtatagaagctgttcttgagcatgtgtttgtattaagttttccttcattaggccagtataaaactattttgagcaaacatcagctcacagtagaaacgggggaagtaagagggtgtggagtaaaagtgacacagtattggatggaaaggaaaagcagctactctgaatttgaaaatttgccgtcgagaatcagaggagaatattcccatgcatacttagttgtccattcactttatcaccatcattcctttcctccttaactataaaaaatattgggctgacttacaaaagacattgaaagtttaccctgttgacttcagttcccacatactagaagcttcaaagagtgtgatgtctagggttcctgggggagcaaagctgagaagagaagttgagaggcactattcctcatcacttactggccttttctcaagaccagcagggagaaggaagtggccagttaacttgaacaagccagtactgttttaggttatgttcagcttccagctcaggtgccatctcttctattaattgagctaaaacataaatgtctttatgtccaagcttccctccttctcccaccattccatcaggtttatgaaagagcagtaattttggtgtttctctgttgttgaagatgttattcatgtattactttcaaatcctccacg

SEQ ID NO: 33159 - DNA, 1216 bp, Bovine  19866880829923
  misc_feature (1)..(1): n is a, c, g, or t
naacacgaatggctcccacacctggtgctacagagaacccaggagccgcagcttaccagagcaggagaaatgagtagtgccccggtggtctgcatttttttcagtctgcagagggggggaaaaaaaaatccattgacagcctggttgtttgcttacagttgcgaccttcggtcgtccccttcaccccgcccgtcctccctggaccacgctcttcctcgaaccatgccccagccgagaagaacattagaggtcagagggacagcgcaaactcccgttccacctctttcagcgcgacaggtctgtaaagaaaggtcatggagattggaagtaaaagaagaaggcccgagcccagcagggaaatgatgttcaacgaggatgatctccgggatagactggggaggtaggaactagacagatgccgttcagggtcctgcccatttcaaacagcactccaccgcccgcctcagctgggacagttaatcgctcattaccgttggtaattaagattaattgttaaggttacagatacccatcgcttttccccgccctacggacaaatgcccctccatacaacccagccatatccttgccgattgctggctttcggtttcaagtcacctgtactcccactgccctgctgcccctgctcagaccacagcgctcgcccggctcaaggtgactgactcacgtcccggctttagctctaggactcggcacactgctcccggacccacgtgtcccggggttccccaactctcattggccgcaatccccccgcgccttcattggttaacaccctctagtcctcctttcttattggtcttgcggaacttctttctctctctccacaggagcttcgtggcagttcccgcctccatgagggcaaaggcggggttttcctttgagatctggcttccgattggccggtttctgaagtgctcgaccatagagtctgctggactaagaggtttcataaccttccccacaaaatggcggccaaggtgcaaagctgaagaaaaaggcatgggagcgaggccggacggcttacgcagacaaacacatgaccttggaccttagccttcattcgagcgctcgggccctgaggcgcgttgtcttttgggatttgtagtcgcttcagaggccccaaaggtggttgagatcccgcgagactcccaggctgggcgagccaacgcctttgcagcaattcccgccctca

SEQ ID NO: 33160 - DNA, 1845 bp, Bovine  19866880964895
  misc_feature (1)..(1): n is a, c, g, or t
nctcaaataagcttgttagacagattcaactagattgtagtgtctttccgaacagaaaacttgtttctctttatatgctagcccttctgctttaaagttcttttgcatcctggggttgcttctctctgcccctttatagagaccctcaggataccctccccattttggtctgccgtttttgtccctcacctcttccaaagcacactcctgtaagacatcattaacttgggctttgctcacatcttgacactcaggtcccacagcccttctgtcttcagtttggaagatgatgtcccttatattcatgtccttacattgcttttgggggtgtttatcccattttcccaacagattaggagacccctgcaaccagaggctctctcccccggcagggcagaagaaggaatgtcttcattaatcttgcagatccctgagggaagaacttatcttctgttttttaaaaggaaatcctggccctatattagctctgcacactgtgggtgctcaataaatgtcgactgactgggtaaataatagacttagtcccctggagtgtcatattctttctttccacagggagaaagtaataacattcagcagagcaggcttggtctcttaatatgattacctgggatttgtgggctggtgactctttctcccagctttattgggtacattcatctccacagagtagatattcccggagaccactaatgctactggccaaacaatgggctaccattaattggcctaaccctgctcatcacgggcttcccccgtggcttggaggtaaagaatctggctgcaatgcaggagccacaggagactcgggttcaatccctgcgtcaggaagatcccctggaagagggcatggtaacccactccagtattcttgcctggagaatccccatggacagagaagcctggtgagctacaggccataggggttgcaaagagtcggacatgactgaagtgacttagcacgcatgcacgtacgcactgctcatcgtacatgaggcactgcctccagcccgagactccaacactgctgaagcaggggttgtactgacaagtgtgctttaaccaaggtcaactgtgttgaacttgttgtgtatctgtatttaagacatcctagagacttccctggcagtctggtggttaagactctgctccctatgcaggaggcatgggttctagctctggtcagggaactaagatccttcatgccacatgatgtggcaaaaaaaaaaaaaaaagacatcctactatgagccttatatgctatatatgaccttaccattttttaaccttttaaaaacataccaacttgagatataaacaatacggaatacatatcatctattttgagtctgtaattcagtggttttagtatagtcacagaattgtgcaaccacttccataatacactttagaacattttctgtactctcaagagaaactccatacctattagcagtcattctccatttctcccaacactcagccctatgaaaagggctgttgtttttgttttagttgctgagtcgtgttttgtaaccccgtggactgtagcctgccaagctccctctgtccttggaattctccaggcaagaatctagagtgggttgccatttccttctccatgggatcttctagacccaaggatcgaacctgtgtctcctgcattagcagggggattctttaaccacggagccaccagggaagctccaggaaaagggctaatctattttgtttccatagaatattttcttactttggatatttcgtataaatggaatcttgcaatatgtggtcttttgtgacgagcttctttcaattaccaag

SEQ ID NO: 33161 - DNA, 1340 bp, Bovine  19866881003610
  misc_feature (1)..(1): n is a, c, g, or t
ngaaaggaaagctgctgcctgaaagccaagcaggaaaacagcttcagaaaatgagttcaatagagtcaaatactagcaggtaaattaggtgcaaaagaatcattaacaaaggaaaagaaaaacatatggaaagatgtacaagtgaagcagaaggtgaaggatgcctaacgtagtcagttttagctacatcagcggggctagaaacaaacctttgacatcaggaactaaacattgacaggcagatgtgcttctttcgtctcgttttaaaagccagtgttttctcattaaagagcatttgaaatatacgaaatagaaaattacagttccatcaaacaatcactgttaacatttccatctagttctttctatgcataggttacctttaaaaaaaaaaaaaaagaccatttaattgttcatctgtgtgcatatgtgtgtgcacagctgcctgccttgatttcaaacataagcatccttctctaaatcctcctggaggatctgtccccaagcagggagcctgagttctggaccttggtgaggttcccccagggtgagctacagagtgtgggcctccaacccagagcatcttcctgtacctcctcccatggaaactgctgcactggtttggcctggacaaacaccaggcactttcccctgggtcaatatttcacatccgttgtcagaggctagtccctcctcaacatctgctccctgggctgttgttctctgcccgcccgcaatacacacacacacacctctgaccccctcctggtctctctatgagccccagcagcagaggtgctttctccacctcactgcttcttgctgtttaccttttccacctttttaaatccactagcctttccctgagccaataatctcccacaaatgacaggaaggagccccgtcaacctgaaaaccttccccgattactgaacacacaggcgcctggtagacgcctgttaccttgggttgaattcaggggttcctgcctagtctgcaggcagcacagtctagccccagccatgccctctgtgcttttgtggtggaagggtcgatgccccaagtcaattccccggaatctgccagggcgcccagaacacattctgatcaaatgtccaacgccgcttgtgcttcctgctgccagcctgtgggagccctggggacgcaattttatttgaatagacagggaagggaaaaccaatgcaacaatgtgacacaatttactgcaaagagcaactagaaattctctccaacattttgtgttttgctccccatcacaggctggaaaaggtattttccaattgcatttcttttgatttatgcctggcttggtcctctaa

SEQ ID NO: 33162 - DNA, 1015 bp, Bovine  19866881056904
  misc_feature (1)..(1): n is a, c, g, or t
nagaggatcacaagctgcttgttactcagaatgcattatgtgagattcattttacaagggcaaactgtatttcacacatgagtcaccttgaataacccaataattaattaaaaccacgttctgcagtggagaaatttattacattcgccggctttttatgagctaggtgtagtttggaaatgaaaaatgttgaggactcttcagtatgtctgtgctacattctgcattggctcacggtgactccctgtctccgggtcccagaaagcagagtcagtcgggggtgtgggacctcagttgggaagggtagaacccagttattgcagctgagttggactctcttcagtttttgtaaccagggcctggggcagtgtttcctggacttcctcttggagatgagttggggctttggggtgcttgagggatccctggaaagaggaaagtggtgtagccaatagagaaggggcaatgggaagagggaagagacaaaatcctgacttgtgccacgctgcttggcaattcctgggaaagaggagtgggcattgtggtattcttcatgacaaggaggtcatagcttctttggctgggtaccaccaagtccagatctcttcttagtttgggggaggtgctttttgtgtacccagccaaagaagctatgtgtggaggtgcttttccatagacataggaccagaacaagcttgtaggttggtttctcttcccctagtagaaatcccacattcatcttaggcactgccaactcagagctacaacttgttggttatacgtatgttgtaatctttatacagcaacttcacttccctctttattgtctccaagcagcactgtacagaaggctgggcagagacaatcactcccactttacagatggcgagacagagggctggagagagatggccagatctctcaggacatgcagctagcaacatgtgtcagagcagggagagaaattccagctccccatgtcaataatgcccaaagggcaggaaggaataagaga

SEQ ID NO: 33163 - DNA, 902 bp, Bovine  19866881157842
  misc_feature (1)..(1): n is a, c, g, or t
natcatttcagagctgctaacctggctggtccagagacaacaagtggtacttgttaagagcacaaacttagctcccagtatctgtgtgcccttgggcaagttaagttctctaaaccttggtttcctcatttgaaaaaagagaataacagtggtacttaccacaaagagttgctttgaggattgagatactgtaggcaaaacttttaatacaccccaaacaagtgtccagtctgtgttgggctcaacaccatcagcacagtatcgttaccaccatcatcactgtagctacatttatcgaggaggttgccaagcaccctgcattagcaagctttaaatcatccttaagtgctacaaaagggactatttatcccctaaagctcaactgttagcagatctgaagccctgacctcagtggcctcactgcgaaagtggatcccaaggaaggatgatgaggttatagagatttaagcagaaaaatggaggaatttgtcagggctcccttcctcacatgagtcaggatgggatctaagttcatggcggactggtaaagaggaagaaacaccgaaacccaccactgtgtgacattgggcaaatcagttaatgttcccaaaccttgattctcttcctctgcaaattgaggataagggaataattcagtcttgccaacctcacagcattgacctgaggcttacatgagagacagtaggtaaacgtgatgtgtggaaggtattgttattatacctacagagaaagttcatgatctgtagtctgaacatctgctctgcgctttccttctctaattcaagcattatgcagaagccctattctcatacccatcctgctccatttgtaaaccaactcgtgacaggcattctgctgcatataattagacttttcccagt

SEQ ID NO: 33164 - DNA, 1233 bp, Bovine  19866881169775
  misc_feature (1)..(1): n is a, c, g, or t
nttgggaagggtcactcacatattcctgaggacaggaaaggggttctaattgtgttctttgcatctcccagtccaatgaactatttgagaaggttgggtatctcattccaagaaaatacgagttttgatctcagtggtgtgtacttccactatctatagttcctgttgatggttattgggggatctgttgaagagctggcagcgatggctgcaatcaatggctcttttttggagcacaagttacaaactggcagtccatgggcgaaagatgacctgcagacctactttgactgcagagcagagtgtcattattttcactttgaatttgggtgctttaggctggtcctgactctttgggtcactacaggcacttcttcctttccaggtccttgaaggtatttgaatttgtgttggagtcagctcccagttattaatagggaccaggaaagaaggatgtgtgtggttttgaaatacactgtgtagttttcttctgtcaatttaccttactaattaagcttggttttggctgatgttaaggattagtttatattccctgaatactcagtgctagtgtttggaggaaagccaaggcctgcttcctggcaagggtgggtgaaacactgacctcagaaaaccttttgtggtgatcgctgggcacaggccatgctctccaatagcttttgactctctgtgttcctttctcggcaatggcatgtccagatggggcaagatggcttccggtcccaaggagcccactagtctggcttccgtgtatagtctgggagcacctagaaacgtaacctccccctctcgtgcttcttccccactttcccccttgggtctttcttcctctccctcctggcagtgcgtagggccgcccaacagtatggccttcgagagggaggagaaaatgacgactggactctctactggactgacttctcagtgtcactggaacgggtgatggaaatgaaaagttaccaggtatctgggtcagagctggtcctcggtgtaagcgtggcatcgaccctgtggggccccactcttatgactaccccaaaggggagctcctgggtgctcctctgggccccattgttcaccacttcggcttcctttgcagaaaatcaatcacttcccagggatgagtgaaatctgccgcaaggacttgctggccaggaatatgagccgcatgttgaagatgttcccgaaagatttccactttttcccgaggac

SEQ ID NO: 33165 - DNA, 1196 bp, Bovine  19866881172870
  misc_feature (1)..(1): n is a, c, g, or t
ncgttttcccctagggttaagtcccaaagaattttcctcaagcctagaagggttttccttcaggaaggtgagaaataacgcctagaagtgaaagaaaaaggagataggttatttgctgctgctgctgctgctgctaagtcgtttcagtcatgtccgactctgtgtgaccccacagacggcagcccaccaggctcccctgtccctgggattctccaggcaagaacactggagtgggttgccatttccttctccaatgcatgaaagtgaaagtgaagtagctcagtcgtttccgactcttagcgaccccatggactgcagcctaccaggctcctctgcccatgggattttccaggcaagagtactggagtgggttgccattgccttctccgaggttatttgcagagggctggaaaggaggtaggttatttgcagagggctggaaaggaggtaggttgtttgcagggggctgcgctgccacgagaaacagagtgtctttctgtaaggattcttcagacaaaggaagaaaggtggtcaggagaaggatccgaggatgaggaatgaggaaagggacagagttgtgcgattcccagggatctctggtatctcagggacagctccctggggtcaacgatttggggaaatcgagggagggcaggaagtgagggtgcgcacagagggcgacccaggtttgggaggaaaggtaggttaggaaagagtgaggagctgggaaaagaatggctggtgtgtgagaaaggtactggcatggggtcctgaggatgagaaaagggagtgagaatatttcagcaatgaactgagtatggggcgtggaagagggcaagcgatacctagacctgctgagaagaggtgggctacaggagaaccgagagaaagcaggggcgtgcgggaggcttttgccacagaatgccaccagggaagggcagaggggtagccttgggaaactgggcaccgtgggggacaagggggacatgtagaacccggttttcactggcgaggcactaggaggccgcagcctgggggcagcagcgggctttggggcgctcttacccacaattcctattcccccgtctcgcccccgcttgccgcccgtatagttcgcaaccacactcgtgggtcccctcctcggagacacgttccctctggctgccagacaacccctaaccccaaccctagccgct

SEQ ID NO: 33166 - DNA, 1611 bp, Bovine  19866881204714
  misc_feature (1)..(1): n is a, c, g, or t
nagccctaagacatcttcttccttctctttaaaccccagggcccatgggagggtgcattgaggatgtgggaggctgcgcttccttctgaccccacagacttgtgtctctttccccagaacgatatctgcatgcacctgactaattattccattaataagcacagtgccaatttccttcaagatgctcactctggcagcaagaggtaagggaagcggttccccttctcttttctttccctgctgggctcagagtggctctctgtgattctactcaaaccccgtcagaccccatcagtgtttccatctcagatcatgtggtctcaaaaaatatttcttttcctctaaacccagaacagacgccttagtctctgccttctggctgttaatcattaaaagaaggtcacatcataaaccctagggggttgggaggaggagagataaacatgaactgtttccctagcaggatacacacacacaccaaaacatactcatattacagttggcccttctgacattttcagaccaacagctatttatcgattgctggtctgccactggagaaggaccttccaggcctggggttccctggggtgttgctccgacagagattctcaaatgatgtggcatggtgtcctggtgtgacatgacctgtggctagctggctagaagtttccccagaagaatggggggaaatgggaggaatgcatgagtggcttttacattttccccagtggcttttacatttctattatcatctaatcctgtctcactgagttttaagatgactaggctaaagggagaaggaaatggcaacccactcccgtgttcttgcctggagaatcccatggatggagaagcctggtaggctgcagtccatggggtcgcacagagtcagacacgactgaagtgacttggcagcagcagcgggctaaagggagagggcaaggaaggcctgtgtgtcagggcccatgttggtgctttgtgtgcatgtttttttcattgaatttttgcaacaccatggcagaggtgccatcacctcccctttgtaggtggacagctatgagttaggcaccacctccattttatagatgaggagactgggcctctgagaggttaaataagctgccgaaaattacaggctataaatgctcgagctggacacaaatgtcagtctgtcagattccaaggcgcatgatctttctcttgtatcaggcttaaaggactgataaatagagtctgtttggcttcagataatcagagaagcataggaaatttcacaactccctcggtagcagaattccacgaagcaaaaggaaaatcagtaggttaagcctcctggaaggggaacgtgtcgggtggatagaaggcgatctcccccttgtccgagagtgccgaccacccatcttgcctacagctccctgacctcctctttgcccacctggtccttggggacccactggcattctgcattgttccatgttgaacatcggggctcggtgaggcccagcttctagtccctgctctgactcttgctggctgagtcgtctggagcaagtcccttcacctctgtgagcctctgtttcttggtatgtaggatgagagcagtgagat

SEQ ID NO: 33167 - DNA, 1107 bp, Bovine  19866881891111
  misc_feature (1)..(1): n is a, c, g, or t
ncttggtgaaaaaacagttgaggtgttaatgatcctttttgctggatgtaaaacaaagcatcttttaaccactgttcattatccccagctgctcttaccaaggctttgaaggggaaattatgctccaggcagttactagtggtaaaggaaacagtcatttttagataatccagtcatcacccctttgataaaatgaagatgaaaactagaagatcaccccagcctttctcctctatagttcttgcacccacagactttaaagctataaaatgcctctgaacaatagcaggtggtaggagtaaaatggtgtctacatctaaattgggttttggaatctttgtacttattaaggcaacaagttatccttcttaggttcattttctcttttttaatattaaaatgcttttgcattaccttagcacatgtacttgctaagcagtgggaaaaacaaaagtcaccctggcatacatgagtgtgagtggtaaagaaaagcaaacctaaaatcagagaagggggagttggcaagatctttggtaaagcaaggtccctaagaacacctgtagcttcagcccttttcccttgacttgctaaaaattgggatgaaatggaactgccttgatgtttaaatatcctatgattctggtgattttctacattggcttgtggattgcactgagctaagcattctctaacctggtctcctagcaacaaatgctaatgagatgataggctgtggctaaaagatacagtccattgcctaggagaaaaagcaaaatggactcaacgtaaggtagagatcaaacccgaagagatagcatctaattcccctgagctaaccaacaataggccacaagctcagggaaattacactggcccaacactccttaattgatctcatataaatattaaaatgatgtctttacatgcatgtagtgctttatagtttagaatggatttcatattttccatatgtactttcagtaatcctttgaaacagacggctgccaagtcccatttttatagattaataagatgaaatgtggagaaataacctgctaaaagtgaaaacaacccaaatgtccatcaacttatgaatgggtaaatatg

SEQ ID NO: 33168 - DNA, 1295 bp, Bovine  19866880345615
  misc_feature (1)..(1): n is a, c, g, or t
ncatacgcatcataaaccctactatgtagatgaagaaactggcttgaggatggtggcttgtaaggggcacgggctaatacgacccatctcggtcctcatctgcagccatccggtggccctcctcctctggccctgagccctagaagcctttctcagatccctggttgtacctcacccgtggctcaatgcactctcagccatttaagataactgacccttctcacccatccctggctgaacaggtttccccaatcttgtcccagggaattggtgcccctgggctgctatatttacatccctttggagtaaggacaagtgagggtctgaaagacaatcacacaccttttactttcacatgcaaatggccctgggctagtttgacctcttaaatcccccaatttcccacagatttgtgagatttcagatgagcttctttgacctcctccaaagaaagacttttgtgcagcaaaaatttgcaaggagatttgcaaaggtgattcgctactgctctgctggattaaaaaataccatggaaaaaagaaaaaccccaagtttctactcatgtatttataaaaaaagaaatttggctgattacaacttgttagatctgctgcttctctagttccatttaggaaaaaaaaaatgtgactttatattcccacccactgatttccaactaaaacagaacttagttgcctgctgatcctgctggctttttaaatgaaaaacttattccttttaaactactggaaaattatatctaaaaatcagcataattccattgcctattctttctggatttcttgaacaatacaacgttggtttctggaactctacatattcggatgtaccaatttggttaccaacatattaatgcatgttaactggtaatgtgtatcactgcacagaatccatttctacatattagttaatataacccaagttaagactttttgctctctaatttaattatatctcttgtaggtggggctttagtaaacttaaagaggttttgtaacagtgctatgtgtgtgtgtatgctcagtcactcagtcgtgtctgcctgtttgcagccacatggaccatagcctgcaagactcctctgtccacggacatttccaggcaagaatactggagtgggttgccgtttccttctccaggggatctttctgacccagggattggacctgcatcttctgcgttgcaggtggattctttaccactacgccaccaggggaagattatatataatatcatggtggaatatattctttatatactccaaattcttgacc

SEQ ID NO: 33169 - DNA, 982 bp, Bovine  19866880425404
  misc_feature (1)..(1): n is a, c, g, or t
ntgccccctgggcctctctgcagacccaaaagcagctgggagatccttgggaaggcaaggaacctgccagggaccacacggagtcaggaggtctaagtggtaccagcacagacaggtgaggaccacggatggaccatacacactcccctctgtgaaccccttaggatgcagactcacccgcagggcaagaggtcaccctaaattaactgggttacatttctatcatttggaatcaagtccagtcataaagccttcaatggggtccctggcacacccctaggtagtggcctgagatttgcagagatagacctccaagttctatctcgaaacgacccctgtgtattcagcaacatgagaaatgtagtcacctctgtaaaggccaatggccatgggggaaggatttccagcagcagtggaaaaagctaggtcaagatttaaaactaaccagcaaaaccaactggaaacagcaggggaattcgctgtgagcgttggttttcagtgcaccccgtccataatcactcgttgcaaaagtcacaaatctcctgccaaaatagggcctgccttcactgacgaagccccgttcacaccactctctctttgctctgcaagaaatgaattcactcaaaaaagaaattagaaaaataattgatataataagcataaccttgaaaatgcttctgtcagaatttaagagcagaagtgaaaggaggcccaaaataaaagcatcgtgctagaaattgaaaacctaaattagttctaagcatcggctgcacccacttctccaccagctccctgaaggtgaacgggagcaatccctgctgcatggcccagacagcaggaccaactctgcttcagagagcacggtcctccaatctcgaaaggaccagctggtcctgcttgtttgtacagatggggaaactaaggcttgtaggtgttaacagtgctctttccaggacacaataaacagaaggtcctcaccaat

SEQ ID NO: 33170 - DNA, 2870 bp, Bovine  19866880464256
  misc_feature (1)..(1): n is a, c, g, or t
ntctaatgaattgatttgttgcatcaggtggccaaagtattggagcttcagcatcggtccttccaatgaatattcagggttgatttcctttagggttgagtggtttgatgggcttgcagtccaaggaactctcaagagtcttctgggagcctgggctctgcctcaaggctattctagtgtttcttggctgctcctcccttgtctgggcattccctccctttcgtgattagcaattctttctttaaaaggccttgatgcccaaaagtcttgcagggtcctgcccagtttctgaattctcaacttaatggactattgggaattcctatttacatggctatcaaacccttgaaacccaacatgtataaagttaagcttggtagtggtgatgccaatatcatgtgatatcatggttgtaaataacacgactttacaactctagttgtctgagtttgaatcatgaccacacactggctgtgagatagtgggcaagttatttaactcctttgttattgagtgttcaaatgtgtgagttacatgtaaacatagaccaaaaaggaggctgagcactgaagaactgatgctttcaaattatggtgctggagaagactcttgaaaatcccgtagagggcaaggaaatcaaaccaatcagttctaaaagaaatcaactctgaatattcattggaaggactgatactgaagctgaagctccaaaactctggccaccttatgtaaagagcctactcattgggaaaaaccctgatgctgggaaagattaaaggccaaaggagaagggcggcagaggatgagactggctagatagcatcaccaactcaatagacatgaatttgagcaaactccaggagctagcaaaagatgggggagcctggcgcgatgcagtccatggggtcacaaagagtcagacctgggttagtgactgaacgacagcaaaggaagttagcacaagggagtgtttagaaacaatcctggcatagaatgagtacctacttaacctgtttagagttggctgctaaagttctttctatccacttgaagagaggaaatccatacaaagagaagcatttgaaaatcaattcattgggaacttcagggttgcaccttttgtttgaagttttgtcctgttctttaaagagtgtgggacacaccctcatcttattcacctctgaaccgtgaatgataaagctcatggagttgtttggaagtttagaaataataatacagaaaaggtggtacaagagtacctactcaatgtgggtgaactctcttctccttgagttcccctaaagattgaatggcaacaatgtgcatttcttgccagaggaaccaagagataagaactggatcactgatccaacttgcgaaagggcagccaggtcaaggaagaaatcacaaacccccatcagagacttaaatggggaagaacaggaatgggctagtgagagccgtggacagacccgcacagagggaagactcacaaattcttgtggtgaaaagttatgaaaggcagaacgcaggagttcagggtgttgacggaggctgctcttgctggaccacagagagggtcctccagaaagctccatggtgggctcagaagcaagaccagagactcaggcgcgccatgtgcctggcagagtcagcaggagccggcgcctggcacattttctgttccagaaagcactccaagccaagagagagtggattaggaggatttaaagtacaaaaagtaaaacaagctgggtttttttagacaatcattctcaaagacagtgagtgaaatttgtgtcactttaaataagggatatgtcagcaggaaaaataaagaggaagaagaaagattctccgtgcttctctttgtagtacagcaagacaacaaacagagcggcttgccaactacagcctcacccaaccctcctttggccataagctatgattcctgcatttttttctgtgactcactcccactgcctgacgtcaatcacccatttcctcaagacttctctagttttcttcctcccttggaggaagccagcaactccctgtcaatgactcctctctattaccgcaaagttcactgattatctcctatggggctcaagaggaaagtgtaacattctatataaaggtaaatagctacttttattctagaagaaagtctcacttctgagatgaaaaagacaaaaagcactggacaatgcattggaatataaaataacaccatggggaagtttgtaaaacacctctttttttatattaatttttattggagtctagagaaggcaatggcaccccactccagtactcttgcctggaaaatcccatggacggaggagcctagtaggctgccgtccatggggtcgctaagcgtcggacacgactgagcaacttccctttcacatttcactttcatgcattggagaaggaaatggcaacccgctccagtgttcttgcctggagaatcccagggacgggggagcctggtaggctgccgtttatggggttgcacagagttgaacacggctgaagcgacttagtagcggcagcagcagtttatctataacgttgcgttaacttctactgcagagcaaagtgaatcagctatgtgtgtatatatatctatatctataaaatatatatgtatgtatgtatataatatatatgtatatgtataatgtatgtataatgtatatgtatatgtataatgtatatgtatatatgtatataatatacatatatattgtgtatatatataatatatatgtatataatatatgtgtgtatatatgtatataatatatgtgtatgtatatataatatatatgtatatattatatatatatataaatacacatata

SEQ ID NO: 33171 - DNA, 2128 bp, Bovine  19866880504944
  misc_feature (1)..(1): n is a, c, g, or t
ntccacatattctgcgggggacactttctctattcttttgttgggctagaatcctacttccccttctggatctattttgaacattatctgccagcttttctgccccaacttggtgagctgtctcctgtggtgagaggccacccttgactctcaggcaggtttctgccactgcaaatttcaaacagcatttaacagaaattactgacatttgtcttgatgcatttttttttccatcagggattaggaagagcaatcatctcctgcctctcatcaattactttcccccgtatcttttgcattttcctgcagaaccattttgcaggtacaacagagcgatctttagagataatctggtgattattacaaattcagcgtcttacgctacaggcattaagagatgaaaattgcctgcagtccactgttgtacacccaatctgtacctctggactcctgtcccgaggtgaaaatgcaaacagaggagatatttagaatcattttgacagttcataaaattaagcagggattagggattcactttttcttaaataatgccagagggtgcacacagtggtaatcgtatcatcccgcaacaggtccagtcaaagttgagcggactatctaggaagagagagggaaaatgtcaggttattaaatctgccatgtatcagctgttgaaaacccattttttaaactttaaatgaactgtctgcctaatggagacgctatccccagctcccaacaccaatccgtccttctctggcgtctgttttgttcagacaatacatgatttagctccaatgtctgtgcacatgactacatctagtcagaggggatgattgtataaatatgcatgtagtacaaatagtttaattttaattggggtagagtagctgatgttgaaactatttgcataattttgaatattgaatgtgatatcaagcatgtgactggctctattaaatataaaaaaagtactcattttaattgcattgtgggacaggagcttaagtaccaaatcatgtgcttctggtccttcttctaagtgttaaataattgtgaccagtagattctcttcccagggtattactttctcttaataccattgtaggatttttagactaaaatgtctttaaagtgctgtttttgaaagatcagtgatcaaattctccttcatgggccaaaaaagagctcttggttcttagtgtattagtcagtaaaatctaagataggctgcagtaacaaacactcccaaatcttgatgtcataccgtaatgactggtatgttttgatcaagctctgtgtcctgtgcagctcattacgggatttcatccaggtgacctgtacttaacacatagtccatcaatttgtcactgttttgtctaaatatagcatcttttcatttgcatggtagggacagaaattgctgaaaggttacacgtggagtcttctacattttttctagaagtttcaaatgtcaattctatgcataagccctgtaaccacgtggctctgactaattgcaaggcggctgtgatgtacagtgaagcaagtggaatgtttcctgatcaacattgcatctgccataaggtcataaactattctcttctctttgataaaagaagatgaaagtaacaagttaaaatagagtggagtgaggtttgaatggcccccaaatatacaagtttacatttaaaaagggatgaaatagtgggtggtcttcattgtttaatattctgactaaacttcccacccagcccccaatgaagtgactgaatcattgttgcatcactgaaattcagatacccagaggggatgatggaaatcaccagaacacctactctctttggtgttgaaacctggttgtgagaaatatcatttgaaagaagtcaaatggggttgctggcattattgcttagaataaaaaggtaaaagctcgcagattttagaaacctgcccaaaatcttgaagttctttctcttctcaagctggggccacattcccaacacccagaatcttcactcgcaccatatgcagtccttggtgaaatctcaagagtgccaatgtccaaaggaaaatctagaagcacaaaattaaggtaggagagaaggacattagagtttcagtgtga

SEQ ID NO: 33172 - DNA, 1142 bp, Bovine  19866880543805
  misc_feature (1)..(1): n is a, c, g, or t
naatcagctgtttatccagactgatttcttttattagaggatgatacctagaaaccaaaatctgggttctaagaatgttcattgctactgagcatctctatttctaggcccttttggtagacagtacatacactgacttatttgatcttctcaacaagcttctggtaaagaattaattgtggtcatcttatcagacaatgaaaatgagagcatttggcgtgtgttgaggtctcacaactcaatgtggaagaattagaaatcaaactcatgtgttggcttgaaaaggcaatatccttcgtaccatgtggtgctaactcctggagggtgagggcaggcctctcctttctagttggcatggctgacccatgctccttcatgcctcctccctggatatttcctcaatatttttttctaggtgaccagactgcatcattctactgaggccaacataatctacttttgagggtctcactttggagtctcaagcattctttgattacccaccagttcctttctttactgattattcctgttcatctatctagttctttattcctccaggaaaccctccatgataacaacatgtgcacaacatccatcagaatcctgatcttatttgtagccaatcagttgattaattacatgactatttgcttaatgcataacatctctgctaaaatttaacatctgggagagccggaatagtggttggtacattacttgacttacaacaggtacttaagcgatatttgttaactggaccaacagaggaagttggccactcctcactctacttcccaaaggattacaccagtggattctgagaaagtgctcttgtctcccccaggctccaaggaaatatttatcttctcttgcctgtctttccccaacagtagaaaggccattcctctgtgatcagcaggaactccattttgctcttaattacttaattgtttcattaagtctaattgcttaattggattaatcccaacttccctcaaggggcatcagcagtggacaagctctccacccactggggagaggatctgctgcaagaccatctgagcacagtctactggtcccctctacatagatcctctggatggagggtaaaagtctctgcagattagcagggctttgag

SEQ ID NO: 33173 - DNA, 1120 bp, Bovine  19866880603159
  misc_feature (1)..(1): n is a, c, g, or t
ngtcggcagcccccgagagaagcgcccccagggggacacgtggggcgttggacaggagcagagtcctcgccaggtgggactttccaggctcgtctctgagggaagttgacagataaccaggccatgcaccgcgggcaaggtgcccagagccgcgaattgctgcatcaccctttgctcccgcgattcgcctgcaggctgctgggctgggcgtcggaggaactggtggttagtttgtggtcacccagcagttttatgaaggcccttgaggtgcttcaagtaccaggtggccccagcgtggtttaactgtctgggggcccgagctctctcagtggccagctaagcagcacagacaatcttgctgtgagaactgttcagttgactgtgacaattacataatgcacccgaggagtcagtttcaccatagctggagaggaatatattataaatgcatatattaggaattaatgaattagtcagcacccctgccacatttcaccgtcaataaagcactcagggtagggggaggcatggtctcattgagggagttattggtgtctcattggtcccatttcacagatgtgggtagtgaaggtcatcagggtcaaggacccgtcctatgtattgaacagaaaactggctaagagactatcccagctgaaattacattatttgtcaatgacccctcaaggctgagagtattcccacgttgcagacaatgacacccccagcctccagccagtcctcttccccggccagcgcctccttctccctggaacgtctctgagccgcagcggcttacagctcctcagcaggtaggaacaaggtggctatattttcttttggtcttattcccagatgctctgacagggagaaattctgagaacaaatgcagaatacaaaataactcatacttcttcaggagcacgcaggaagctttggggtgacattttaactgtcttgtctctcatctaggcccttgctttcctttccttaagcatctgtcatagtgagtgccaaggatatggctgggtgtggaccaggagccctgggaatgcaggagatggaagacatgtacaagcacacagatacctgcacacacacacacacacacacacacaca

SEQ ID NO: 33174 - DNA, 825 bp, Bovine  19866880647127
  misc_feature (1)..(1): n is a, c, g, or t
natttccaccatctatccccaagatttctgaacccatctcttaacgtgtctttctgcagcagccttgcctcctgccagtccattttctacaatgaagcaagagtaatcttcttaagatataaccagatgatgtcactcagtagcttaaaacccatcgggcccttcccatggcctcgaggacagcgtccaaagtcagtcacggagcttacgaggccatagcaacccaacctctaccttctgattttgcttacctccagtcaccccacccagacccaacacacattctccagtgagactgagccttcagttaatgaaaaccccattgctctccagggcctccaggctgttatgatcatggctttctccacctggaatatttctccccttctgattgctgggctgggtgtgaatgtcacctcatcatccctcaccagtcaaacttgtcgggcaacccagggacagagtcacctcctcacagtccctgtggccccacggatgccctgagggtcatgaggtggcctccctgggcctgctatagcccgagtgtccccgagatccccagcgggagctcctgctgcacctcattaacatcgtccctgtaaataacagcagccccgacaccagtctgcaaaaccaacacatgcatatttgatctgtataaacagtgcatataatatgacatttcctttcaaaactccctcaccactcggaaattcaaatgagagcctgtattacccttggactagagactaatgagggcatcataaatatttgatgaaaaccaggccaaattctcagggttttgccacacaacatttttcagga

SEQ ID NO: 33175 - DNA, 1454 bp, Bovine  19866880651628
  misc_feature (1)..(1): n is a, c, g, or t
ncgcaccccactgcccccccccacagcgtctccactgcccacactggacacaccagccgacatgtctttccaattaggccagtcctgagcggcagagaaacaggaaaccgcttgcaagctcagacccatccagacgcaggaaaccggggcagagacagcagcagccccagccgcggcgtcagccccaggccccggcaccaagcaggagcctgccagacactgcccggcctccctcggagcccagggagaatggcaggagcagagacaggagagaaagaatgcaccccaccatgctgcagctgtgacatcttgagcagacttctctccaagaaagactcctgcaactatcctggggcccctcccttaaaagcccagggtggagacacgcatcacaagatgaagtttgcgaatctcagcccaatgcctgacatgaagtcagggccccttcagggccaagagaggacagtctcctgacccaagccttccccagggtgcctggcagctgagctgggaggatcagatttggttcccattttgcaggtagaaacactaagtcagggtctgtgtaaactgcagtggaggagcatgaggttcagaatcagaggcttagagtttcaaatctcagccctgccagctgctgcctttggaccaactgctgtgactgtttaccttccaatctgtatagtcaaagctatggtttttctagcgttcatgtaccgaatgtgagagttggcccgtaaagaagactgagtgctgaagaattgatgcattcaaactgtggttctggaaaggactcttgaaagtcccttggactgcaaggagatcaaaccagtcaatcttaaaggaagtcaatcctgaatattcactgcaaagactggtgctgaagctgaaggtccagtgctttgtccacctgatgcaaagagccaactcattggaaaagaccctgatgcgggggaagattgtgggcaggagaaggggggaacagaggataagatggttggaaggcatcactgactcaatggacgtgagtttgagtaaactctgggggatagtgaaggacagggaagcctgatgtactacagtccatggggttgtgaagatgtggacatgacttagcgactgaacaatcaccaccactctgaacacaccatctctaattcctactcttcacaccctgatggggaccttggctccctgtataatggagatatctaagaactggagagcttatgtagtgcacacctggttccatctcagaggggcggagctaacgatcaacctttttagattttcaagcctcttcttcccatgtagtatacctaatagcccctctgtacagggtctggcaaagagctcacagtacttatactccagaacattcatgcagaaaaaaacccaacacgctggaatagcttggggtctgcactgggtggcactgaattaacaatttccag

SEQ ID NO: 33176 - DNA, 2140 bp, Bovine  19866880690059
  misc_feature (1)..(1): n is a, c, g, or t
nctgtataatgggtatgataatgtaccctcccagagtgagacaaagaatctcaagtgcttggcacagtgcttgatatacagcaagcacccaatggatagagatttccttcctcttcctcatggtccacatcacgttcctctttccaaatggccaggggggaagtgttgacttcctggtgctcttccagccccagggataggcattggcaggtggcctcctaggacctgccttgctcctctctggatgcccttgcatttctgggctctggaccgaacctctcagagctgaaaggtggcattgtgtatgtgggctgacgcctttggcctcccagggctctgcagacgctggctcactggggccgggacaaagccctattatgaagggtgctcacacacacaggtctgaagtgcatgaacctgctgccccggcccgccccggcccacggagggctggcatcgctctgcccagccatgattcccacagcaccagggaggtcacccagggtggtgctgcccaggggcacctttgtggggtgtggaccctgcgcctgccttcactgagatgggaccagctgctctgcacctctgctgtgctcctggtcacaggctgtggctctggtgggaaggaggcgtctggaaggaatgatgcccagatcctgttcagcatcggtgtgggaagccaggtcccaggttccctgtaaaccggagtaggtgttacccggaggatgctgcatgtgttggcggcagaaaagaggaccacatttgttcttttagtcaatcagtgtttgtcaacagcccacaatgggtcaggctctgtggatgcacaaaaacaggtatatacacatatacacactcacagaggcagaaactcatggcagagttgattgaaacctaggtctgctgattctcaaacttcttttcttccccccgtagattcacattttttcatccacggttgtggctgcataaaccagaggagaagctgcgaagccaagacccagagaaggtactagccactgtcacacagcagagtttggcacccgaatagggttgagagccccagcctggacttgccaagcctgccagttcttgcgtcctgagatttgggttctttgagtctgcaaagggccttgtggtcacatggaagacgggaatggaaggatggttagtaggtaatgagacagcacctggtccgtctcctgcaggaaggcggtgcggattcagccaggtgaggacaggtaatttcaacaggggtgaaactgcaaaatccatgttgccattttgactagtgaactgatttaactccggggcctgtcttactgcggacagttgggcaaggtgagaagggccctttgcaggtgccgtaattccccatcccaccgctcttgggggcagggagggaccattacttgaaagaaacttcagctggaaaagaagtttaccctcctcagctttgcctggggtgcatttcttatctgtgagtaataggtttttcacaatccaccttttatgttcatttcaataatgcacccggctaagccaaggttctcttaaaggagaaggccctgcttatttcccaagtggtacaacccagctaagaggcgcagcaaaccttgggagcctcgtcttccaagtcaccttcttgtcaatgaaaaattaaactgagaaggcgtatttctgtaacatttagaccagaaaaccaaacagaatgaaaacctccaagtcccaaagatttcaaagcaaacacagctttaggggcttttgaaggggaacgtgaaagctccagatggtaaatatactgtatgtcttgcaagccacacctgctggccagtggtcctgcgacagcaggtcactgtgccgggctggtgtgagggacccttcttcttgccggggcaggccacagcaccgatctgtcttttgcattcgtgaaccgtgagtgtctgtctacatcctcgttcacatgggtgggacatttcctaatcctctgcacaagcttaaagtacccgtcaagcaaggtggaattaacctctgtttaggcactctacgagggcttcccagccctatgaaagtttgcttctttccctttcacagggcctccctggtggctcagtggtaaagaatctgcctgccaatgcaggag

SEQ ID NO: 33177 - DNA, 1529 bp, Bovine  19866880697988
  misc_feature (1)..(1): n is a, c, g, or t
naaatgctaggtctgagggtagatgcaattcctaggtagattgtgcttcaaattaccctatggtctggatgggagagaagagacagggtagattgctgctgattaaagaatgtttctctttatcatggacctttgcctctcaagatgaagactttcaatgcatgttctgggagcgagttgctgccgctaatagccgtaagtcttaatgctttatggccaggcatgagaatgttaagtaacaccagaagaaccattatggaatttaatgtgctttaatattctcaaccatgtaaatctgtctgagttccaattactaaagggttgtacttgccagaggatctcaaagcaccttataattactggaatattattttgttctctattatgggaaccatcaaaaacatctttcagaggaaaattgcagctagaaaaaggttatgaattaataataataatattaataatagcaataataactaaaaagatttggtgataagtccatataagcaatcatcaccactttcatacccactttccacttgggttgtaggacaaccctatcggttaagaatattgttcacattttacaaaagcaattaagatgcttagagaaattgtagtaaaaggaagcctgagtcttgaaagatgcttgcctctgatacagcttgcttaggcagagagaaggaccatcttgcccttaaaaacagtctcaaaatgttagagatacacctcccaacaccaactccctccaaaatatccattttcaaacactatcgtttatgtgctgctgtgtgctgatgagtctattgacctgtgagcataatttagagatctttgaatttataaaccaactctccatggctgtcatctcctctttgatagcagaaagctgagggattttctctcccagtagttccaacttccttggggattttcacaggtatcagtgaagcagactttgtctttgttcaccagctgctgtggctttatagagcaatttgctgttgttcagtcactgagttatattcaaccctttaggaacccatggactgcagcatgacagacttctctgtccttcgctatctcctgaagtttgctcagattcacatccactgggttggtaatgctatctagccatctcatcctctgccacccctttctccttttgccttcaatctttcctagcatcagggtcttttccagtgagtcagctcttcacatcaggaggccaaactactggagcttcagcttcagcaccagtccttccaatgaatattcagggttgatttgctttaggatggacttgctgtccaagggactctcaggagtcttctctagcaccacagtgggtccctcaaatccatgtggcatgtgcaccctactgtatttaaaatagatactcatcaatttcctgctgtatagcacagggaactctggtcaatgttatgtgacagcgtggatgaggagaggggcgtctggggaagaatggatacatgtatatataaacggctgagtccctttactgacca

SEQ ID NO: 33178 - DNA, 1521 bp, Bovine  19866880729237
  misc_feature (1)..(1): n is a, c, g, or t
nctactcactgttttcagggactcctcagggagattaacagtgtgcacagcagaatctgagaaagggtggtcaacagaataaatcagaaaaaaatagcttgggactgagacttacagaccacccatgattcaaagccttcttacctcgccagacccagataagtcaaagcagctagtaaaatattctacatgcagtgaatagatttcaccttttaataatcaagcccttaattaaaaataagtaattcataagagtgattaatattaggtggctaagtaggtttgttcaatgctcttggcatttaaatagaggataaagattagaattcctttcttatcccccaaaaaatatttctttaagaaatgagtcttgagcaaatgcatttttttttacttaatttgaagagaaatataatccccacactggatgatactgtaatgctaggctactggcaaacacatccttggatagagcacttttaggatttacttatcagccaacaaatatttatttatagtctattaagcacgaggataatacaagttgtactgtggaaaagaaaagccacggagcttatccaccaccctcaagaatcttacattctaaatggccagacactcacatataagtaagcagggagtttagtgaaaatataagacagggtgatctaacagagttagtggggaggctgactaggaaggcctcccagaggaggtgttctttaagaggagcctgcagaatgagaattgggaactttacagcctgggaaaggggtccaagcctagaaacagttcagttggctagaatatttggaaacaaagaggtaagtagcacagcatgaagttgggagaagtatgtaagtggagaccaatttctatatagtgtattgtgtatcataatgagagctttgaattttaattttactttagtgggaagctgttggggtgttgtcttttttaattttttaagatttaaaatttcagatttaaaattttaaaacagatttaaaatttcatgctggtacttccatggtggtccaaaggttaagaatctgccttgtgatgcagagaacaccagtttgattcctggctggggtaactaagatcccacatgccttagagcaactaagcttacacactgcaactactgagctcacctgctacaactcaggagtccaggagccacagcaaaaaaccccacatgacccagtgatgatctcaagtgctacaactaagacctggggcagtcagatgagtaaataaatgaataaaaaaaaaaaaaaaaaaacttcactctggttctctgatgggccaatcaggaagtcatgagttggtagactagtgtaataagtattgcaataggtgatggtagctggaccaccagccagtatgatgacattggagttggggctagtgggggaatcagggatgtgagtctggttctgaaccctcaggagttggactggggtgggtggctgagagaaaagaaacagcacaagattcctaccactgactctaaca

SEQ ID NO: 33179 - DNA, 911 bp, Bovine  19866880775633
  misc_feature (1)..(1): n is a, c, g, or t
ncctggttgaagggcttggcaaacaacttaggcgtttccaggaaaaaacagagcccagcttggggccatggaaagcgcggtccccaaagttgagtcagccttgagtcatgagctaaaagcatgcttttgccaattacagctctcagcagctgtaattaatgcagggctgatgaaaactgcatttttcactcaacagaggagagtatttcaggtaattagacataacctcatgtactggtaactcgcctttacacatgagctctagccgccttgtccaggccctacctccaaaaataacttacaccaacattaaccaacaagttgggtctgatttcaaaagattaccctttctccataagtattttgaatgcaaaacgctaaacacacaaaggcccttaatggggtttgttctaatccaccgacctgagcctctgagagatggcctctgcatctgggccaggtggccaccctgtctttaaagacgaccctcctctgagctgacccccgtgccaagcattctgtgggctggaaagaagcagggggaggtgtgctttgatccataggcccttaatcattaattcattggctcatatcagtgctactgggacacaccgtgctccattctctgggccgaataaggaaccaagagcccaatgtggtggtactggttgagtcaccaagtcatgcccaactcttgcaacgctatggactgtagcctggcaggctcctctgtccatggaattctccaggcaagaatactggagtgttgccatttccttctccaaagagcccaatatagaggaatttaagcttgatgtgggtattagaggacgaggtgcattgcctcctttataaacaggaaccctgaggtccagacttgcccaggatcatccagcaagtggatggtggag

SEQ ID NO: 33180 - DNA, 769 bp, Bovine  19866880791819
  misc_feature (1)..(1): n is a, c, g, or t
ngacactgggtaatgttcattgtgcatgcacaataaattactatttacctggcagcgcctttgataagcccgtcttctctccctctttctgtccacgcagcacggagcagtgaaacccctttgcctataattcttattaaggtgataccttttctgaataagaaagtacacacttccaaagcctggcgctctccggggtttttgagggacattgtttttattggttcccttttatttctccctccctgctgtgttttaatgctatagtgacttctgtgtatacaactctcatattgaaatgtcggcggctgcagatatatgcaatattaaagagcgcttatgaatttttgacatctaattagtcgctacccagttaacatgtcaggactcagagggattagggaggcagccctttctgaataagttacagcgaggcccctgtccttttcatgtattattctttaatgtaggtggtgattatttggctgtgattaattgatgaagctcattggtctggcaagtggtacggaatccaccattcttcacttttatttctcacagtagggctctgccacttactcggaaggactcacttccttccaggcagcctgtgctctcagcccagtgctcctggtcgggggctggggtggggggtggcggctgttccctgggcctggccttgacttctcccacctcttgactcacacatcggccatggcttttgcatcctgccttctctcgaaggctccctctggtggtccaggccccc

SEQ ID NO: 33181 - DNA, 662 bp, Bovine  19866880846547
  misc_feature (1)..(1): n is a, c, g, or t
nctgtacttcctgcaatggcacatgtcattgcacccccatccttatgtccccaacacaccccaaaccatccctgtgtattgggtggtgcccctgcactaccagggcttcccaggtggtccaaagataaagaatccacttgtcagtgcaggagatgcagaatggatccctgggttgggaagatcccctggaagaggaaatggcaaccctctccaggattctggcctggagaattccacggaccaaggagcctggcaggctacagtccgcaaagagtcagacacagctgagcaccacacagacggacagacctcctctgccaacgcaggcccctgagaaccccctatcacatcagggttggggaaaagtggcccccacatggaaccacaaacaccctatgggcagaaaatgagatgcaaaatcctcttggtccttccgacagttaaagtaaaattttatgtgagcaatatactcttgctctgattaccatgcagtataattttattctggtttttctgggcccgctgaacccccggctcttttaagtgttcaaatgctctgcttgccaagataaatgattataattgacagggcattgtcaatctatcgcaaagctgatttcattaagcatgccaagggccagctctgggggcaggtagccgag

SEQ ID NO: 33182 - DNA, 1427 bp, Bovine  19866880892393
  misc_feature (1)..(1): n is a, c, g, or t
ntgaaaagtgaaagtgaagtcgctcagtcgggtccgactcttagcaaccccatggactataccccacctggctcctctgtccatggaattctccaggcaagaatactggagtgggttgtcatgccctcctccaggggatcttcccaacccagggactgaacccgcatctcttatatctcctgcactggcatgtggatactttaccactagcaccacccaggaagctcaggctcactactaggtaacccataatttttctgagcctcggttcccttatctataaaacaggcataataacagcttctggagagggttcttttgaggaactgagcagaagaaatgcgggaaggtgcaccataaattgggcttccctgtggtaacgaatctgcctgccaatgcaggagacacaggagatgtgggttcaatccctgagtcagggagatcccctggagaaggaaatggcaacccagtccagtattctgcctggagaatcccatggacagagggccctggtgagctacagtccgtggggtcacaagagaaatggacatgactgagtgagtgagcgcacaggcagcacgcatgcacatcatgaattatgaagcactgctgagatgcaacttggcatgattatttataagggcccaagggttgtcccaggacgtcttttctgcatctcaattctcccctctcttctttgggacacctcatctccccctaaatgcctttctttcttgagatacagcctcccctgctggtctctaaattggcacatcttcttaccactccccctgagattttcagttcctttaatccaatgaaataaaaagttcaggccatcatcttcaaagaataagaatgaaatttggggaccaaaattatacccattgggattgcttctgtggaaatactttggaattccttttcatgccctattaaataatttaaatgtttcttttctgcattcaatgttagttatttaaactctagtcctaagctccattagcaaccttattagcacaaaactttctttgcctgttggattagttttatagatttttgcatagaagtcatgcacacaggcaaattcaagtgcatggctgtggttattgtccttcggtcataggaaacagggtaaatttaacctgacacaattaatctcactccacctaatagcttcttggagtaattaatgctttccatttgtattaagagctgttagcacatcaaactcatttttgtggactctagcagatgtaagtggtaccctaccctaagattccatccttgactggaactgaggatggatactcaatgttaccaagttggtatttcataattaggcgtaagaacacagtcataaaatgttaggatggaaagagatttggagtcatcacatagataaagctaaaagatccaagtgataa

SEQ ID NO: 33183 - DNA, 1833 bp, Bovine  19866881025418
  misc_feature (1)..(1): n is a, c, g, or t
ntagaagagttgggaagaatgtttcgttgccccagctgtatgcatgggttggcgtgcatttgagcattagatatgaaatattccatctagctgactcagacagacatagaccttgtgatggaagtgtaatcttcccttgtgttcctctcaaaatcttgtgtcagttacccaggaccctgatgttgggaaagattgaaggcaggaggagaaaggggcaacagaggatgagatggttagatggcatcactgactcaatgaacatgaacttgagcaaactcagggagatagtgaagggaagcttggtgtgctacagttcatgggggcacagagttggacacgactgaacaactgaacaactggatacttacctctctcctttcagacttttacctaggagacactggctctagcaaccctagtaacatgtgagaactctcccaaaatgagtcaaatcatctgaagatttgactttgagcgttgagtaaggcctgctgaataaaaccttgtgaacccaacttacctgcctgaccaggttcatgtgctcacacctgtttgaatagcatccttagggtctggtactgtggcccacagagtcccctcactcccaatcttagactacactcaaccctgtcccacgacacccacttagtgatgctatcacagcataaagattacagacctgtttgtctcagaggtcagaggaaaatgtcctttcccttaaaatatagtactgttctcaggttccaagaggttcaacctcagcatgaaattataaatctggaagcatctttaaaagtcaggcatgggaatgtctgttatgttttactttagttgaatgacttcagctactttcttcctctgatatctggagttcagccaaccacaggacacttgttttctgttcatttgtaaattaatataactggaagtgaagattgtctctgaaaagagcaaattcactttcctcctgatataatgaaattatgtttgggaaagcctctgttgatgtccaagaatctttatgagccttttaaagccattggtttccttctcacaaatgagaacttgctgatgccaaggagtaatgaactggaaaaccacatggccacttggttcttaagctggcctgctgggggaggacacgtacgacttccttaattctggctttccctctctctgctgttttccctcttttatctgcccctccccaccttattccttatgcaataaataaagctttggaatagactgatttgggtacaaatttccttctgccactggttgtgtggtcagttagtactactgtgtggacatgatacttaatctcactaagtctcagttttctgcatatagagattatacattcattcctcactctctgtttcctaagagaatctatcttccattcagacatctcactccatcctctgtaactcttgcaactcacaggggtgggcaagacccccagatccagcgatgagattcaaaatgtcacagttaatattggtctttaattcctctggagagcaagggttttgggaggccaggctgccccctatcagagcttgggatcactgatagattagctatgatgtacggaagcagccttcttaatctgccccctggaagcatgctgacttggagattttatccatcagatgacttggagaagataccctgcggatgaagctgtcacaccaaaaggagacaaaagaataggagagaactgaagtttggtccctgatatatctctactggatctgcacttcccaaatgtgagataaaatcctttatcctcaaactagtgtgtgtgcatgtgtgcgtgtggtggtg

SEQ ID NO: 33184 - DNA, 1085 bp, Bovine  19866881132893
  misc_feature (1)..(1): n is a, c, g, or t
natgtttcccagttggagagatgaatgtaaaagaataacagagaattgattcaagtgcaccagtgctgggggtgatcgcaagagcatggcacctgaacataattttacatattttaaggactattgtattatttctacatttgcaagcagccccaggaaaattgtgcatgaaaaatcagtgaagacataatgcttcaagtgggaaagcttatgataatatggggtaatcatttcatacagggtagaattattctgagagagttttgtagttttatatctatcatctatctacctgcctatccagcagctatctatctgtgtatgtgcttaatcacttcagttgtgtccaactctttgaaaccctatggactgtagcccacctctgtccatgggattctctaggcaagactgtcctcctccaggggattttcccaacccagggatctaacccacatctcctgtgcctcctgcattgcaggcagattctttaccatcaagccagtaggtaactggggaagcccagttacctatctgctgctgctgctgctgctgctaagtcgcttcagtcgtgtccgactctgtgcgaccccatagacggcagcccaccaggctcccccatccctgggattctccaggcaagaacactggagtgggttgccatttccttctccaatgcatgaaagtgaaaaagtgaaagtgaagtcgctcagtcgtgtccgactcttcatgaccccatggactgcagcctcccaggctcctccgtccatgggattttccaggcaagagtactggagtggggtgccattgccctctccaagttacctatctattagatgtctaatcttactgatctatgtatgtattgcttttattgggaactattgcaagcattcagaaaaacacaaagaatattctaacagctgcgattttcttttaaaatatcaaacaatcataagtgagttctagtagatgctaagatacagtatgaatactttggaattctggaggtaaattctctgtctggcatctatttttcaaagcctagactcacagcgggtacagaaataaattgtcattacccaata

SEQ ID NO: 33185 - DNA, 722 bp, Bovine  19866881139236
  misc_feature (1)..(1): n is a, c, g, or t
naatcctgctgatggttaaaattatattttggtgttttaataactctgtaagggacatgtagataaacctcagagatatgtaccggtgtggattcttgttaaacaccaataaatattggtattaattcaaacatgtgcttattgttttgtgaacgttaatggaatttatgcccgagatgggtcaggatgtcacaataacgtctgtgtctctttggaacctgcattcagggatcttttgatctttgtgggctctgagtttggggtatgcgtcttcagagtgcatggtggctgggaaaccaaggaggaggtttggggtggttatgacatgctcctgtcaaattccttctgggccattccaaggatcagagtgaaatcaaactttgaacccttctagaatctgtttattagaccacagacctgtatgcactgagttggtaggattttcaagtcacttttttgacccactctctccctgagatgctgagtgggtgggtagggtgggcccagtggggttttctgggggagtctggggaaatatcagggacattttatctcctccctctgcacttccacatactcaaacttcctcccactcaagggtctgaagaagtgtccccaagaagtgagcattagttgggggaattgacatattcctgtcctctctagggcatgggttccaatgtcaccaatagccccctgggccatccctgccctcctatttc

SEQ ID NO: 33186 - DNA, 803 bp, Bovine  19866881254383
  misc_feature (1)..(1): n is a, c, g, or t
nagtgggcccaaactttatgaggaatgtggttttcagaatcttttggacttgggtattgctgatcagagattgtggatcttcagtagtttgtcgtaaggctcatatgttaaaagcaattataaataatgaatgacttgaccctcacgattaagggctcttcagtttcctacacaattagcttaggtctaaaaataaacaactattatctgctggactgagttttgtaaccctcttctctgatctccctaaatagctgcaaggaaccctcatctgacacatctctgattgtgttttctttgctgggttctggttcaaggtcaagttcaagtgtgctctctgttcccccaccccactcattggcaccccacagtgttaggattctggcagggttttcttatttcatgacccatacttctgagttcttagtccttacatctgcaaatactcaaaactaaatttaaatttaacttgttctgcttccttccaatatgcttggcagaacactagctgcctgtttaactctttaacttacaagtggcttcaattccatgcctcatctgacaggtttccctataacctgcatgtgtgcctctgcctatagcctctgttgtcatcaacagcttctggttgctgtggtgataaagggggcatcaaaagtctctttcagagtaagagtcacttttctgcctggggtccagactgagtccgcattccctgttacacactgtgctgatacttcctgtgtaacatcatcaaaaatccccagcagcgcagaacacaattgaatcacttcctgtttatt

SEQ ID NO: 33187 - DNA, 1209 bp, Bovine  19866881356016
  misc_feature (1)..(1): n is a, c, g, or t
ngtggagatctgttatcggctccatttgacagatgagcaaagtgaggctgtggggaggtgaaagcagactgaaaaaatgatttcagtccaagcagacccagctccatccaggctggcctggggcccgtttgccttagactatcgggcagagaaactgctctccttcccagggggccggagggcttggcagggaggcggcccactgctcggttggttgaagagataatcattcttggggtctgtttatcagccatctttgaatggcaggcctggatttcctaattaactaacatccgtgggccggtaactcttctaagagcccagtcgtatcagatcactgatattctccatggttctatctctcccccaaacctgtgctcaatgactgataactagaagtttctgcagtggataatgaatgattgggggttaggggaggaaggggcaggctttctggatggccccaaatccccagggctcccaagaattaaagttgattttttctgccaaaaggaggcctgtgtggacaacatgccatgaggaaagggccaaggatgctcagctgttctgaatttacccaggaacgcaggggccgcggtccctggccacctggcacccagctgttcgtagcattaaagcccctgaatcctgccctggtggggcccccagagaccagctcacagccttcattgttcctcccttgccgggtgtgcccagccccttagcaacagacgcaggacagagacccaggtcatcctggcgggggcgggggattgccgtctttcaagtcgtattccctgccccagagctccagccagagctgacactactgtgcatcctttcagacaggtcacagtcctgctcacaaagtcagttcagttcagtggctcagtcgtgtccaactctttgcaaccccatggactgcagcacactaggcttccctgtccatcaccaactctcggacttgctcacaccatcccttccacccaaacccttcttccttcttttctcctttgggagaatctcaagtcaaagatccagtttcagcccaagcttcctggctcagagaagctttccataactcactgcctcttggtgctgagtcaggcaccttcctctacgcagccagcctggattcattgcctctttcacaatactttctggctgccttaaagttgtgtgagtctgaggtacacattaaaccctgag

SEQ ID NO: 33188 - DNA, 1091 bp, Bovine  19866881370957
  misc_feature (1)..(1): n is a, c, g, or t
natgtctttatattaagacataatgtatggaggtgtcattgccatcttgaagggtagatgaaatgtgaaaccaaccagctgaggatggcacagcagaaccacagaacaaatgggttcttgctggcatccttaagtcactgagttgatcaactgtgttgacctccctttggacttatgtgagttaataaaactgttctgatcattcaagccactcttagggtcttctcttacaggatctaaaggaatcccagctatatgatccatctcacagtatgggcaaccggatacttctccagttatgtctggtcctatgttgtgagatcttagatatattatcacacataaccctcacaaccaatgtggtgaaagatatggtactattcccacttgacagattaggtacccgaagcatagagtatgcatactaattatatgaagtcacacagataaaatctcaaccagtactcagaccataatcaaagtctgtcctctatcaattataaccttcactaggtttaatatcccaagtctgtatttcccattataccaaataaaaacatctcagagtgcttttcaagcactacgataatctttcaaatttaataatcaaatacaattgagctttgtttgtttttaattttcagttttgcttcataattacccaggcagttagtgcttccttgttgcactcgcaaaattatttttataattcacataactttttctcactctgtactgtaagtatatcttgttctacctgtattcccagtggactgtgaattccagcacagggcttgacatataataggggtttcataacagcgagtgcagtgacaaaagttcacagggtattggactaggtgtgagtgttctcagttgctcagtcgtgaacgactgtagcccaccaaggctcctccatccatgggatttttcaggcaagaatagtggactgggttgccgtttcttcctccaggggattgtcctgacccagggatcgaacctgtgtgttctgcgtttcttgcattgcaggcagtttcttttctgctgagccacaggagcaggaggccagactaggcagttcatataaatca

SEQ ID NO: 33189 - DNA, 581 bp, Bovine  19866881710619
  misc_feature (1)..(1): n is a, c, g, or t
ntgctactctgcttccccctaatgaagctgaagggcaagacttgaaagaatcaaactgtttccaagtaacttaaccacatcccagaacaaggctcaaaaaatttatgggaatataaaatatccatctctcaacaaggtaaaattcatgtctggcatcaaataaaaaaccaccaggcattcaaagaagcaggaaaatatgacccataagaaggaaaagaaccaactgacagaactaacccagaaaagatagaattacgaggcaaggaaattaaagctatcgtaactgcattgcctacgttccagaagctacaagaaagaaatgaatgtgttaggaagatgcatggaagacatatattaatatataaaataaggaaaacttctagagatgaaaaccatatcacactagatgagagtaactgaaaggatgaatggacgtgaagaaacagcaatagaaactacccaagatggaattcagaggaaaaaacagactcaaaagagggaggaagagatagagaaaagatgagcgagaatgaagcatcagaagagtcataaggaaacttcaagtgtcctaatatctacat

SEQ ID NO: 33190 - DNA, 880 bp, Bovine  19866881727885
  misc_feature (1)..(1): n is a, c, g, or t
ngtgaagctcaggaattattagttgaatggaatggctccagattaattttgttaacattaacatcataaggccttttgctcaatggatatgctaataaaagtgttacttataatgagattttgcatctactatagagtatttatttatagctctcacagtcacatatattttaggattgtataaataaaaccttattttatctagaagattctcatatcactaaaaaaaggacttcagagacattctaataattgccgtatgttcagtgagagaggctcttttcatcatacaaaaatgaagttagttaattgaatggttatgatggctgcagaaggggtttataaaagtcacaattaagaggaacccactgtaagaaaaaggcaaaatgtattttctttaggctcccataagctgcattttcaatgcacagatttaagaaaattccctttccaaatcctcttttgtcccacatgaaaggaatgatgactttaacgcggccgacccgggttttaaaaaaaataaaataaaaggactgtttattctaagtagaacatcatgggcttcatcacagccgtttcatgacagtttccctccagctggttttatttatctcttgacttccaataaaacttatgttttatttcaaggggcaatccataattaacttttcaactggtggcagtggtttcttttggtgccaccaacagtgttgaactcagccttaaaaaaagaaaaaaaaagtaaatattaaagacctggtgcagatcctttcactggtcccagggaggtttgcttgctggagagtttgacaatgacaagatgcattatggggcttggcttggacacacagggagaagcagaagggtcgtgtcacaaagg

SEQ ID NO: 33191 - DNA, 726 bp, Bovine  19866881749183
  misc_feature (1)..(1): n is a, c, g, or t
ncgcgtccacagtggctggctttataatttacagtgtgaggccaactaaccaactctattattcaaacatgtgaagcaaacccaaggagaggagtgctttaatcttttgctcagaagtgacatttgcagctcttttcacttacttttcattatttcaccacaggggaaccgtttccaggaattattatgttaagcattatattaaaaaatgagtcttggtattttttgcaataaataacagctcacatttactttgagaacaggaatgctcaccagaacttatgaacattgtctgcttccagaagtgcagacatgttagaaatgataaagtcgtgtttaagaacatagtgtgtgagtgctctgagtcatgttctagtctttgtgatcccttggactgtagcccaccaggattccctgcccgtggaatttttctggcaagagtactggggtggattgccatttccttcttcaagggatcttcctgacctaggtattgaactcacatctcctaggtctcctgcattgcaggcagattctttaccaccaagccactagtgtgactccttaagaacattaacaacccaaaccatttgatgagcacttgctatgtgccagctcctgtgcaaaactcaggagatacaaaaacgagtaaggtatagatcttgtggggaggcatgaccacagaggataaaaagcaataactttggaatcagagagagatgaatt

SEQ ID NO: 33192 - DNA, 1927 bp, Bovine  19866880265731
  misc_feature (1)..(1): n is a, c, g, or t
ngaagtgaaagtcgctcagttgtgtccgactctttgtgaccccgtggactatacagtccatggaattctccaggccagaatactggagcgggtagcctttcccttctccaggggatcttcccaacccagggatcgaacccaggtctcccacattgcaggcggattctttaccagctgagggcaatcacaaagcaaatgtacaacttagcaaattcttataaggtgagatatcattgaaaccccccatctgtgttctccatccgagacacagccccctcctccttttaaaagtaagcattcacctgacttttatggccataactcgcatttctttaatgttgtcacctcagtgtgcactccctactgctacaatttagacttggagtgtcattctttaaggaattgttgtggtttagtcactaagtcatgtctgactctttgtgaccccatggactgcagtgcaccaggcttccctgtccttcaccatctcctggagttttctcagactcatgtctattgagttggtgatgctacccaaccatctcatcctctgtcgtctccttctcctcctgccctcaatctttcccagcatcagggtcttttctgatgagttggctcctctcatcaggtggccagagtattggagcttcaggttcagcatcagtccttccaatgaatattcagggttgatttcctttaggattgatttcctaaaggttgatttcctttaggatttaggatcacctaagtgtgtaccccctgccactacaatttagacttggagtgccattctttcaggaatatgagggtgtaatgttgttagaaaggatgcttattttaagcatcctttaaaacaagcccctgcagtggatccttctgatgtttaggctcctggataaatcattttccaccactggcaggtgaaggtggagccagaataacattctagtgcccaccacctagcagctgtcccctgagggtttgatgagtggctacacaagccaccagagtttgcggtctttaggggagggggtgacccagtcctgtaccagggtgatgacggctggaatgactaacgttgtggaggggaggagctggtgaactgttctgagtgaggagtcatccatcagtctttccttgacttgtcatttgtaacatattttctcttctgagcatttggggaattaatctcctcacacctgctgcagcaggtgaacccgagtttgctgttggggtgtccggggtgcgcaggtgtgtgtctttgagaccattcttcattaaaattaatggcaagggggcttttcctgctgtgtcaggctcctcaacactccctccaaggagggactctcaggcaggtggtcacacgtctggcttggtttgagttcccaagagtcataacttgcagaactgtgttgagttctagaatttacaggcatgagttctatgggattgggctaaggtgatttaaaaataatggttaattaaacagtgggcttccctggtagctcagctggtaaagaatccacctgcaatgcaggagaccccagtttgattcctgggtcaggaagatctgctggagaagggataggctgcccactccagtattcttgggcttccctggtggctcagctggtatagaatctgcctgcaatgcgggagacctgggttcgatccctgggttggacagatcccctgcagaaaggaatggctacccacttcagtattctggcctggagaatactgaagtcacaaagagtcagacacgactgagcacctttgactcactcactcagcctttgatgtgggccatgcagtcctcagcatgtagggcttcctcatgtcctagaaacttacctcaagcaggtggatgacaaagccatcctcgaccaggagctggagctgttcacttcacagacacttgcggagc

SEQ ID NO: 33193 - DNA, 1311 bp, Bovine  19866880361278
  misc_feature (1)..(1): n is a, c, g, or t
ngacgactgaggctcgaagttagggggatcttgctcaaagttacagagctgagctaagatttgatgtctgaacactttgtggtgggaacacagacagtgaacagttcctaactgaactccagacgacacagcctttttgaacgctcaacttcagaaaaaattagagaggggaatttgttcaaatagcaacagcaaaaaatgtgctccctgtgggttaatttcactgctccctgcccctaccctcagctacccccctttcctggggattgggaccaaggagtgtttcctcagcccttttggaaaggcagaccctccctttctggcaaaggtgaaatgctgctgtgtaaaaagccgggtggaaagttaattacaccctggtttgttcagctgtggccagagtgacctgtgggccctaattacaggactggggctgcggtgggaggctggccacctttgccagcctccttcctgtccaccggctggccagagcttgcctttgtgtgccggctcaggccctttcttgctccaacagcatgcgtggggcccctccctgccttagtgctcgcggcaccccttgcactggttccatttgggcaaaacggagtgggcgcaggccagccgctgggcgatgcagtgccaagtacacaggtgcagggcgcgggtttcttctgcccgtgggggtgtgcacagcgcctcggtgtcagccggcatcacgcagagcaaaaggcctggggcctggagcacaaagaatacccccacctgaagagctttcctgcacgcgaacagcatccggtcacaaaacacagagcaagaaagagtccggtttacgctagccacagaatgtatagggccaggaacgaacccacagggcatctcattcaagtgttcggagcgagcaaacagaatcagcgactgggggacacagaagagtcttaattaagtgaaaaggcagaccttgttcttgaatggaaggatttgatatcataaatacatcaatttctgtgaaattagtctattaatgttagccagtgaaagtaacaaaaagctttgtttagacatggacaagctgattctaaagttcatgaggtggaacttccttggcggtccagtcattaagacatcgtacttccactgcaggggacacaggtttgatccctggtccaggaactaagatcctgcatgtcgtgcggtcaaaaaatagaaaaacaaatgggcatgcaaggataggaaagacagttttgacaaagaggcctaacaggaggggctggtaactagatatgattttaaaacatgttctgaagcggtaggatt

SEQ ID NO: 33194 - DNA, 1318 bp, Bovine  19866880397448
  misc_feature (1)..(1): n is a, c, g, or t
ntaggctagagtcaattcacgagactgagcaatgcaccaggagaccactccagtgggtcttcgattggtacttgctttcacccttggtgtgctgaaggccctcctccctcccagtgccttagtgggcctggctggggttctagcttcctcagggggagctcagcccacctgctggactggactcttcgagatactctcttattctctggggtcccatcacagtgaactagccaggccaagctgcggctggaggtatgaccatgcaacaatggcgttgcaacccacccatgggtgcccatcagatcccaaacatggggacactttggcgagtttgggtggggtgcagatgctctccagatagcactcgctccaccccagtctccctcctggaaaagggctcagctgttgggctctgactccaggccagctgcccctcctgtggagaaacctgcctttaatttagatgttctatttctttctccgtggaaaagtctttgtggtaccaattaaggaacactttcatcccctcctgtgtgagcagtgaggaatttggggacagcctatgaatggctcctttccacactaattccaaaggcagagtgactttttctggggaaggatacctggccagaggctctgggtgggtccttcccagtggtgtggaggttggcacccatggagggcttgctctgtgccgggcactgtgcccagcgcacctgtagggaccacctcactgcatcttcccagccaccctaaggaaggtctattgtcatccatggtttacagatgaggaaactgaggctcagggaggtcagtgtcctgttcaaggctaggcgagtggtggatggtggagcacaaatatgaacccagcttggtccgattacagggtcatgatggcctaaagtggttcatgatgtcaagaaagtatgttatttggtgtctttattataggacatcagatccagaaaaatgcatgacctgggccagatgtggccacatttcgcacaatttagtgtttattcttctacatggagtctcctgtgtgtctgtgtgaagtccctggatcgggtctgcagctcccggaagatcccaggttgacttggatctcgaacttctatttgggtgttttaggctctgcccagtctgttcctttcgtgctacccagcctcagtccccactgtatttctcacaccttctgttctgtgtgagtctgtagtcgctcagtcatatgtgatcctttggactatagccagataggctcctctgtccatggggttcttcaggcaagaatactggagtgggttgccatttccttctc

SEQ ID NO: 33195 - DNA, 848 bp, Bovine  19866880449835
  misc_feature (1)..(1): n is a, c, g, or t
ntcatctaagtactacactggaatctatagccttgaaatcaggagtgactgggctttccccggagatcacgaaggttgccactgggtccagtgtagacacatcggtgtggctgggcctctctgaggtggacgtgcttctactcttgcaacatacaaattactgtttgcctccagcagagaaatcccaattgggagtttaaaaagtaattggttaccatttatgtatttttctttcactgtgctcagataagaataatattaagttttgaatttctgacattcagatcatagtgtattataactgaccataaaaatcacttactttttataaattcattttccaattaccaagtcatttgttcacaggtgtcattttgctttatgacaagacaagtatttttcctaacactgaccttctctatgggtcagggacaggcttcatatctctacgaaggtggcctcactgatgctagtgaagttttctggtttccttaagaaaatctcctaacagaaaagatcattaaccactgtatacattgtgtacatgtatagaggtatgctttgagacagtacatgaaacgactaggggttattctatatactgaatatttatagatctgtaacatttgtttcaaaatgttatatttcatttttataaagtaccagtgtttctcttttgtttagcttttcatagattaaatcagcaatctggaaaacctgactgtcctggagtgttttgaatttaaatcttttcttggtctttgggaactatttagctaaatagattgaaagttttaagagttggttgctgccgaattatatttagagacaaactctaaaaagactga

SEQ ID NO: 33196 - DNA, 1287 bp, Bovine  19866880516582
  misc_feature (1)..(1): n is a, c, g, or t
naacatgtctgtataattctaattaactgctcgcataaagcctcagaaagttacacggggaaagctcatttgccagactgttgcctaaaagccaaggaaaatattatgttcttccaacaaacggactattcatgtaggccgttcccaagataaacaggagatatttgaggacaagtgagatttgaattgaagcagggatggccgagcctcttgtaagtggtgttcagcagtgttggcagggtgggtggcttgattgagtgataaatgctcttcaagaaaaatgcctcggacttggaatgtggggtcaggaccctggagatgggccatcttgtggtactcttgttaaagtctgtgggcaggaggccactctgaattagtgaaaagtctgaatcagagaagagtcaagctctttcggtagtttgtgcttaggttactaagaaagtgtgggcaaaagagagccttggggctgctttaataagggggtcgggatgacttaaagtcaacctcattcattccttctttcattcactcctccagtcgattattgctgggcatctgggcacctgacccagagccacagtggggctctgggtgtgacagccgacaaaatgtcaacatctgtgccctcctgatcccatgtctggttgttggtggtggcgggggggtagtgaacatggtaagtgagcacccattgtgtggtgtgttagtgatcagggctctgggagagagtgaagggggagagggctgggagcccaacttggtgggtgtggttttcggttgagtcaaggaaggtctgcctccctgaggaggtgactgtgagtgaaaacatgaaggaggtgcagactttccgggtagtgggaacagcatgtgcaaaagccctgtgcagaagagtgcttgggtgtctgagaaaggtgagaaggcccaggtgcctggggctgagcaggtgatggggagaagtgggtgatgacgtcggacagctgattgaggggcagggaaatgtaatccagtcttttgttatatgcaagaagacactttttaaaaaaactttttggctgcacctcttggcacgtgcaatcttagttcccagaccagggatcgaacctgctccccctgaattggatggcagagtttaaccgttggaccattccagggaagtcccagaagaagatacttctgaactgcttttcctttacttcataagatgaaaaagacttcaacattttgccacacttgctctattgcagatggtgtgaataatacacaaaaatatagagaagaaaataaaat

SEQ ID NO: 33197 - DNA, 1546 bp, Bovine  19866880535760
  misc_feature (1)..(1): n is a, c, g, or t
nccgcctggccctccaccacccgcctgacccagacccagctgccctgggctccagggaacctcatggggagctaaatgttggtggaaaggagccgtgagatgctgggggtctccctgcagctaagggctagttccccaactcccagtgtcttcacagggggagcaggaagcagatggaggcctggagtcagaccctatgttaaccagctcctctgccactgcaaaggctcagtctccaaagaaacagagtcccctgcccgtcctcaggatgaccctgagctctgagctccggaggctctctgctactcggagtcccagtggggcccagagggagggatgtaaacacactgctgagtggtccaggtaagccttctgcaccctttcagcctcaatttctcatctggaaagtggggacaatgtgttccccaccatgccttggggagcaggaagggtccgtcgtggggacaagcccccgggccctggacctgcctgtgttacctacttgatggcctcacacatgtccagccccatcttcacacagttacgggcgtggttgggcagggacacaggcaagccggacacgcagtagtagcagtcgcccaggatcttaatccgcatgcactcgttggcctgcaagtcaagggagaggcctggtccacagatggcccaagggccagggagcaggcctgtcagccacctccccacaccctccagagtcagccaggctcttttccggccagaggctttttcccctggggcaccaaacaccagcagctgcttctgggcctggcaaaaggactggggacacaggagctctgtaggaggaaccctaagcaggtgtcaaggatgaaaccaagtgttatgaagggcggccacctgagtgcctctagggagccactacctttggtttcattcacccatgcactgagcttctactgagacccctgccctgccccagacactgggacccagcagtgagcaaaacagaaaacaaccctgcggccagaggcagggctggacactaaactagataaataaaatcgatagacacccatgatgataagtgctatggagaaaaacgaggggggaaaaatgaggaatgagaaggaagaagaagcttcctgaggccagagaaggcctcccagtgaaagtaatttcgagaaaagtcctaaaggagccaatggagcaagccctgtagggagctggaggaagagcatccccggcagagggaagcagactgtgcaaaggccctgaggccatgaagctgttggagacacagcacagcagtctgtgcagatgaagtgggggagtgaaaacagagaggcaataggagccataagcttcagggtcagtcagtcaggtcagttcagttgctcagttgtgtttgactctttgcaaccccatgaattgcagcacgccaggcctccctgtccatcaccaactcctggagttcactcaaactcacgtccatcgagtcggtgatgccgtctagccatctcatcctttgtcatccccttctcctcctgcccctaatccctcccagcat

SEQ ID NO: 33198 - DNA, 1817 bp, Bovine  19866880641575
  misc_feature (1)..(1): n is a, c, g, or t
nttgtcttaaagctggccggctccgtgcaatagatactttgatctggaatgagacagggaccacagaccttggtgagtgccatttgacagggaagtagatgtccgagaagagctcctttggccccagtggaaaggagaccacgcgccattccatcattgtagcagtggaagggggcttggagatggaggcatgcttttaggaatggagatggctagaaacacaacctggattttttttttctgccccattttattggaccacatttctagctggagtctgtcatagttccttattttccatcaacagccatggttatttctgacctcttagaggtatctctcagaatacaaggttaagttggatcctggaaagctgcctacactgcttggactacctacaagcagtcaaacttgcctatggtttctttctttctttttttgactgcaccactcaacttgtggggtcttaattccccgaccaggggtcaaacctgggcccccagcagtggaagcgcaaagtcctaagcactggaccaccggggaagtccctgtgatttcattttgaactagtggatgcattccaccagggaaataggagaggtcagatttgaggaaatggcattcaagcaagctagtgtgtgctgtttttctaataactttaacttatataaattgttgaatttgcaggggttttttttaatttttgaatttggaaattaaaaaaaaattttttttttaaagtgcctgaaaaatggtccagtaatctttctttcctgagtgcccgtgagccctatctatatcatttctggttattatagctcttaacactttagttgcatagtttatgtttaaattatgtttacacatgtatatgttttattatcttaacatatatatgctttattttcctgactatacctgagcttgatgtgggcttcttgaggggaggttcatagcagtgttgcagtaactagatggatggatggatggatggatatgcagacagaaaacagtttatctttagacagcaggactggatttaatcatttagtcagctctgtcagtggttaatctgtcatgtgtgtatgtggtatgtctagaggaatatgcttctctggaaccatgaataaaattgttatcagtaactgtttaccctatatttagcatatatgtcaattaatagcattgattacattcattctgattcttgtattagaagatactataatttcaaaaatattttttgtaacagtttctctgtcgaagattgtagaatgttattattataacagtctagatggaataattaaaacttagttttactttctttaaatgtgtgctttttatatgataaaaatagaggcctttaatccttactttaatttattattactgtgatatagtggaaagacaggtagactggatccagggactcaccactaacaaaatgtttgatcattagacagatcactttacctttgggggtctgggtttccttgttcacaaaaagaggaattgaagcaaatgatttctaagatcttttccatctttaacctcctgtaaggaagctggcatgtagataaagagattggctaatatattgtactgtaatgggaataaacattcagatagccagctgtattcatgcacagtgactatgaatgggcattaatttcttcatctgtaaaaatggggggggggtgtgactacaattctggttcttttataaagcctaattattttttcatgaatttctgtggttgatttcttaatgttaaaatgtgaatagtaaaactcttttttccccccttcaattt

SEQ ID NO: 33199 - DNA, 800 bp, Bovine  19866880654055
  misc_feature (1)..(1): n is a, c, g, or t
nctttggagccctgtaaaaataaaaagttaaaagaccctcaagtttgaacaggaaaaccaaatacatgaaaccaagctgtttccatgtgggggccatggactgtgaacacccaagtttgaaacttcctctcatcggaatttatggaagccttggaaacttttccttttccctttaaacatcagaattggctcagggcattctttaaaagcataaccccggtgctgctcacagcttgatttaatacagcttgaatacaatagtaacttctgaacccgctctcttcagagagagctggaaagttgtttcatgacaccagtaagtaggtttttttttttcttctctcttttagccaaaaagtatattctaagatttattagattctctcctgccctccccctagtaacccagattttcactcgaagtaaaggaaacttgcttagaacaagttctctaactaagggctggaagatacagagcccagtcctctagggcagtgttggcactgaaagattcaccagtgcccagaggctggtgttgttgtaggcggtggttcatcagtatctgcttggtggaccagaaccgcacagggtctgggctccagaaacatcagcaggagagtaattgtatttgggggagaggaggttaagtaggggcagggatgtgaatgaggaaattcaattttcctgctgaggaatctgttctgggggtgggtttgtctgcctgtgttcctgggagagagtgtttgcaaagcctgtgaggtggtgacaatattcccccagaaataactcagattccttgt

SEQ ID NO: 33200 - DNA, 1786 bp, Bovine  19866880665953
  misc_feature (1)..(1): n is a, c, g, or t
ntagactatacagtccatgcaattctccaggccagaatactggagtgggtagcctttcccttctccaggggatcttcctaacccagggatcgaacccgggtctcccgcactgcaggtggattctttgcaagcagagccaccagggaagcccaagaatacgagactgggtagcctattctttctccaggggatcttcctgacccaggaatcgaaccaaggtctcctgcactgcaggcagattctttaccaactgagctatcagggaagccctgttttgaataatatgcacacagttcccaatagtgtatcctgtccctgagtagtcctaagaactgggggaaataactcctcacatctctcttccatgttcgggggacttgcccaggctgggtcatgcctttactgggtggtaatgaatttctcagggatgctattaggcgaggttgtttcctgtactctttcaaggaatctctgactcctgtccaatgctccagggtttgggggtattcctggttcccatgtcccagtggaggtcgttagtggggtcctgccaggaagcaggcagaggagctggtggataaagatgcatcgataaagatggctggagaccctgcaaatggggctgccgtgatttcagccaaagtctgaggctgtgaagaaaagaggctgccactgggaagacagtcctgcccaggaccaaaggacagatagctaccatttaaaatttccaatacagactaccacgcagagccccaaagcctcccaatctcccttctccacctagaagcaccaccattctcaaaagggtggtaacagacgaaagaatctccttgatgctgaagagctgtagtgccaggaatggcacctcattccaagagctacagacacccatcaaagcatcactccacagtggaactgagaagccctgctttaacaacagcacaggagcagtgtgataggacataaagagaacagcttttaagtagaagatcgattgactgtttttaaaatatgcaccaatagttcactctcttatagttaagatttcacttcagtttgtagctaatcaagaactacaccagcatcgactgttttctcaaggagaatgagagtctgtagcccacaaggctgaggaggtcctgattccatcaccaaactgctatgtgacccgggttaagtaatcacctttctgtctccctcaatatttccccccaggaaataagacgactggaaaagccaaccgcataaatcccttctgagcatctaagttggccatctcctctgccaatgatgggaatattaacaaattccaaaatgactggggtttggtttgctgattcccaaacagttcaaaactttgagtctttctgggtccattgtttttgatatcgattccctttagaggttgagaatgaggacttggctcatccagggctgtgtgggtacagatgtcactagaggaaaagtcatagcaaagttccccaaacacttggctatcaaacttccaagacagcctcacaggtagaggaaataagactttgagtcccagcctatctcctaccagcaaatttccctccccaaacagatgtcagggcctcttttgagtattggttggagatttaggtcctatttccacaaaccggcacccaaggggctgcatcaacagtcacaatacaaggaagtgtctcaggatagctatgtaaggaatacggatgctctgacctccttgctcaaagtctggaacgatgtcaaccctaatgggatagcatggctgccacactccagg

SEQ ID NO: 33201 - DNA, 1531 bp, Bovine  19866880700292
  misc_feature (1)..(1): n is a, c, g, or t
ntattaacatttaacaatgctttgttttgaatttttctaaaaactcactcttcttaggaaaagacaaatttatgtttcacttttgtgttttagattttgctaagcacgttgactttttagaagccataagtagtgccttgagagcccttttgcaaacaatggcctccaagaacattcctcaggtaagattttaaagttttttatatgaaactagcaaagcttctgtataatggaggcaaagtttaataattttttgaagcatttctattagaagagtaatgcttgttccttgtaaagtgaaaacaaaagtacttgaagcataaaaatgaaatctccttgtcgccactctgccaccagagcatagttttatccatttgttttgcttttggctgcctcaggcctcagttgcgggtgtggaataattttccttgcggcacaggggcttctctctagctgtggtgctcgggctcagtagttgccccttggcacgagggagcttagttccccaaccaaggattgaacctcatcccctgcctcattataaggtagattcttaaccctggaccaccaggggagtcccctatacaattttctttttattgctataatgtatttgacatatgtatgttgtattttctctgaaagccatttgtctgtttttgaaatactgcagtacagaaattttcaagcatgtcctccaggtactccacagtgacttgtctgcgcctctctgataggtgccttttcgcttttatttttttactttccgtgaaggaaattttcaaacatcacgaaaagcagagatgatagtagttacctgcaagcattccacgtagtgtcagcaagtcagtctttgttttctttctttttggccgcgctgggcttcacggctgtgcacaggctttctcgacttgcggcaggtgagggccattctgtagttggggttcacgggcctcttcgcattgcgttggcacttcttgttgcggagcccgagttctagggcgcgtgggcttcactggttgcagcgcgtgagctctgtagctgtggcgcacgggcttggttgcccgtgacacataaagcttcccagactagtgatcgaagccacgtcccctgccttggcaggcagattcctagccattggaccaccagggaagtcccgtcttgactttcttgtttcattcactttccctacattttcgtttttgcttcttggaatagttaaggcaaatcatgttatttcacccatgaatgttctattgtgtgcttcattatgttgtctgtgacagaaaatgaacttaaaaaacttaaccacattaccattatctcaaacctccaaattaacagatgttttaaaattatcatttaataggcagtctgagttcagttttccctaattgctttaaaaatgtctctcttttttaatggtttgttcaaatcagcatctaagcagtatccacatattgttcttagttgatattttggtctcttaaatacatatttttttaaattcacataccatacagttctcaca

SEQ ID NO: 33202 - DNA, 1441 bp, Bovine  19866880720927
  misc_feature (1)..(1): n is a, c, g, or t
nccccccaggcagccttcctctgagctcaggaagcccagtgccttccccagcatgcactgacacactctggacagggtcctggctcagcctccactccaaccgtggggaagcatttgctgactggatgctgaaattcaacccaggcctccctgtgtctgtctccaaacagcactggacacaggacaccccgtaggtgcagcaggaggtgttcctgactttgctactggaagaacggaagcagcacgctcaccttggctatctggtcaaacttgccgaagagctcattcagcaccaccaccagctctttgggggagcagtcactggccagtcgcgtgaagcccacgatgtcagcgtagaggatgctgggggtggggtgggagaagggtcaggaccaaaacccccgaatatctgccagccctgcactcagtcacccctgcaagccctccacctccacagggatgggagagaagctcctgctcataaagacaaattaaagttccagaagctttacaccagagccaaatggagcaagccccagtctgcaaggccctctggaacccctggcccctttagagcccttaccatagatgactcaactatactctcatgggtggattcttgggcccctgggaacttctccaacctcccccacacctgatttcaccagatgtcggaactaaagccttggtaagatgcaacaactcttgagagtcccttggagagcaaggagattaaactagtcagtcctaaaggaaatcgacactaaatagtcattggaaggactgatgctgaagctgaagcttcagtactttggtcacctgatgcaaagagctgactcattggaaaagaccctgatgctgggaaagactgagggcaggaggagaaggggatgacagaggatgagatggttggacggcattgctgactcaatggacgtgagtttgcacaagctccggaagatagtgaaggacaggtaagcctggagtactgcagtccatggagtctcaaagagtcagacacgactgagcgactgaacaacaacaaagaagtggctggatgctccctccaggcgagctccacacccagtgccctcacacctctcatcttcacactgcccctgtagaacccccattctgcggatgagcaaactgaggcccagggaggtgcagatgcgctgggaagccagagctgcatttggcaccagatctcccggctcccgagactgtggttctggaccatctgcagcccagacagcagccatgggcagcctcaggggtaaggctgagctacaggcagagggccggagtggagctcacggcacccgcatctacacttcactcagggcagcgccatcgagtaagattctgcaggcccttcaagtctgtcaaaatcagtgtcacgactgggggggccactaagtcacctggggcggggggggga

SEQ ID NO: 33203 - DNA, 906 bp, Bovine  19866880748493
  misc_feature (1)..(1): n is a, c, g, or t
ntctttgatagcttagaaattcctttttacttgctattttaatgttgaggatactgtaaaaggctcacatttgaacttaggtagaagcaagatactcttagtcctagattcaaatactacattgtcctcaaagggattaaggagaggaatttccatttccagaggaattgctgtttaaaaacggattgtaaacctgtcttaaaactgcttatcgattcatcattcttttgccttctcctttagaggatgtcagcagttaaatttttaaaattttattaagtgggacctaagtgtttttgtaagagtgtctgagtgcttaaaaattcttgttgtgatttatgggcccatatttcttaacttttaggaaagtcttgctgtttttaatacaggtatttaaaaaaatctgaattcagaatgcacctcaatgttgcgctattctgacattaggtatagtaaaactattgagagttcttgggatgtgactgacagttagctaataggttaaaaaattgttgtggtccttggcccctgaactggcacgaccatctaggtagggagaggaagaaaaagcgcatgaacagtggcctggaacctggggcagctggatacccactctgtcccacatctgtgatctatctgtgttctgttttgccacagcaggttgacactccctgaacactccaagatgcagttcaaaatcctgagttcattgctcatgttcttgatttttttgtactttctctaaaatcttgcagtgcttgttttgtgctcttggcatagttgcttatgtttaattttccttttatatatatgttttatccactaggttgctagttaagatgaaacttctttcttcctttctttttttagttgaggtaagatggaaatttcttaaatgtagagtaa

SEQ ID NO: 33204 - DNA, 1501 bp, Bovine  19866880795189
  misc_feature (1)..(1): n is a, c, g, or t
nccagtgatgtcagatccaccaattcagggtgaaaagtggcctcatggaagtatccccagggttggggaggggcactgatggtggcagagggagtcagggaaggcttccgggagtcagtgtcttggaggagtacctgctgggcatgccttggtagcagtacgggcttctgaaggtgttgctcacttacctccccacaatgcagaaagaacagccttccccctttcagagcctccgctccagatgccacacgctctcttcactgaagttggcagaggagatgcccaaatacttctcaggagcttcgaggacttgcagactatagctccgacatctgcagctaaaacttaggaacgggaagaatgctatccaaataaacttaatcctaatcaaaggattattttcttacagaaaagcctcacctatacttaatagttttaaattgttccgggtaccaattagacttttaattttgctgttccctccggcggctggaggatgtgtgtggtttgcgtttaatcagagttgattttttttttttttttgctggttctgggagaggggaggagatgagaagactggttcggggtttccttctggtcctaccagggcccggtctaggggagagttgctgggaccctcgagtttggggctgtctgctggggcagtgtggacatctccagggagcaaaccagagtccccttgtgcctgcttagaggcagctgggagtttctgcctctgcatttctgcctggagaacacaacgctaagttaaatgtatggattatccaaaaatttctgcagcaatagggtgagttattattgattcacagagcacgacaaaacatcgctgcatgaattagcaaacagctgtttctaatttgagtttagaacggtacacagaggaacttgtttctctgttcactcctttcatttataatgaattttaatcaccgctacaggtgagaaaaatgtagaaacaagcttgtatcttgtggaagaaacaaaggagagacagatgctaacagatttccagtctgtgataaaagggatgttttggtacactttacatgtaattagagcgcagctgtttccagtcccaggtccacgaacacggccgaatgtgggctccgccgatctccaaagggagtaaagaaaaacagtgattcaaccctgaaagcatttcgctttctcttgagttgaacagagagcccttcgctccggcccctggcactgttgttctgtaaagcctgatgggaggtgacttcagaggtgctgcctctgcgcctgtgaccgtgggaagccggtgggctgagcttgggggtgtgcagggagccctggccagggggctgatgggaaagccctccagagcccctctgctagctgcaagtgccccatctttggggagcctctggtgggggaatatcaggccctcctttcctggcaggagttgatggtgacactcctccacattagctagtttgatcatcgccagctctcgggg

SEQ ID NO: 33205 - DNA, 1646 bp, Bovine  19866880887244
  misc_feature (1)..(1): n is a, c, g, or t
nagaagcagggcccactaccctgagaaacggtggtctagtcacccctcacatcgtccactcccatgtctgtggtggagagagccggtgacaggccacggtcacacagccattgcaggcaaagccagtctgggctgcggccatccatctaggccttggggccagaggggtctgtctcttggaggtccagccctggcctcagctttctctccccctccctatcccctcccttaggggccggccagggcccgctgtcctaaccctcatgtgatgacatggacaagagccgcttgctttgccctgtgtctgtgtttggatgaacaggcagaaagatccagaaggacccactccccatggtccatattgctagtcccagagctttgggctgagaggacttggaggtaaagagagactgttccatccattttcttcaggcatcttgttctttgtctcttaggcatgcatcactttcagagtgtggttttggtgtatttctttttaatctaacaaaataaatttaattgctcttcccccgctcacttttactttcactgagaaaagtaaagtgtacttgtaaatgtgcagctacaaccttgaagagaaatgtggacacctgagagtctgtgggtcacggcagtctaggtggaccgagccaaatgaccaccaccacagtcgtaacagcagcttcttgtcaggctgagacaagtcagtgaccttgtccaggaggccccacacctggccatccaaagcctcccctaccgccagtccagatcatgtccaccctcgccctggccaggcctgcctggtggggaggggtgctgcccaggggccccaggcttctaggacagatggcgccccatcccctctgccctctttacctggctttcctccagggccccccaacagctgggccagggtcagggcccgctcagaggtgaccgtcgcctgcccctccttggccagcgtccagactcacacacgtgaaggctccttccaccggctacctaatgagaatgactcacatctggacccacaacttcctgctctggcggcgggagcagcagaaaggctaacgttgagccctcagctcagcgcctctcggggcatgcaggcgggggcccctctcccagctacagcaagagccctcgacaggagtggggggagccgtcaggccaggctcccggctccaatgacctcatggaaattggaagcttcaaactggaacaattttcataaagtaaaaataaaacaagaacccaaagcctgcattagaagcccggtgacgctggctggaggcagggggtgagcagcgccttaacgagcaattaagaggcaacagaagccttccagggagcctcttcctggctccacctttcacacagggccctgagcctcagtttctccacccacacagcgagggggcctcatccgtctctgagaggtcaaagtctccagcctggcttgccgcctctccatctcacagctgccccctgccccatgctggggccagaccaggggccgaggttaaggccccgggttgaaatccctattccaaagagcccccagagaaccccagcacccctgcgtccctggaagccactcatcgagctccagtttccctttccaatgtcaggcctcagcttccctt

SEQ ID NO: 33206 - DNA, 1688 bp, Bovine  19866880915123
  misc_feature (1)..(1): n is a, c, g, or t
nctaagtttgttgagtgggtgcaaaagctgagagacagagatgaatcgttctggacaacagaatttttggagagggcagagagaagaggtggctgactgtcggagagaaaatacaggtgcacagatctcatggggaatttcacaaagtgtctgcactgtggtgtgagatcttaatagcaaaacttcattaaaatcacctcatttaccatctcagttctgctcgcttccatgtcagctccattcttataggttctgccctccacggctggcaagacagtggctgcaacaactcctagagccacagcagcccttaatcacagccaacaggtgtcttggtttgggctcccccagaaacagaccctgagacaaggatttgaatatgagtggtttattgggaagcgatcacaggaaacagtggtcggagaatggggaagtgagccagggaaggaaaagaagccaataaagggtgtgttactgagccagttatctccacagacggccagagcctaatctcactggggagctgtgagaaacagggtagagtatgcacccagaaggaaattgcagcatttatcaaccagcccctatcagccattggttgagggctgctccagggctgggcctaggactccttacattttgcacatgaggcatgctactcttctcatcccagccccagccgctccctggtgacactgattctattactcaggcttacagcacaatggactcaggcagagttccacgaactggcagttggaagttcagccagtgttcatggaaatgacagatgccaaggggctctggtaggggcacagatagtagctaccccagcaaaagtctcactgttatcgcaaaggttctgactgggtcatatgttaacctctgaaccaatcactgaggccagacagctgctctatgctaattaccttaggcacaggaacagggagatgagagggtaggaggcgtgagaaggtggtgagaaggtgttccttctgtatttcattgaaatgggtgagggtggaccacagcagatctcagaaaataaggtgaatggatgctaggtggccagagaaacaaaaaatgcacgggaccattcctcaagactaaattggaaggtaagaaggttgtgtttggcttctcaaaagtgattctgaccgagcctctgagctggtcacttgcccttatcaaaggataagacattaattgaggaagacttccctggtggtccagaggttaacattccaccttgcaggggacacaggttcgatccctggtcagggaactaagattctacatgccacagagcaactaagcccggtgccacgactggagggtctgtgtgctgcaacaaaagatcccacgtgctgcaactaagaccagacacaaccaaataaataagagaaatgtttaaaaagcattaattgaatactgatttgtgccagacactctgccagattctgagggtgcacacatgaaaaggtgttactcgcggtctctgagagcttctgggtaagggtagcagtcgggggtgaggggtgggaagttacagtgaccactgtttcaactaccatctcttcatatctgtgcatgacatgcccctgattgcagcacacacagtttttatgacccattaagcaaaacttaaaaccaccagttatattatgttataccatgggttgtaattt

SEQ ID NO: 33207 - DNA, 1533 bp, Bovine  19866880946041
  misc_feature (1)..(1): n is a, c, g, or t
ncccctgcaccccttcatccacccagtctttgagaaggagggtcaacctgccccagcaccacagccccctgaggttcatcacggggctgcccagctggctttatttttctgtaaacaagtctcaaaactacagcaaagcacattattttgggagcaacaaactgagcaactgctgagattataatcatctgaattgaaataaggctccttaaactgaaaaggcccaatcaggggaaatgggcatgttgacaaataaaagacccaactcagattgccctgttcaaagccttttactctcacaacatttaaccttggctgctgccatccgtcccatccctccagatgcattttgtgtgaggggcacttagcttactgttctaggagcaggctggagagagggccagggccagcgcactcaggatggatgcgtaggggaggggtcggcagaagggggtccttacagcagccaggctcccctcgtgctgttagtcatcacacaaatggaaccagtgcagcacatgcccttgggcagactacagaaagggaaggggtgcagagacggggtgaaggcaatcccgagacccccttcagcttgaacgtttcagaactcagggagaaggtagattcaaggaaagaccagctgtaccagccaccttttcatttccaagtcagtgctttgatagattctactatgtgccaggcattcctttaactcattcagtcctctcaatagcccaacaagataggcactactcttattatttccctgttcatgagaaaactgacgcacagagaggctgagtaacttacctaaagccacacagcttgcaggcaggacagccagggttcaaacctagttagttggttctgagtcggtgctttcacccaccaggctgtgtgtgtgtgctcagtcactcggttgtgtccgactcttttgatccaccatgctacccctgcttctatcttttgggagagggtatggtcacagcggaagatcaagagggaaacccagtgactaatatcagatcctcggcttccccttttcacctagagtaagtacagctaaagaaacagaacaaaaatgagtataaaaatcactttcaaaaaggaaattgcagtcatttaaaaatgactaaccctcaaaaagggctgataggaaatgggttatatgggtcttctgctgtcggctgcaggaagagaacaaaaataagcataaaagtggggagaaacttcgataaaaactgaattaggtagtaaaaagaacattaactgggcttcaggatatatcagcggaagaagaggcgggcgaccccaagctcacgtggccacactgggtcaattctgcgggctgagtctgcagccttgacaacatggcctcagacacacctggactgggtggagtcaagtggccaccacccaggatagctgggacccgcagctccatgcgcttcctgtcacagagaataaaggtcggagctgcagaagaagtctgggatgccagagagaagagcagcccacgagagttacagaaag

SEQ ID NO: 33208 - DNA, 1598 bp, Bovine  19866880953295
  misc_feature (1)..(1): n is a, c, g, or t
nccctgtggccttggtgaagcatcatcatctcccagagtcccagtttcgtcagctggaagatggggctgtgatggtgcccagttcatagggcaccaggtcggctggtaatgctcgctgctgtgggtggacccctgggcagaaagatggtggtgtgtgcacaagaaaacaccccgcttgtgagctagccgaggtgcagtgtgtgcccggcaggtcgggaactctggcaatggagggaaaggcagcctgcatggtgccgattctgttttctgtcccaagctcatggccctgggagagggccctgttggaaattgtgtagtttaggccttccttggttgtcccctagagaacttggatgaggctgcagggaaaggcccagcggcccatttttgggaagtccttctcagctccgggtggggatgggcagagaaatgagctgtactgaccttgctttgggggccctgggggttgcagggacctggggtcaactatagtttaggctcaaggtttccacgatggaaacccgaggcagcccttggggtgggggcttgggagggctgatggcggctgctgggccctgcgtcccctgtgagctctcagtgaggaccctcaggggcctctggctggatgagggagggacatgggccagcagggctgcccccgaggagccagggccgggtcaggggaacagggcaggtccgctcctgatggccccaggggctctctgagcagctgctgagggtgggcctggaaagaagagacccagagtgtgccccaggggcactggcagcctcagcactctcgtctcctggccttgggcgtctggggtccaggcctggagaagggcgcgtgacaccacgtcagaacttgtaggttcagtctcttatgtggctctgggtggcctctcagagcctcagttttctgaggaaagctggaaaaataacaccatttttcccgattatgaggctcagaggctgggtcacacgagattgccttacagagtaaaccttcgagcaggatggagggcttcctgctctcaaggtcttgattctgttgacgcagcagaggggcccccggggactgggtctccagggaagtcctgcttctaacagttcttcaggctgtgtatgaggtccccatgtcgctcacctcccgtctcctgtcccttcccatgcagccaccttgccttcccatttaggacacagcggcggggaggtgacagttccttaaaacagatttatactcttggatgactttatgggtttttgccttataaaaacccacgagttgacattctgatttatctgctcctgagtcaacaggatgtaccagatttaaagagatcaaatgcattgtaatgtttgtggttccagttgtggattagatgagctattatggaaagtgctgccaagtaaatatggcaaaaaaaatataacaaggggataatttaaatatgtctattaaactgtgtgttaagtaaagtagcaccggcatgctgctgaatgtaacttattatctggagacttggtgtagtagataaagtgggaattatggttctttttttcccccttcagaacatttttttctgttaaaggaagag

SEQ ID NO: 33209 - DNA, 1375 bp, Bovine  19866880968575
  misc_feature (1)..(1): n is a, c, g, or t
ntttaccgttttaataacttgagaatcacactctccactggaaaaatttgcatcagcctgtaagaaacagtcattttggagagggaagacgaacccctagtttccccccaggaagtaagttcactcctctgttgttggtttattcaaccatcatttattcattgaatgcctactgtgtgcccaaactgaggataagacagtgaacaagaaggaccacagtctctccctgctgggtcttgttctatgatgcggaggctgactttttactaaatggccacataaataattatttaattaccattttgaacaatcctgagaaggaaaactatagtgcaaatgaggccaaaaatcagagggtcccagtggtggtctggccaagagtctggaggaggaggaagaagtcagggaaaaggacagagaacagagttcctgatggggtgaacagtgcgttaagggccagatgtggaaaggaacggggtgattccaagggaaagttgtcacggttcagagctaagggcccaaggaaacaggggttgccaggcttaggaaccaatctgatccagcttctggtccagtctcattacctccagggagacctcgagaagggaccctgtgcctccattttctcatgtgaaaaatgggactatagagaatgtgaatctcatggggttgtcccgaagatttcttgttggttaagtgttgctggtctggccatcgtgaccaagggaaggtcacgaggcttctttcctttcccttcctgtctctcccctttaccagtcctcaagttcaaaaatatttctagagagagaagccaattacacaaattctctccttgcaccgacaagtgcctccttccctgggctgctggtttctagaagttttctagcatctttaggtctgcggagaaggctctgtgttcaagagaatttgattgttcctttgtctcttttgcatttttgtttcatgataatgacccactacttgtggaacccaggttttcctgggcactcctgtcctggggatacccaggaagcaatgactatgccccatggttgaatctgtcaggattgtcagattgaatctgtcactttgactatgaactggccactacccactagtcaggtgttcctgcctccacagctggctttgcaacattgaggagtccttggtctggaaggaccaacgcttggtctggaagcttctgagacttcagaacagagtaagtcaaaatagaaagagtccctttctctgctcttagttctcagcctggagttttggggagggaaatccctacagatgctcctgaaattccccaagggtccccagtgtcccccgcccagaccacaattcaaagggccagcggcaggcccagaca

SEQ ID NO: 33210 - DNA, 1049 bp, Bovine  19866880969459
  misc_feature (1)..(1): n is a, c, g, or t
naaatgtcattctgcaggaatactttgtaaaaataaacaggctgaaaaaacccaaaacttgattaatggaaatccactcagttggcctctgtcttgagctgcaaaatgcatttgttcatatggctaaatcggatcattttcattgggctttaaataaataaggagatcaaaaactagaaatggtggggggaagaaagggaagtttgtacttctgtttttaaagggccctaactgcagcgccccctccccccacccagcgctggcctttcctaggggacagtagcttcaattctaacctaaccaacagatgaaaagaaatgcggaggagaaagccccctgctcagcagtgacagtgtaggaggggatgggggagcttcctctagatgcaggggttatatcatacatgcacaagtcaactatccacaggctcacctcctgcaactgactacactcagtccaggttccacgaccctaacacacagacatacacacacacacacacacactcatctcaaaactccactggcccctccccagcctatgaacaagaccaaaggactaaccagacctgaaactgagtctgttcccctctaagtttaagaaaaaaaattaaatgtcacatcaaaaagttgattcatcctttgatccttggcttgctcgagttccacgcagaccatctgaaagccctgtgcagagttccagggcccataggacatctgtgaacaccagtcccaggccaggagctgcggctggactcactcactcccctgtcacatctattgctcccctaggaacaaatccagccacagggactcactgggttaaggctggggtgggccagactagagcacaatgaggccctctctctccttgtgcaccaagccaaggggtctcccagatctcagtaccccccaagttctgcccccacccagatcactgcctgctctactgggactccaaggcagttggcactgatgaatgccacagacacttggaacacattcggagggcagcacagtcctgcctttcacccagacacccccaaccgc

SEQ ID NO: 33211 - DNA, 4103 bp, Bovine  19866881016193
  misc_feature (1)..(1): n is a, c, g, or t
nctgaggaaataagatacccaagtaatgtgaattattccacactagaggaatgcttataaattataaaccattcatttaagggaatattgcacaacccattgaaaagacaatttttaatagaaacttttgagattgggaatcatccagacaaccaaaaatatacatcattttttcgcatgtgcactactttggaatagcagtatagctatttcgcttttcataggtgacttgagaattaaggtcatacaaatttatgcaacccattttgagactgttaattgatgttaggttcacattatttatttcctcaagaaaaagtctccctttttcttcagtcttaaaggaatgctttattgcagtcttcagagaaagccagaatgcagcaaacccgtctgctccttagccaagctctgttggtcacataagggcctgttagtaattctggttagtgcagacttttccgagaagacatctaagcatctaaaggcaggtttgttgtgtataagtgcctggcgtctataacgaacccttgttttaatctttgtatgctgagctacttcttaacacagtacatcaagtttcagggtgaattcagttcagaattcctgaatatttatctgttctccccagctaactaagcagcacttagagaagccgtgcggagagatgggaacccagtgaacagtggtgtggctcacagtgccgcgcggaatcgtaatgcctgcgtgtccttcagcccgttaggactcttcttctgctcacccacccctgccaccaggtcccctgttccaagtgcaaataccatttagtgggctttaactaaagaaagccacctgaaaatagttttctaaaccttggggtgagcgttggtcgtttgccttttttttctttttttttttagcccaccgacaaggagctgagagagaccatagcattgctgacagctcagcagacagctctggaaatcattgtgaacatgtgctgcagtgaaggtgtgttatcagttcccatttagatatcctccccagcactgggcgggcgcttccatgcagattatcttaaacagtccagttctctgtgatctgcactcttcccagatcccacagacgacgaatgggaagagctttctagcagtgatgaaagcgacgcgtttatggagaatgccctcagtgaatgcggtgggcagctgctctctcccctctgcctctcccatgaggttcacactgctctcacccaccacctcctcccaaagaaggtaatcggttttcagtctgggctcactctagagcatcgagaaggtttcagaaagccattctttctgtgcacagaggaagtgtgttaatcccctccaggtgtgggcgatgggtgagatacggaaagtgagacagtgaacagcactggaggtgggctgaagcttatcaagcctaaccatctcacttagaagttgggattttataaaggaatcatgtgttcagaaaaaaacctttccttgtaacgtttgccttactgtctttcttaaatttagatttttgacaaaactgcctttccaaacagcgttgcagttgacgtgtgctctaggagccccacttggaaacctttgattagaaagtaagaacatttctccttccaaaaccatttgtcattatgttattatcggaaatgatggaccattaaacagaagatgccgactccccccgcattcgagagttctagtcctgtatcttgtgtgtgttccctagagaagtgagcgcatatgtgccctaagggaggagaatgctcatagcagtgtggctcacagttgccccaacttggaagcaacctcagtgtccatcggaggcagaatggataagtcagtgccgacatgctcatacaatagaatacatacagcagtaaaaagcatccgaactggaaccactcacaaaatagtgagtagttcgttgagaggtgcatacatagatggttcctgggcttcccttgtggctcagctggtaaggaatccgcctgcaatgtgggagacctgggttcgatccctgggttgggaaggtcccctggagaagtgaatggctacccactgcagtattctggcctggagaattccatggactgtgtagttcatggggtcacaaagggtcagaccccctcgctttgggggtcagggaggtgggtgtgacagggaggggatgggtggctgtgagcgtgcgagaagcatttctttttttcctcctcctagtgaagtagggttggtttccagtgttgtgttagcttcaggtataagcagagcgattcagttatatatatgtattctttttcagatttcccgcttctaggttattacaaaatattgaatagagatccctgggctatacagtatgtccttattggatatctgttttatatggagtagtgtgtatatgttaatcccaaacttctaatttacccttcctcgcctttccctgttggttaccataagtttgttttctatgtctgtgagtctatttctgttttgtaaataagttcatttgtatcttttttttttaggagttcacctagaagcaatataatacatttgtctttttctggcgtacttcacttagtaagatagtctcctggcccacccatgttgctgcagatggcattatttcattcttttttgtggctgagtaagattccattggataagtacgccacatcttctttatccattcatctgctgatggacattgaggttgcttccgtgtcttgagtattgtgaatagcgctaacattcttatccaggtgcaccagtgtttgctttgtaaactatcaaactctatatattcctgagcgctttatgtgggtcatatttcacatttaaaaataggctttaaagatgctggcacacacagaaatttttctcaagcagattccatacgactcatcagtttactgtgcctccaaggccttgagtgctcaagcagtttgatctggtcagattcacagttcaccttaagcgttcttgccagctgcccgagacctccttctgcttatagatggtccccatcagaaccggatgcctgggttcaacgtcagtgctgagctctgtcaggtcaccgtgagaggcccagacagcattctctttcttcctttccagaatgaacactatacagtgcagagccctcgtgtgtctccagagcctcgtctcccttctggatgtggaccatctgggaggacctgctgcccttcagacgcttgcacagcacctgtcacaactgcttttttctcagccaggtaaatgtgctgtatttttttcttttttaattttactggagtagtgtgtttgtctctgccatacagcaaagtgaatcagctgtgcatatatatatatccactcttttttagattgttttctcatataggccattatagagtgtttagaattccctgtgctatacagtaggtccttattagttatctgttttataaatagtagtgtatatatgtcagtcccaatttcccaatttatccctcccctctcatccccctggtaacataagtttgttttctacacctgtgactctttgtacatctgaggaaatagagtattttacatagtaaaggaaaattctccatgttactttaccctgcatgtatgtctggagtgagggttaatatgggagatacgaatctgctctaattctttgcaaaactgttttaacatttccccttcttagaacactgaatccaagagctgaaattcttagaagatcaaaataaggtcacttttgactaaatacaagtttctgtataaacagtccttcaaaagttgttcccagattctttcctttttttttggctttgctgggtctttgctgccatgcaggcttttctctagttgcggtgcacaggcctctcactgccgtggcttctcttgtttcagagcagcatggccttcatggggcttcagtagctgtggctcccagggtttagagcacagactcagtagcgtggtgcatgagtttagttgctctgaggcatgtgggatcttcccggatcagggatcgaacccgtgtctcctgcattggcaggcagattcttaccactgagccactagggaagccggatc

SEQ ID NO: 33212 - DNA, 1578 bp, Bovine  19866881132423
  misc_feature (1)..(1): n is a, c, g, or t
ngagctgtgctgcttggaaagtccgaaagtcctggttgggtcctggctggctcaggtttgggcactgtcgtgtctgcaggtgcctggtccttggtggcaggggccccctccagggcaggggccaggtatgaagccagggtggggtggtgctcaggttctcaggaggagagccctgggttagggcaggccttgggggctacactttaggcaggatagggggaggtgctggatggcccgtgccctgtctctttctgtgcggtcgagatgcattccccacagtcggaggaacacagcgaggttgtgaaactccatatctcatccaggtgtcctgacggatgtgggggtgcacatgctcaggcttgcagggtctgatgagggcccccgctgtgctccaaaaccccacaccagaaaagcgcccagcctggtcatgtccgtataagggcctccctcccagctgtgttcccagtggtgcgagcggcgacgaggacagaccaggacagcagcagcatgtgggagggcgccgacggtgtggtgggcatggagctctgtgcagggggtgtcagggcccgggtgtatctcctgtagaaagcaggggtgatgccgagggctgtgtgcgggcctggggtccacaatgctctgatgctacagtgggaccgccagccttagggccttcgggcactctcaggagtggtgaaggtcgtgcagtttgcaagtttccagtcaagagctgagcgcaccctacatgcacaggcaggaggaggtgctcaactcctcatgagtccctccggccctcaggggactggtgcctgtcagctttccatcatccgctcggaggtgggaaagggagggccaagcatcctgggcattggataatccacagccgggcaatggattgttctgtttcctttggcctgattctgattatttctttttgacagtgcatgtacgtgatagattttccttcccaatcctgttggactcgggctattaaagtcagcttgtattccctgagcacgagacttgtgagatggcacaagtccctggtggtaggatgaggctggtggcagagacagtcctggacgtggggcctggcgtttggtgagcacatacttggtctgtgccaggacacagagcaaacgtgttttaccccccagggtctccctgagccatcatgacaaccctgggagctgggtggtatttccagcagcaagtccacagtttctccatgggctggttcggggctgccatctggtagaggacggggccaaaggcctggctgaagctgctttagaataacgcttctcgttaagctgagaaaatgtcacttggctgcatcagagaatgggggcaggtgccaaagaagattatgggggagcaaagcctccccaagccacccttggcaccatcactgagaactgctgtcctcatttggtggatgagggaaggaggcttggaacggtgcagtcgcagatccgccgtccccagccaggttgctgtggagcaaggactcgaacctgagtcctcctgccaccagagcctgggggtgtaacctccatgctgcccgccactggggaggta

SEQ ID NO: 33213 - DNA, 598 bp, Bovine  19866881251202
  misc_feature (1)..(1): n is a, c, g, or t
ncctcaagtgagattaaagaattaataatgtaattttacagttaatgtcattttattgtggtgtcttgggtaccctcttcaataaaattaaaaataaaagcaacagctttgcgacaagcaggagttaggtggaggaaccctgtccttgctccccgaaactgccgtctgtggcccgtgacccataagtgggtgggtctgcaccctggatttctggaaggccttttggaaacccagcaattaagaggttattagtgcaaagttaagcagcttaagtgtggaaagctgcgtgaaggagtgaactctgaggcagggctaacgatgggatgaggagaatttcagaagccaagaagtacgcctgcagaaagggacccagttctgcctctgcacttggcctctgcttccctgggtaggagaagggtggctgggagcagtttttgctaggcctgacgatggccctgtgttctgttaccagctgcctcagagaaggtggacaaggccacagtttctaggagcgatttaagacttcacgagtcaagtgtgtccgtgtgtctgggatatatggggtgtgaggggtaggggaatggggacatgtgtattc

SEQ ID NO: 33214 - DNA, 3076 bp, Bovine  19866881264224
  misc_feature (1)..(1): n is a, c, g, or t
nggcaggttgggtttggagaagagggcagcttagggtctgggaagagccccaggagtctcaaggaaagagaccctggctccaccctgctccaagacggcaggcaggctgaaaggatgctttccagtcccttatgtgttcctgcgtgtcacctttagatcccaaggtctgagcatggactcatggggcagcaaggcccagacagaagcctggagctctccccgggactcaggtctgctcatagctcctggacagagagccctgttttactgatgtttgtagagagtgctgcctttggagactgtggggtcagagcctccatggggatgagcggcagctggggagataggagacctagattccagtcattgctcccctcatgagctttgtgaccttgagcaagtaatgtccccttccaggaaccgtactctgaccattgtatgactaaagcgagcacggagtaaatgagcatgccactccgttaaccagacttccttcctgttaaaactttcagagttttaacatgatgatggttccagtgatgatagtgatcatagacagttctatagcacttacttaagtgccaggtcctgttttaagcactttatatcaactgttccacttaattctcacatcagcccccagaaggattcactgagtgcaggaactcctcagcactcaggtctgcagggcgtggttgggcaggttgtacactgcacgaagttttaacaggaacaccatccacatgtctgccagtccctgtcagtgacagggatccagaactttggggcagagaggcccttctattctctcattttatagatgggaaaatcaagaggcgaggtagcctgcctggggctactctgactcaaccagcaagagtcagagccaggttaggacccaagtgatctggctacagactccatgtgctcaagcgccatgccaaattgtacccttgcagtcatggagtcccctttttaatggagcatctgtctacaggggagcagtgttccctggaacacactttccagatgcattccgtgggcacttccggctaccagctctggaccgtcaaactcctgggggaatctccaatggagattttattccagtctccgaatctccaccagtgtggactcctgcagtgttgcatagattaatagtcatccgttcttcttctttccatccttcctttataaaaacgccgtatcagagaaatttgccaatggtgtgtccacgcaaggacctcctcaccaaggcagctgcacgttaaggggaaattcgcaaaatgaagtttggaagccgccagcccggccggagccccttctgagcgatgatgatttatttcggcaatgtggtagtcattagtatctttggtcttggagcccacgagctcgggcctgggtctgtggccgagggagccttcggggccattacgcactaacggctccgtgtgggcaaaggaggcccgctgtcaatctcgctgccggcgggtaataaacgtcggccggctgccttcctgctcctggagaaggggtggcgggggcctcggcacacggtggcccgctgggcctctccgagaggcctggccttgtctctacggctgtggagcaatcacgtcttatcttggctcagagaccggaggtgagaagttgcccagaattttgtctgactcacccagattttagaaacctgaggttggtttggggactcttggttctgctggtttggttttgggtggctgtcttcctgcagggtgtccacgtcctcttggagagggtatgggtgacgtagggccggtgcagaaaccaccccaagggaaggcgctctgctgtctctgccccttgggatgacctctccatgttgccccccttagaatggaggcctcatttatacacagtcaagggcgtggacatactgagtgtcgctcatgccctttacatgtgcccgcccagcctgcatgcacatcagcaagtagcccccttccttgcccccagcagttccccagggcagtcgctcctctgacttctaccacctgtgggtggttggacctgcctcaacggaaccctccagggtgtggttttgggggtctggcttctatagctcactgttaacaatacatttgtgaggttcatcttgtttgcgtattggtggtgtgtgcctttttgttgccgtgttcaagcccctgtatgaacatgttccaggtgcctatgcgttgcggtgttcagttgttcctggatgggggtgctgctgtgaataagcgctgcggaggggttcgctgtggtcatacgcatgcgcgtctttgctttcatagctggtgggttcctgagctgctggctggtgggcggggaaatgttcagctggagttgacacagccagttttccagggggcttgtgcgggtctacctgcccaccctctgcccgcaaggtcctgtgtaccccacgacctctgcccccacaccctctgctcccacctcctgctcacaccactctggccgcacctgactgtcctgttctcggacagcctgtgcctctctgtggaatgttcctctccagctccctacaccactgccacgctcacatccaggtgtcacctctcggggctgagccccactgcgacgttgtccctctaatctaccctctgtcttgtttccttcatagtgcttctcttaatctgtaggcatctcacttactcatgtgtttgtctgcgtggtatttgtctttccaggtggaccagggaccttgtctatgtcgttttggcctgtatgttcagtgcctgggccagagtccagcacatagtaggtatggataaggagaagaatgaatggacttgaacttttcaaacccagatgccacgtgtatcttgtcttgccatcgtagtcaccttcctacgaggaggatgaggtcaggtcatggtctccatctgacagtggaggcagtgaggtatgaagagtgagtgatgagccccgacggggaccccagttccaggcctgagcctggcgtgttgtttgtgagctgggctctgaggtcttgggatcggcttcagatcggctctgccacccattgcgatcttgtgcg

SEQ ID NO: 33215 - DNA, 1857 bp, Bovine  19866881276969
  misc_feature (1)..(1): n is a, c, g, or t
ntcagacacaactgagtgcctaactttcactttcctgggcacccggagatggggtggatacacaaggctccttggtgccggtggtcagatttaggggaatagctgcttgttgttctacggcttgaggatgggaaaataatctcaaattgcagaaccaggaggctgctgacgtgatcaaaggaactgagtgctccagtatgccttaatgtggatgcagaaatggagtgagacttagggaccccctgaggtgacgcaggtgtttagtgttgatggaaggtagacacgaggccgttagatgactgggtgtcagattgcaacctgagcagccctggctttgcatgcaggtgtgtcctgggtgcgagaggctagaggtgggacatgggcattgagagcaactctgctctgttcctctgtgtaagctggtgttttgtgtaaggtttcactgggaaaatcagaggctctatccctctgtgggtcactgcgtcttcagaccttgctccaggactggaattaggagagctgtatgtcgggcctggcctggtgggtgattctgggtggttctgcagacctctgtgaacctcaggctcatcatcttctagatggggtggatgctctgtccaggttgtcggcagatctgatgtcagtggcaactgacgtttcaagtctgggctgagggtcagtggtgggggacttgggtgcccagtcagtgggttgctgaagcggccccgactcctgctttcattctctgacctgctttttgttacttaccctctgccgaaaaccagattttcttgcagctcagatgtcagtataatatgaaaaaacccaagggccttcagtctcagatgggttccttgctatcaaaagcttctccctgtattagggcacaagcctttaaggttttcagcacccgtgtgcccttgcccatcaccagggcacctctggccctggccttgctcgtggcaggcctcagaggcaaggcccacatttggactatttgtgggatgaggaaggacaagaggctggatatttccttacttttttgtatcagttactcaggaatgaatctgccggataattgctcttcctttctctctatgtccacacgttggtatggccctggtgctctccaacattaagggaggaccagctctagctctgtaacttgtgcaaaatgaaaattcagagccccgaattttctcaaaaaaagtttaaaattcattttctaaaaatgaagaatctcaagatgacaacctcaggatatcaaacctcggcaactgtaccggtcacgtgcccatgaaaccagcgctgtataggagcaagatgctttgaatggcaggaaccccacaggactcaggctggaagggtatgctcatgcaggttgtatactgcacaactctggggaataccattcacactgtggcccacatggcggccttgccagaggtcaccccaaccagcccttgacagtggccatgacccacagctctgggacagagaggccgcctgaagatgggctggggtcctcacgcccagattctcccctccagccagggttctggaagctccttcttcgctcctcccattctccttggcatttcagagacacgtttctccgcgaagctgaggtgcccgggctccacgtgggcgctgctggggaagcttccgctcctccgtgcggatcgcccgccggcggctctgctgttaacctttggggtttgctcataaaatagaaactctctttgtaggtcagtttgtcagtaattttggcagccgcggggccaccgagggaatgaggcttggttcccacttgtctctcgtgctcggtttggagacttttgcggagcccttccccgg

SEQ ID NO: 33216 - DNA, 2663 bp, Bovine  19866881311375
  misc_feature (1)..(1): n is a, c, g, or t
naacagtcaattcctgcgtcctgcaggggtggtctgggtgtgattggatgtccttatacaatagaatggtctttatttaatcctgccagttgatgtctgtgaccctgcgtagacccattaggagaccctctgtggcctgcaattgtggtcattgtgtgtgtatgctcagatgctcagctgtgtccaactctttgcgaccccatggaatatagctcgccaggctcctctgtccataggattctcaaggcaagaatactagaaagggttgccatttccttctccaggggatcttcctgacccagggattgaacccatgtctcttaagtctcctgaattggcaggcggattctttatcactagcgccacctggtgggtgggaagcaaacgctgcatggcctccctgtggcgggtgcaggtcagaatccctctaagcctgttttctgttctaaaaaaaaatgagcaccttcctttgtagcccacagggcttgagctgaggatgactgtgtggagtgcttagccctgcgggctgctgcttcagccatagagccggatcctaccccaaggctcctgctctttctgcacctcccgtctgtccccataagctcatctcttgggggaggtttcagaggtctgctaataggacctatcccttgaaagcagaaatgggatttttcttcccaaatccgttccttaggggaagtcttcaaagagagttcttgtaatttcccgttataaaattttatgtgcaattacaaacaatgaactgtgagcattaattgagcagactgggagattttctgtttttaaatcaggactattttaaaacctctcagaccacgagaaaatggcctgaggaaataaagttccagagggtggcccaagcagcatcccactcttgtggcccctctcgttgcctctgggaccttgcaggaaaggtggcgactgcacccagcagagccagaggggcctgctgcagcaggacaaagcaagaggctgcccagttctcccggcgggcagggctacgtgaataatggctttcacccactccagctgcctggtgtgtaactgatctgtatccatccatccatccatccatccacccatccacccatctactcgtccacccatccaaccaaacactattagctaagtgcctgccaggtgccaggctctgagcacataggtctgtgagcaaaagacaagcattcctgcccaacttgagctgacattttaacaagggagacagagataatgaacacagtaaataagaacactatacagtatattagaaggtaataagtgctttggagaaaaactaaattggggatgagacaggaaggagagggtgggggcaggcctccttgagaccgtgacatttgagcaaagattagaaggaggctgggaagcaagccatgtgactatctgggtggaagtgttccaggtagaagaaaaaaaagtgtgttcaagggtcctgggggatgcccaggaggaaggggctctgtgcagtcctgctcacccttctgaggacattgagttggctctgaaagaagtgggagccattatggggttgcaaacagaggagtaatgtgtgcttactttgtaaagttttttttttttaattaattaatatttatttatttatttgttttggcatgctgggtcttcactgctgcgcacagcctttctctagttgcagagagtggagactaccctccagttgaggtgtgcgggctcctcactgcagtggcttctcttgatgcagagcacaggttctagtgggctcagcagttggggaacacaggcttagttgttccgtggccatgtgcgatcttcccaggccagggatcaaatctgtgtcccctgcactggcaggcagactcttaaccactggaccagggagtccctgcactggcttactttttaaaggactgccctggctgctgtgttgagattagcactgctgtccaccactgaagctactggacacaaggctgtcaagtgcttgacatatggcccatctgattctggatggtgaagacttaccatgcaagagagaaactgtctcattaactctttgaacacattgattatacgttgaaatgataatattttgaatatatcagcctaaaatatgtattattacaatttattccatttcaccttttaaactgtggctactagaaaaggtaaaattccatacatggctcatattctgtttctactggacagcgctgctgtagacagtatgggtcaagggcagaagctgggagacacttgggaggcacagccgtaattcatgtgagaggcgatggcagccgagccagggcacagcgtggtgggaagtggtggaattctagatggattgcgaagcgatgtttgtgactggactgcagggcgttgcttcacagatgtgtgaggaatgactcacacatgggctctgcccgtcacactgtggtggggaggtgtgtggaaagggagaggggatccagagagtcagaattctctcctggaacccgagtctggaacaacaccccgggagagactgttggtggtcgaagtcagagaactggctgtccgcatgggggcagtgtaggaccgggtctcttgtaacaggtggttgtgagaatccaggtcttgatttccccatctgtaaaatgggggca

SEQ ID NO: 33217 - DNA, 915 bp, Bovine  19866881347728
  misc_feature (1)..(1): n is a, c, g, or t
nctgccctcttctccttcctccacatcccctcccatggcactcaacccatttctctggttgatctgaagatctcactctgcaaaccttagctttggtcattgagtcctgttctacctctcaatcaactctgattctgccaatgctcagttattattatttgaatggctctgaatttccaggccacaatactctcccaacctaggtgctccaggcttcctgtataggactagagatgctcaaccttactccctagaggcctcaagtaataggtagagaggtcacagtccagttcatcactgcctctcccaggaagccctccctgacttctccaggctgcctgtttcattttaccttgaacaccactctctctgacaaccagttctgccagcctgcactttccctaaccacgctcatccctgtcccaccactgggcccttgaaggcagggtctgatgaagacttgttcatcttttccctcccttccatcagggagtatgggaggttatcgcaacggaagatgcccagaagagcctcagcaacccaggctgaggttgggggcgggggtgtcagagcagttgtacagaaccaggtgggccagctggcaggccaccatgccatcctgcagaccacggcgagctcagtgaggctcgggtgggtgccattctcagcagacccttccacttcatctaacatgcgggcagaagcagaacccagcagccccacccaagtggcccctgcccaggaagacagggccccaaggagaagactccgcaggctggggttggaccaaattccttctcagcggccgtacatttccagcatacaggaatcgttcctgccgattcaaaaccaggtcagagaaaaccgtctctcgtttccggcaggggtgagcgttcctcccggggaagggctccg

SEQ ID NO: 33218 - DNA, 784 bp, Bovine  19866881377187
  misc_feature (1)..(1): n is a, c, g, or t
natctagcagttttcttactggaaacagtttggtgctgtgggccgacattcataattcttgatcttcttgtgttggaaactgttctccaaagtagattaatgtcgagaaaagtttttgttactttgtttcaaaactctcaatcagtagaaattccaaaatacactgcatgagtttaaatgctaaatatgcaacataagatatctagacagccaagtctactctggtatggcgtgttcagaatactcagtgtttaaagtcttcctgagaaggtcaggatctcagctctggtaaccttccgtcctccgacttgtcatttaacttgtttgacgtatttaagttttacctttcttttctttctaggtacctattattaaattaacagattcttttaccgaagtgaaagttgatatcagctttaatgtacagaatggcgtcagagcagctgacctcatcaaagattttaccaaggtcagagaattcatagtgtttattcaatgagactattagaaaatggagttatgttttgaaactctgttgtggtggtgttttggtatacttggctaaactatttttatatgtgtattgctgacaaatgcttcttttctgtgcggtggtttttactttccttgaatctgcttgtcataatcagtaatttatagtgtggcctcaggtaagaattaagggttgaggaagcctttgaagagcttctctgccctagatccttcctcttagggagattcgggctgagtcatgcgacgcagttcactcctgtctgctttcagt

SEQ ID NO: 33219 - DNA, 616 bp, Bovine  19866881608471
  misc_feature (1)..(1): n is a, c, g, or t
ngagctctctgctccggcaggcatctgagaggcctcaggcccctggtgtcagacagagcaggcctggggactcccatcaagtctgtgttatctgtttccagaccgaggaggtgccaagccgatctcgggggcatctgtccctcgagggccactgctggcgccactggcagggaggtgggctttgggaaaggaccacccgccaggggtgcccctggaagacagggatgtttgtaaaggtgttcactgcgggatcagacgggggcctgggactctgggattttgctgggggtgggagtagtggggagagagtgagagagaaggagggctggagaggctgaagggggaatctgcagtgggccccttaaggagtctcctgtccagcttccctgcccagcgagctgcagggtctgaactcactgtgtcaacccttcacctacactatgccacgggtcccccacaacaattctatgacattgagacaattattattcccattttacagaagagcacttggcaaatgagacccagggtgatacatgccatgtgccgctggaaaggagatggcatgcactgggatctgaactcggagcttactgcgatcatcagatgtgcttaa

SEQ ID NO: 33220 - DNA, 2968 bp, Bovine  19866880385495
  misc_feature (1)..(1): n is a, c, g, or t
ntgaagaatttggaatttataaagtcctttaattatttccctccgaaaatagcaaatgttaatttctgtacaattaacacatgaaggtaatgataatgcccccatctccacaaagatcttagctatgaaggagggaggtagagttgtcttctgagagttaaactgtaaaacaaaagaataacagaagagttagcgatattaaaaaaagaaacaaacaaaaaagatgactttaaggaggatagactgtcttccagaccagaaccagggcacggctgttaccaagtccaagctcatgctgctagctgcatgacaggccaacaaatcaagagatgagatgttatggctaggaagagtgactttattctggaagccagaagaccaagaagatgatgaactagtatgccaaagagtcaccttacagagttagacttcttttacattagaaggggaaggatgtgtggctggtttgttgtcctttttgtgttggccagatcccagagaggaggtgataatctttagttctttcagctccatgggtttggtcacctgttcctataaacctccaacaaggcaaatgctattctctgttctgcaattttgtaataaccatatgaatgaaaagtgctatacctttaaacatcaaagcagggaagcagagccttgagagtgggctctcctgtatatttcagactctaggcagctcttttacaaaaggtgcagagctagcatggctaagcacaggggaacagagcacaaaggttagaaccgagggaacagatacaatatgaaatcatgtttgtttttctcctttgcaagacctcatttgaaaaaggaggggcaacaaggcattgggcagtcatggaaactcagtagatgagattacagaggtgcatatacacgggggttccaggatgtgacttagctaatcccaagattaagttactctttggggctatcatggttccttgctaccaaacatctgagttacaaacaaaccccatgtcttctgattccatggattccaagacctgttctcatgaagacatggcttgcctctcagatgttgtcagaaaagaacccactaacagagctgctagaggtgcttatagatatcgtaaaataatgttagcactgtattgatacactcacccctttagggtagggtctgtgaatttgagtatgcttctgaaaggaggctcgcccacaattttctgtgactgcaaacttgagggctacaatccagattgtgataaagtcattaagggaaatgttagcacagtgctttcctaaggtgcctttttgattttttaaaatttcaacatgaaaataaatatttttttattcattagagccttacctacttccatataagactaaaggtcatataaggccattataacaaatttaaaatgctttcaactatcttaagtatctttttggggaaaaaaaaaaaaaaaaaacttccagaaatgagttaaaatgaggaaagggaatcccagagagattaaatgatttactcaatgccattcaattaattagtgtcagagtcagaagtagacttcatatcactttcccatgcaaggctttcatattctccggtggaaaactactttaagtattttcaaataccagtggatttcagttgagtatttgcatttcactcacaattgcctgtcatttgaagcataataattgggacttccctggtggtctagtggttaagactctgagctcccaatgcagggggcacagattcaacagctgatcagggaactaagatcccgtgtggcatagccaaaaaaaaaaaattaaagcataattatcatctatcctactttattccttcccatttccccattttttaaaaatatcttcatccttctcctgtagtcccaactttaagtgagaaaagacccatgctgtagaaatactcagaggctttatgtttttaatataaaattattgagatagtttacagtatttttctcacaccaagtcttcagaatcttgtacatgtttcaccctggcaccacatctctacttggatatcaaagctagtggccaagtattaggcagtacagatttggaaggctatctgtggaggctggagtggaggcaggaagagtacactgtcccagggcagagttgtggcgggcttccccctcacacaccagttcaagcaagacacacagaagggacttggaataaccagtcacagcttgcacagaaggcagcactgggaatgtcgagtgagtgggtcacaaagctgcagaaatacccagaacctttcatatggtcatgttagttataaatccccaaggaggattataggctgcattatccacaagctcatttgacagatctttgtgcagagcatttcattatcctgtgaacacgattttcagaaatgctgcatctgaatgtcaaactgcatgtgcttttttcttctgacattagatactcttagtctcaggaagcccatggggtgggggccatggagagagttgaaagataacaagagtggtgagtggagaaagttagcagagtcatttaacacgcctgcctgtaaaaccaaccaactcaagtgctatagtatttcttcacacaggtccagagaggattcattaattagcgtttgaaaaacagatcattggggaaggtaccatgtgaatgtggtaatcatcaacaccactcacaatcacgtcaatagcatgtggtgatggcatgttgactctgatcgtgaacagttgttggtgttgataaagctgtgaactttgaatcattaaatgtgcttgctttgtggttttaaaaccccaaggcagatgttatgtagtagagttaagttatatcttgaatatgtgcctggagtccaaagctaagaaagaaaaccatcaaagagcccggagcacatgacaaacgggttttgacaaaggctctcccaggagagtcttcacggagaagtgatgtg

SEQ ID NO: 33221 - DNA, 1642 bp, Bovine  19866880401321
  misc_feature (1)..(1): n is a, c, g, or t
ngcttttagtctaaagacagggacattcagatctaataaagcctcagaaaaaggacaaagattcctaaatgtatgcctacactggcaaaaagttgggaaagtttttcttctaaggctgcaaactgaaataaatgaacaaacgtaaaatccagaatgaccaactctattctagttgggtgggcatagactttctcattcttctctaagatccctggcacctggcacagcctggcatttcataagcatgctgtaaatgtctatgaaatgaatgaaaggtgcctctagtgacaggaaggtaggagttccttactgtgcacacactgcctggtgtggctacagaatagttccagctaggctttaaatgtaacaccttcttaaggtggcttggcaagaggcagcaaggtacagggggtggatgtcaccctcaatttcccaaagattcttcctggcttttatctgaccccaggaacccttctcacaaagggtggcaggctgacttcagcttgatgggagtgtacccttttcagtgggtattgtcaagaacaaaactccaaaaccgatgatgatggactctgctctttttcttcttgtgagtgtctagccattcagaaaatcccaaagctcgtactttgagcatgagctgtgcccaggtgcagccttgtctttcatccccattaaaacccacaaaggagactcataatgtgccgcagaaggactgtagatgtaaggtggaatttatacaactggatggcttttaatgaatagggagtaaatgggtggttacctggcaaccctgggtaagtgcaaattaatccatctttatttgatgtcagcatggtggcccaagtcttccactgggctgggacaggagtgtaaagctgctgatgctctagtggagttgggagagtctgtttatttttcattttgccctcatctctatacttggccatcatgctcccagcacaaaattgcactggtgactccacggtgggcctttatttggaacggtcattctaacacatgaatccttacagaatggtcatcaggttggagagccaagctggttcccagtttgaagcttgtgaagattaaggagttcagggtcgggttacccttttggtgttggtcttggaggagggcagaattatctggctggtaacttgctttatggctccctttaattgtgccctgtcctcccaggctgtagccagtcttatggtgtcctggtcttgatctggagatactttatcccaatatgttccccatacaatgatacttgtttgaattcagtgaaaaggttttttttgttgttgttgttgttaactatcattgttacaatgagtttttgttacaaaggagaaaaatgatagttccacttgatttgcaaggaagacatgatagttacagatagaggtaacatttttgctgaattaatttttattgaaaaaggatattgttaacacaattttgttgaatttttttcagtttattttttaattggaatataattgctttacaatattgtattataatagtttctgctgtacaacaacctgagtcagctatgtgtatacatatatacctcccttttcagcctctctcacacctcatccccaacccgcccctctaggtcatcacagag

SEQ ID NO: 33222 - DNA, 1502 bp, Bovine  19866880444048
  misc_feature (1)..(1): n is a, c, g, or t
nggtgtttgctatgaccaatgtgttctcttgacaaaactctgttagcctttgccctgcttcattttgtacttcaagggccaaacttgcctgttactccagatatctcttgacttcctacttttgcattctagtctcctatgatgaaaaggacatctgtttttggtgttaattctagaaggtcttgtaggtcttcaaagaattggttaacctcagctgctttggcattaatggttggggcatgaacatggaagtataggcattttaaattaagaaataattgcgagtctgattatttagtgaaaaagtttccctcaaaaaatgtatttcttactgtaggtttcaaaataaatgttttaaatcatgtatctattgtgttatattgtatgtttttttgattgtatatattttaaaattatatctttaatggttaatttatgttaatgcatataattattcattcttttttgaatattttacagctatgactggttccaaacagactctttagtcaccatcgtcatatatactaaacagaaggtaaacaagtttttaacatcagaaaaaaataaaaagctacatgcaggcacatttctgagcactcatcttgtattaacttacagcaattctatgagatagatcctttcattatccctattttacaagtgaggaaacagagattaggtagtttagcagagtcacacagtaaatgggagatctaacattttgatcccagacaggctggctccatagtatatgctcttaacaaacatgccatagcatctcaggaaaaaaaacagaaagtagtgggttggccaagaagttcgatccagtttttccataacatcgtacaaaaacctgaagaaaactttcagccaacccattattttatatgctcttctgtgattttgtttgtttttatgcatggataacagcagtggactgttacccttggactgcaaggagatcaaaccagtcaattctaaaggaaatcagtcctgaatattcattggaaggactgatgctgaagctgaaatcccaatactttggccacctgatgcgaagaactgactcattggaaaagaccctgatgctgggaaagattgaaggcaggaggagaaggggatgacagaggaagagatggttggatggcatcaccaactcaatggacatgagtttgagcaagttctgggaattgataatgggacggggaagcctggcatgctgcggtccatcaggtcggaaagagtcgtacacgagtgaacaaatgaactgaactgaacagcagtgagagttcgcagtttaacttcaccatatgaactgatttcctgcacttgaattggaattcaagagacaggagagaggattgctgtgtcttagtacgcttaagctgctaaccagctttagatgtcctctggaaactaaaattagggaattaactcattcattatttattgaacactgcttcattctggacactgctgtagaattcagaaatctacag

SEQ ID NO: 33223 - DNA, 1734 bp, Bovine  19866880464123
  misc_feature (1)..(1): n is a, c, g, or t
nctatacaacaatacaaaagaaaacaaaacaaaaaggagcttgggatgaacacacacacacactactatgtataagataaataaacaaaaaggacctacagtatagcacagggaactctactcagtattctgtgataatctatatgagaaaagcatctgaaaaataatgagtatatgtatatgtaaaagtgaatcactttgctgtacacctgagactaacacagcattgtagatcaactatactccaataaaaataaaaaaataagaagaaagtaaaaaaaaaaccaaggaactgctctctattctgctatagtgggttggtgcaactgggtctgtttgaaagattattcatttatccttgggcctctgagcagctggacaggtagtaggaaggatgtgaggtttatgagaactccagggcacataggtccccaagctcttccacagcattaaaatcaaggttctgcttgtaccccttcccccaatttgaacaagaattgcaagttacttatggctcatgtggtagcataatcaaataattccacttgaagcaaacaaacatttcagtaaccaaaaagcaaaccaactcatggtcactgtaaaagataagacatttttggtcaagaaatgcagaattgtatgttggttggtatttttaatataactgctggagattattctattaattcttgataaagtagaatttactcctctgttataaatatggtgaaattacaggcatggaagaaattgtgaaaattttctagtggtttataccaattgttttctttggcttcagatttttgtttttaacaggtagggtgctatatttattaaaatagtatgtggaccacaaaaaaggttatttcaaaaactatcagccaagcatatttattgagtactcaatagctctgacccctaaacataaaaataaagaaataagtcaataatgtgaaccaccaaccaagccacacttcaggcttttatttttgtccttaaatttgttggcatctaggtcagcacaccccaagatttgtacttgtggtttcatttccaaatacctcatacttacatatatgaggtgttccaggaaaaatgaaaaacaaaaagaaataaaccaaaaacaaaaaaaaagaaacaaaactgttccagcagcagaaagatgtgggttccggaattttctaattcagttggttggggagtgggggtctgaaatcaagtattttaaaaaatgcttcaagtgtttcacatacataccatcctggaaaccatgaataattttagagagctccagcgcaatcagcacctgggtctcagaaagatgtggctgctttaccacaagactttctgacagctgtttcacaacagaactgcttgtcggcagccccacaatacggcaggtgacgccctctcgagaccttccaatctgtacctgccctgtaggagaggtcacttcaagctgtgcctgctaggactcaggtttgcatccttggcccttatatttggtggccgtatgatcttgggctgatatttaattctcagctccacttgccttgactgatgaaggagcgaattcagtctactcgacagcactagagagaatattcagaggaaaacacccttcagtccctggaataatcacagatgctgtttccatttaacgtagagcaaaagccagaaaaggcccttcttagcttgtgtccctgcttccattttctcatttattattttccc

SEQ ID NO: 33224 - DNA, 830 bp, Bovine  19866880468732
  misc_feature (1)..(1): n is a, c, g, or t
ncactagcatcaactgggaagcccaaggtagacactggagatgaagaaataagtaaagacaaagagaagaaatggcagttctcaaactttactgtatgggaaaatctgggaagctcacttaaaatgcagcttcctggattctgctctccaaaattctgatacagtaagtttgggggcaatgccaaagaagccacatttccaagaagcatcacatgtaattctgactcactttgaaaaataccttgtgttgttaaaagtccctcacatagcaccatctcctctgcttgcccccctttcacccagatcttcccaatgaccacatttacacatctttcctggcactcaagtgaacaggtattttgtaaatttcttctgaaaagacactttcttttaaaaagttataaaccttttggaaccatgatatattgatgactaaggctctgccagcactcctctctgtctttgctgacttttcctgtccttgaggagcagggtccagacaccaggctctgtggagcccagatctaagctgctccctgagtaacatggatgcttaatcagcaggatagcaaatgtgacctttatcccagggagtccagttctcagctcatatcccctcttccccaagtaccttctgtgacccttctggagcatgtggaaatctctcagtacacaaagtagggtagcatcctggctttgactgaaaattggacccatggaaggcatagtgtgaggcagtagcttgccctagcaaggttagaccctaaagtattatttatagtgatggcactctcttctgtagtttacagacctctttcccgaccagggag

SEQ ID NO: 33225 - DNA, 2179 bp, Bovine  19866880477426
  misc_feature (1)..(1): n is a, c, g, or t
nctacccaacccgtagcacccccaggaggccagagatatttgttttgtgactatttctcaatttctaagcacactaataatgtcttgcagactgtaggtgttcagtaaatgttttttgaatgaattattgtgagcaatagtaaaccatcattgtgctgtttctggagtgggagcatcactagaccagataaatcctgggccaggcctaagtctagctctgctttcagattgtcctgggttttgaaactttgggtattctttgaatggacaaaagcaccacatcgtctgtgcaaagtccccagccttctaaagcatattcagaaacgggatgattcagaattgttcaaggcaccacttccttccatgtctctctacctagaatcaccccttacgaccaagatggtacttggtctgtacgaggaaaggaaaaccaggaaatgtttaacagtacaaattcaggggcatcctaggacatctgtggagaaggcaatggcaacccactccagtactcttgcctggaaaatcccatggatggaggagcctggtaggctgcagtccatgggatcccgaagagtcggacacgactaagcgacttcactttcacttttcactttcatgcattgcagaaggaaatggcaacccactccagagttcttgcctggagaatcccagggatgggggagcctggtgggttgccgtctatggggtcgtacagagtcggacacgactgaagcgacttagcagcagcagtaggacatctgtttgatgatgtttgctgagcaatgtgatgtgattgataatcttgatgcacagctctcactggtaagatttctgttgttttccccaaaattcaccctcgtgaactttcccagcttcctaggcccctgtctcccctcatgccctctttgtgttacagacacagatatagacagacacacatgacttcttgacctttgctatgctcagagaaagtctcttcctctgaaaaagagggataatcagagaatcaccccatcttctcatcacctctacctgcaccactaaaaacaaaaactgtttccaaatgtagttaaaagaaagctgggaattatcatttaccatagaaatatcaattttgtggggaaaaaagtgtcagttttaccagatgcttctggtcttggctgcctaatccatttgctgtctcagcagctgcaagtcctttgtcagccccacactccctccctcccacgtgctgtttctatcagttggaatccaattggttcctgccgcaggcactaaacttgaggcaaataaaatagcaggggtgaatatgaacaagaccagtaaaaataaccttccttgatgcctctaaattatagtatgacaatgacagtcctaagcactcaaaaacctgagtcagtgagttggagggtgatttgttttcaattgaagagtccaaggatattcctgaaaaagtcagatgacattattgatggaaggtatattgctcacaaattgtgccatgaaaacttagattaattgtattttatttaatcctcacacctgtgagcattagagcccctgttctacaggtgaaaaaactgaggctcagagatgttaacctcgttacccaaagttacgtatctgataaatgtaacttctgataaatgataaattctagatctgtgcctaggtctggctgatgatgaagtttgcatcctcctggcttattatacagttctgctccttgcctggcctaagacttttttaaaattattttttattggagtatagttgttttacgatgttgtattagttcctgctgtacagaagagtcagctatgcatatacatatatgccctctgttttggattttctttctgtttaggtcaccacagaacactgagtagagttctctgccctatacagtcgcttctcaatagttatctatcttatacatagagtgtatatgtgtcaatcccaatctccctacccatcctacctccacttccgcccttggtttccatacatttattctctacatctggcctaagacttgaggcacttaacaagcatgcttgccagtgccagaatccctcattctcttgaatatttccaagcaccctgaattacaatatctgagtaagtaccctaattgaaagtagccattaggaagctatacctataagagcgtttgcat

SEQ ID NO: 33226 - DNA, 4374 bp, Bovine  19866880503553
  misc_feature (1)..(1): n is a, c, g, or t
ncactctttaaaaaatattaatctcactgtagcatgtagaattttacacacagtttcagaatgggtctggcactgcacatccttataaagtaaaaggacttggaatagattcaagattcaaatgctgaagtttgtatctgcacctttgacttattgttttttttttttaaatgcatatagcatatgcttacattgtatcatataacacaatcacatctttgataacatcagtaagttggtgttgctttttcattgcattttccacagtggacatttttataggtctgtcatgtggaggacagcaaatcagtatatatttccttttgtccagccaaagtttttgtagccctaaaaatgacaaaagttaatagcattgtgttttttaaaatctaaatgtcacctttagactggttaatttgtcttcagtatagtgtcctggttaagaagagctatgctatgctatgctaagtcacttcagtcgtgtccgattctgtgtgaccccatagaccccatagaccccatacctcatagggcagcccaccaggctcccccgtccctgggattctccaggcaagaatactggagtgggttgccatttccttctccaatgcatgaaagtgaaaagtgaaggtgaagtcgctcagtcgtgtccgactcttagcgaccccatggactgcagcctatcaggctcctccatccacgggattttccaggcaagagtactggagtggggtgccattgtcttctccaagaagagctaaggctgcttcatttcaagagccagctctgtctatttctagctgtgtgaccttgaatgcattatttaaccttcctgtgcagaggttttcttcatgtctacaacaaggatcataataacatttatttcataggatcttatgagctagtatttgtaaagtgtgttagacagtgcttggcagaaaagaaagttgcaagttcttgttgtttcttattgtctttagatacatgtggaaatctggagagataaagataatctatattctgtagggtaaaaaacaatcaaagaacagcttggcagaaaaaggagaataatacagttgcattggttacacaagtcacttcattatttgtaaacaatttaaaatctttatggtctggcattttctaaacaatatttcgatcaagaatattctattataaggcaataggagagtgaacattagtgggaatggtgtagaaaggacctccaaagagttgttccattatacaagcaaggaaaacattgccaaaaatcatcaaaaataaatttttcagaactctggaaattaaccaaagatttgcagtaagtcatggagatttttcaaaaatctgaatctggattaaaaacagcaggttttgtaatgtgtgaacttgcccttctcccatcaccctctcctcaactctaggatagccttggaaactagctgtctcacaaacatgattgcaatgaaaaacagtggcctagtagggactggaggagacagagcagctttggagctcctcagaagcatcagcttcagagaactgtcactatttgagctgtctgatgattcctgaaaactcccactcaaagtgtttgtccttactccgtgtgaacagtctttttcctgggagaattgtcaaaacaaccagcgacaactgttaacattgccattacccgagagagtgatattaatgataattagagaaaaaaacaatctgatcaaaaaacttataaggaaaagttggagaataagatgtctccagcgttctttaaacaagtctaacttttctgggcatctaaaaaaccatatgcatgtgtgtgtgaatgtgtgtgtgggagtctctcagtcgtgtccaactctttgcgaccccatgggactacacagtccatggaatgctccagatcaaaatactggagtgggtagcctatcccttctccagcagatcttcccaacccaggaatcaaactgaagtctcctgcattgcaggcggattctttaccagctgagccaccagggaagtgtttttctttatcaagttgggatagtgattctccttaggttacgtgtatgtgctcagttgtgtccaactctttgcgacctcatggacagtagcctgccaggttcctctctccatggaattttccaggcaagaatactgaattaggttgccatttcctttatcaggggatcttcctgacccagtgattgactccacatctccagcattggcaggtggattctttataactgtgccacctaggaagcctcttagttatatatgtttcaaaaatattcttctagtctgtgccttaacttttcattttctttatggtaatttttttcttttcacagtggttcaaaatatgatgcagtaaaatacttctttatccttcccagcctgatgatataacatattcttcaaaaggttttatagacttgcttttcgtgtgtgttttcttttcagacttaattttttaagaacaggtataggtttacaaaaaattgagaggaagatacagagatttccaatataccctctgcctccacatgtgcatagcaccccagctccattattgacagcactcaccaaatggtacacttttaccaaccgtgaacttatgttgacacaccataatcacccaagtgtatagtttaccttaaggttcactcttggtggtgtacattctatgggtttgaacaaattgatgacatatatccatcattatagtgtcatgcagagtattttcactgccctaaaaatcctctgtgttctttctattcatgtccagctctcctccgatatctaagaatcatgggtatttttattgtatgcctttttgagaatgccgtatagttggaattatacagtatgtagccttctcagattggcttctttctcttagtaatatgcatttatggttcctccctatttcttcatggcttgatagttcatttgtttttcttgttcattccctaagttgtgtctgtctctttgcaaccccattggagactacagtacaccaggctttcctgtccattactgtctcccagagtttgctcagactcatgtccattgagtcattggtgatgccatccaactatctcatcctctgtcatccccttcttctcctgctctcaatctttcctagcatcagggtcttttccaatgaagtcagttctttgcatctgtggtcaaagtattggagcttcatcttcagcatcagtccttccaatgaatattcacgattgacttcctttaggattgactgttttgatctccttgctgtccaagggactctcaagagccttctccaacaccatagttcaaaagcatcaattggtcagtgcgcattctgctttatggtccaactctcacatccatacatgactactggaaaaaccatagctttgactagatggcctttgtcagcaaaggaatgtctctgctttttaagtatgctgtctaggttggtcataaattttcttccaggaagcaagcatctttttaatttcatgattgtagtcacgatcttcagtgattttggagctccccaaaataaagtctgtcactgttcctattgtttccccatctatttgccatgaagtgatggtaccagatgccatgatctttgttttttgaatactaagttttgagccaactttttcattctcctcttccactttcatcaagaggctcttggatcctcttcactttctgacatgagggtgatgtcatctgcatatctcaggttactaatgtttctcccggcaatcttgattccagcttgtgcttcatccagcccagtattttgcatgatgtgctctgcatagaagttaaataagcagggtgacaatatacagccttgaagtactcctttcccgatggaaccagtgcattgttccatgtccagttctaactgttgctccttgacctgcatatggatttctcaggaggcaggtaaagttgtctggtattcccatctcttgaagaattttccaaagtttgttgtggtccacacagtgaaaggctttagcacagtcaatgaagcagaagtagatgtttttccggcactctcttgctttttctgtgatccagcgtatattggcagtttgatctctggttcctctgccttttctaaatccagcttgtacatctggaagttcttggttcctgtactattaaagcctcgcttcgagaattttgagcattatttgcttgtgtgtgagataagtgcaactgtacagtagtgtgagcattctttggcattgcctttctttgggactggaatgaaagctgacctttttccagtcctgtagccaatgctgagttttccaaatttgcggcatattgagtgcagcatgttaacagtat

SEQ ID NO: 33227 - DNA, 1277 bp, Bovine  19866880583544
  misc_feature (1)..(1): n is a, c, g, or t
nttcttactgaaattacgtgaatatctatctatattaccattaaaataggaacagtaagaattttctgaattctgaaggggttaggtatgaagaaataaatgtgtttcaattttgtttacaaatgtataacttaccaaattgctctaagttatagatagcttataaaagatatttcccttaaatctggtaagcaaagcttttaagaaccagcaatatttcaaacaaaaagtcataaaattataattatcaccaacagttcattcagtcccagataattcttattctccttaatcttcagttagcagtttatgaattgagtttttcctttagagttttagaaattcgtactgggttcagtggtacgattgcaaagctatcagaaacctatatttatcagagtgctttgctggaatctctttgaagacaaaacaattttgaaaaaacatcagagtaaaataactctgtagatgacaaaaaaagaaaaaaaaaaaaaagcttaaaaatagtcctagaatactttgttcttttaacagatgtaagaattaaattttcatgtagaacttgaaaaacttttgggttagtttctgtatttctgagagaatctttatgtaaatgcttatttttctttaagccaattaaatagagttctcttacaaattaattttggcaatgctatctggagattaaaacacacacacaaacacacacatctgtaatgtgtatatggatgtatagaaacatatagacaagataaaaacagaaatattatagtttttgttaaaaaattttagctatgagacggaccataacacaaaattcactggtttataaaatgaacatttgaacccaaattgtatttctggtggtgataataaaagttaagattctccagtaatatgactaaagcttttgactaatctttgtggagacaactttcagaatgtttttgtttgctttttgtaaggaatcttatggggcaatttttgactcatttagtcttagtagcttctgcttaccaaccaaaacacacattccattgttttggataagtttgcaactcctgtttccctatgtgtctcattaatggataagctcatctagacttaacttctccaaagtggccacagtaattccagatttctttgctaagattaacacacttgttcagacaaacacatattctgtacctataatttttgtgcatacattgcgtgagtgtccccgatgcaaattctagaactctttggactttaccaacctgagacctcactctgga

SEQ ID NO: 33228 - DNA, 4164 bp, Bovine  19866880604647
  misc_feature (1)..(1): n is a, c, g, or t
ntaataaacactgctcttgcaaccgccaatctactccttgtttctatgaatatggatcacttagattccatgtacaagtgagatcattaccactatatgtccttctctgacttatttcactcagcataagccatcaaggtatatatgcacattgtcacaaatgacagaatttccttcttttataggctgaataatattacagtgtgtgtgtgtgtgtgtgtgtgtgtgtgtgtgtgtgtgtgtgtatcacatcacatcctctgtatccattcctctgctgacacattgtttccacgtctcggctatgatggataccctacaatgaacatggaagtgcaaatatctgtttgaggtattgatttcatttcctctggatagacactcagaggtgatactgttgtattatatggtagttttatttttaacttttttgaggaccctccataatgttttccacagtggctccactaatttacactcccaagaatggtacaaagagttcccttttttccacatcgcctccaatacttatctcttgtcttcctgataagagccattctaatagatgtgaggtgatatctcattgtgattttgatttacatttacctgatgattagtggtgttgagcacctcttcagttacttattagacatttgtattctttggggaagcaagtccatctggacaccagcatcttgtgcaaggccatgggaatcatgaactcctttgtcaacgacatttttgagcacatcgctggtgaggcatcacacctggcacgttacaacaagcgctcaactgtcacatccagggagatccagactgctgtgcgcttgctgctacctggggagctggccaagcacgccatgtccgagggcactaaggctgtcaccaagtataccagctccaagtaaatataatatgcctagccgctgttaacggagaaggcaatggcaccccactccagtactcttgcctggaaaatactatggacggagggcctggtaggctgtagtccatgggggtcactaagagttggagacgactgagcgacttaactttcacttcacttttctttggggaaaatgtctgtttaggtcctttcaccattatttggattttttggtgaaccgtataacttccttatatagtttgtatattaaccccttattatatatttggtttgtaaatattttctgtcatcacatagtttgccttttcattttattgtttcttttgctatgtggaaactttttagtttgatgtaatcccacttattaatttttgcttttgctacttctgcaacaacaacaaaaaatcctttttgtgtcatatacaaaaaaccatggccaacagcaatgtcaaggcgtttttacaacgttttcttctagtagttttaagtctttgattcaatgttagttaattttttttgtgagcagtgtaagatagtccaatttcatttattttttgcaaatccagttttctcaacaccatttattaaagagactgtaatttctccactggatattcttagctctcttgtcaaatattagttgactgtttgtgtgaggatttatttctgggctcttgatagtgttccatttgtctgtctgcctgtttttgccactaccatactgttttgaatactacagctctgtaatatagtttgaaatcaagaaatgtgatgctttcagctatgttcttctttctcaagattgtttggcttttgggggtcttttatggttccatacaaattttaggatttttttatttctgtgaaaagtatcattagaattttgatggagattacattgaatctatagatgattttgggtagtgtgatcattttagcaatattaattcttccaatccataaacacgggatatctttccatttgtgtcttcttcaatttctttcatcactgtcttatagttttcagcatacagatcttccaccaattttaatttattcctaagtattttcttgtttttgatgctatacatttgggatagttttcattatttctttttcagacagtttgttgttactgtatagaaagacagttgatttttgtatggtttctttcatttggcataatgttttaaggctcattcttgttgtggtatgtatcaatatttcattcctttttatgaccaaataacattccagtgtatggatatgccacattttatttacctattcatcagttgacgaatatttgggtgatttccaccttttggctattatcagtaatgctggtataaacattcataaacagtgttctgagtgggcatggattttcatttctcttgggtatatatatccaggagtagagttgctgggtcatgtggtaactctgtgcttactcttttaaggaactgccagactgttttacaaaatggctacatactattttgcatttctaccagcagcatatgagtgttccaattttgctgcatcctcaccatcacttgttattacctggcttatttattctagccatgttagtaggtgtaaaatggtatttcactgtgtctttgatgtacatttcccagatggttaatgatatccagcaccttctcttgtgtttaatggtcatttatatttcttctttggagaggtgtctattcagattctttgctcagtttttaattgggttatttgtctttttattcctgagttttaagagttttttaatctattctagatacaagcctctatcagatatatttgctaatgtgtatagtatcttatttggcatgttttagtaattctccacatgatcagtcttcttttagacacatttcctacattcaatttaacttcatgcatgctttgtagttaaatccttcaaattaaatgcactggatacacattcagtatgatgccttcatcaacatttctattagattcataagactatgtacaccaacatatggagggactgtattgtagcagttctattaggggaagggagagctctagaggtagagtctgggttctaacactggctccaccatgtactagctatggtacttaggatgttacttcacctcactaaggtttagtttcctcatctgtaaaatgaggctaataacatacactatgtaatgatggattactgatgaaactaggctaatgtagtaacaacttgaccataatttaagacaaaaatagtgatagctattatgtatattattgttgtgtttactctgttccaagtaatctaaagattctaggtatatgatttaattctcagaattatatgaagttgatattataataaatattttccttttcttaatatgtatacactattaaatattattattatatagtcataaaacaccacactcaataactactgcctacctaaatataattattggattagaatatttgtaagacatatttacattttatttctcaaaatcttggtttgtttacctagccttatggattcattatttaaacatagtataacttaaaggaatacttcatttgtttaataaagaatattggcaaagtttgttttggcttcttattaaattctttagtaaacattcacatattttatttgaatggatttttgtactcttttcctcaaacatgctttagtgatttatattcactcatcacattaatgaaagaaatgctgaatgattaatttaaatgtttattttaaaaggtgaccagaggaaaatattttaggagatagaaattttggaacagcacatatttaaagacaaagaaggaaaaagttttgtgatatgtggtattaaattccactgtccctgaaaacagtcatcaagccttttatatttgctcaatttataatttatagatggcactccagtgccaattataaaaacatattttggagggttgctgaaagtttgtagaggcagcttttattgttaacagatacatttatgtacaggcttttctgacctttgataaacagtgtatatgctcagatgcaacattatttatctgagcacttaacatagaggtgaatgctatacttcatttattactaagaacaatgcacagaggcaggttttattacaactatttatacagaataggaaacagaagtttgaagacattgcatgtcttaacaaaagttcttcagcttcaaacagttaaggaagatgtattctatt

SEQ ID NO: 33229 - DNA, 1217 bp, Bovine  19866880701029
  misc_feature (1)..(1): n is a, c, g, or t
ntccctaaatgatttttaaggagcaaaattttgttaactttaatggcaaaggagtcagggactaaagtcgatgaaagggtgccaagacagtgtgatgcagacaatttccagacaaagactgtggactccctgctcacagctgtgcactgcatcctagcctcaagccagtccacttaacacactgaagtgtgatatttacaaacatgaaacttcagctaagtataacaaaaaagtacaagtctgcaaaatttcttctacatccaaagaatctttggaaagtccaaccccctgtgactcatttgtcctaccccataagtaacattattttgaaatcatttttagcatgaagaaggattttctccaagttgaaatgagaccatgagagaatgaaagttaaaaaaaaaaaaaaaaaatgaggcaggaaatgtttactccatgttcagaacatatagaaatgcttagagagaccatggataccttcaaagaaaaggaacggaatacaattcaccaagactctttcctccttcttagtacagtccaagaaacagcccattatggagagctctgactctgattttcaatttgtgtcatgatgttggggagagtcaatgccaagattttttcactctttagatctttgcagagttgtttgcagttggatagatagaagtgtttgtgacattaaaaggcagcgatctgtcctggactacagcttatggcaagtgactggtctgaattgccttctactcaggcaagcaaaagggaaagttgaaaaagaagttcgaggattaagtttccatgtgtgtctccattcacaacagatggcctccacacggacaagctttacacatttgttgatctccagatgggcaaataaaatgctatttttgatctcattgtaaactgaggtgggggattcttacaatctttcagtgcaaccaaataaggaaaatgaatttttctccaggcagagattttaagctaaaagaatataccgtaaggctatattaggattctctgtataaatgtatgagtttttatggaagcttaaggtttaattcattgtaagctttaaagaaaaaaacatatgaaaaactgtctaacatttttgataggtcatacctacgacatattcaagaaaataaattagtgttttgggggtaaataaaaaaaattgggtaaaccctatgagattcaacacatattgggaattactc

SEQ ID NO: 33230 - DNA, 840 bp, Bovine  19866880735510
  misc_feature (1)..(1): n is a, c, g, or t
ncccatgctcttaaccactttaattctccccataaaaaatgcacagactagtcaaattattacttccttccattgccattacctgttaaatggatgcagaaatatatatttttttaattttatttttaaactttacatagttgtattagttttgccaaatatcaaaatgaatccgccacgggtatacatgtgttccccatcctgaaccctcctccctcctccctccccacaccgtccctctgggtcgtcccagtgcaacagccccaagcatccagtatcgtgcatcgaacctggactggcatctagtttcatacatgatattttacatgtttcaatgccattctcccaaatcttcccaccctctccctctcccacagagtccatatttttaaaggccttatttttataatcaaagaatctcaagacaaactaaatttgtgctgaagagccatacctgctgatatccttgaagaagcatctcttgttcttgtatttctttttggatttgcttcaatttttcttcagtgacaggatcagtggtttctcccaaatgtaaccacctgtgttttttgtttgattcttcaaaactactcaactttgagaaaatgcaggtattgtttcatttggggaagaaaatgatacagtgagaagtgaggaagaacatcagaaaactccaggtgtatagacctaagactgtcttataagcacactagaattatcgtaacaccaactacaattaagtcactacagggatgctttgtactgatggttctgacggtggaagtaactcagaaatgctacacagggtcactttcctgaatctagaacttctatagcttt

SEQ ID NO: 33231 - DNA, 1843 bp, Bovine  19866880811215
  misc_feature (1)..(1): n is a, c, g, or t
nagaatgcctacagttgggaattttgatctaaatgcaaatgggtcattaggtctgcctccatgcaagctgaccaccttgggtcattaggtctgtggcactggccaacaactgcttggtgtgtcttcctggctgtgctgtcagatgtgtgtgtgtgtgtgtgtgtgtgtgcgcgtgcgcacgtgcatgtggatgctcattttttagggtttataggcatcttttggatccctcctttatgtgctagtcctgtgtctgaattggtggtcacttggaaaactcaactgctcatgtctaccccttaacatggaaataaaggtccagtcccaaggaaacagctcccttatcacatgcacccatcatgacccaccacaagatgttgatgaagagtttttaattcactccatgggagcatccgtgttcatatgtgaaagtgaaagtgctagtctcttagtcatgcctgactctttgcaaccccttggactataacccaccggacttctctctccatgggattttcccagcaagaatactggagtgggtagccattcccttctccagggtaccttcctgacccaagggttgaagccaggtctcctgcattgcaggaagattctttattgcctgagccaccggggaagcccccatgttcatatacatcttcccaagttcagggaggtggagagaattatttgacctgatttaagaaggtaagaggatatccaggagtggtatgggaacctgggttggagaaagaaagatcagataattggaagaagacatgaaagtgttgggcatgtggatgggagaaggggcaatgttcagatagttctgagaggttcctggggcctgctaattgccctctccccactccttataaactggcctaaagtactcagtgcacacctggaaaaggcaagtttatttttcaggtggggctttgaggtgaggttatcatttttcattattgctgctggcaaggatgcattcagctactcaaaagagcaattagtctctctatacagcaccaataggcttgtttgagatatgtttcctctggaagaagtttattttactgattctaatattacaaagaaatctgacattaagagactctcaggagggagtatgtaggagcagctggggggcagagggcagccacacaccgagctctgtgtttcctgtttgctgtgctctgaagagagcagctaagtccagcacccccgtaaacaagcctcagcgcccccatctctccctcagtgtgtgttaaagcccagacattcctcactgtggtgacaatatactctggggactgctacccagacttgttggcagcttccagatggtgaagcagcaccagcttccgtgtctgcaaagcttagaaaggcaacccggggtttcaacagcagacatgcaacgtcctgccttctgtttgttgtttgtcctgttcgtgtgatggcccaggctggctaatttgacacttgcaagaaaagcactgcctcatggactttttcaagggtgtgaggtagaagcagaagccagaggttctgtcctccaaatctgtcttgatgattcaagaaccgagaggaaatagccagtgaaaacacaggatgctcctttcatcggaaggactccacactgctctgggatggagatggtgtggcctgcatcccattttgctcccccagagaacctcctatttccaggcatttgtcaggcatcctgtcttaaaggactacctttccactctcaggaccttgtcacctatgactttcatcacccctttggtctccatccatccctaactagttaatttagatgaatagggataatgtaagggagaga

SEQ ID NO: 33232 - DNA, 1104 bp, Bovine  19866880817885
  misc_feature (1)..(1): n is a, c, g, or t
ngtttaatgaggatgagtacttgccccaaggtcccagtgatggaatgggacatccagaccaactcagctgaccttagaggagtttgtttccacttgttttgagtagagtcagtatataattggactgaaagagggcataggcttctgtttgattcaatttcctcataaatgatatgatcatgtgttataattatgaataatttactcagttatgataaataaagtgatttcatagagactcaggtgtttgaacaagactttggatgtaaaatatgagcccgagatggaatttcctgattgaaatattttgataaaatgtgtttttctgacatgtaagagacccatttctaaaaccaaggcttcttaaaggggtcctatttctgtttactgtgtcatgggagatgtggagaggtgggtgttggtagcgtcaggtagaagcttttgtgggtttctcttctttttctccttaaggaaaagaactaaaatgctgaaataaattagtggaacattaagtttggaagttttaaatatatacggtctcagaaaatacacacctaaagcatcattttcttcatgtatgaagaaaacaggtgccgttgcactttcagagcacatttatatcccccattgtacaactgcattggtggcaaacccactgtgtatcttttgaaatgaatatatcccggtgtactcaagagtctgtttagtacatcctacagattgccttggaatttgtccctgaagttgtaaacataggagagcagactagtaatcattctatcaaagggtttgaaatgtataagcacagaatactgcctactttttcttattcccaattacattttttatacctcaccctccatatagtaagcatgatttaagaccagggactgtgctaactatgggccactatattggtttctaaggataaaaagataacatctggtatctgccaattttaacagggctgctgctgctactgctgctaagtcacttcagtcatgtccggccctgtgtgaccccatagatggcagcccaccaggctcccccatccctgggattctccaggcaagaacactggagtgggttgccatttccttcctc

SEQ ID NO: 33233 - DNA, 1532 bp, Bovine  19866880882091
  misc_feature (1)..(1): n is a, c, g, or t
nttttggtaattctcacaatattttaaacttttccattaccattatacctgttattgtgatcagtgatctttgatgttactattgcaaaaagattatttgactcactgaagacacagatgatggctaccatggggaagcaataaagtattttcgataaagatatgtatatattttttaagataaatgctatgcacacttaacagaggagttacagggtaaacctgacttttatatgcactgtgaaaacaaacaattcctgtgactcatttgactgcattattcaatattgaggctttattgcagtggtctgaaactgaacccacaatatctctgaggtttgtctgtacattgaatatgcttaaagaaactcacaaaggataccaaagaaattcacaggagtgcctcctgctagggtgtttgagagtaggaaggcggaagtaggtgcatatgggacagaggtaagagacagacttttcattgtatgaccttttagtgtttattttatttctgaaagatattaaagtaatacacatttaatgaattaagtaaatgaattgaatttaagaggaaaaataatgacatcatccagaaaaaaggaaactgttcattctatgaaatcaaatgccatggattgaataaaagtgcactggaaggataccaggggcttcccttgtgactcagttggtagagtctgcctgcagtgtgagaaactcagctggactcagttggtaaaatctgcctgcagtgtgggagactcagcttcaatccctgtgtcaggaagaccccctggaaaaggaaatggcaacccagtccagtattcttgcctggagaattccatggacagaggaggcttgtgggctacagtccatggggaaggatatcaaggtcagcgtcataaagttttctgttctttttatttcaagctgccttaaatcaattttggaactagagaacaaacaaagaactgtgtatgtttatgctaatttgtattgatcagtcttgatttatctagataaaccaacaatttcttaaagttgggaagtgggtgtcacttcagaattatgcagagactcatagaaggcctacttgtgccctctcttagatgttcatgggggatctggtgagagacgggtaggaggcattctgtcattccatacaacgagaaaagaatcaataggatggataaacaacaaggtcctattgtagagcacaggtaactatattcagtgttgttgtcattgttaatgttgtttaattgctaagttgtgtccaactctttgtgaccccaaggaccacagcatgccaggctcctctgtcttccactatctcctggagtttgctcaaattcatgtccattgagtcagtaatgccatccaaccatctcattctctgttgctcccttctcctttggccttcagttttttccagcatcagtgtcttttccaatgaatcagttcttcacatcaggtagccaaagtattggagcttcagctccaacaacagtccttccaataatattcaggataatttc

SEQ ID NO: 33234 - DNA, 1945 bp, Bovine  19866880965659
  misc_feature (1)..(1): n is a, c, g, or t
nacttcacttgcacttttcactttcatgcattggagaaggaaatagcaacccactccaatgttcttgcctggagaatcccaggaacggtggggcctggtggactgccgtctaaggggttgcacagaatcggacatgactgaagcgacttagcagcacttgtcatgctcagaagttactgatttacttcattagctcatcagagctctccttccattaggacataagccccgtgaaagcaggcttctggcttgtcttgtttgctctctgtctccagcacagtgccctaaaatgaactcccatcatgcttccctcttgaggtctgtgtttcaagtgtaagtttcttaacatggtctttccttattggtaggttgagaagctgaaagctgaatctggaaatccatccatccagcagaagatacgtttaaaagaaaaagcagctgataccaaaagaattcaggatctagagcgacaggtatgtgttcagggtaaattttcattaagatattttatatacagtgcatttttgttttttgttttagaagtttctatacaatgtaatcaacttgcaagtttttgctcttactcattttaatatagaactgcctctgctttcaactttgaatatagtattcaaagtaacaataaaagcaggaaagaaagtcattttatataatctgcggttctgtgaataaagaaatttttaaagtcatgtgtctcattaggtggtagacctactgatgaaaggttgtttgcatcacaactctgtttgacatccaggaagaaagaaacagaactctgacacttgggatgtagagctaggatactttctcctgaagaaggataggtgagagaggagggcggggtaggagaccctccagttgggagtgtgttagtagcgcttgagaagtcttgtgggatgctctggaaaccgaacatccagcctcccagagagctggccacagtttggagctctcgctcacactatttgtgtgtgtgcacactcagttgtgtccagctctttgcaaccctgtggactatagtccgccacgctcctctgtcactgtttagacttagaaataaaatactcatgtcatggtcagtgtggctgggagacttttttcaaaaactgtatagtgacacttattaggataaagttttttctttttcattgtagtagttattttgtaagcaggaatactaattaactttttccttatgtttttaaaaccttctgtaatgtagtgtttgtattcataactaagtattaaaacaaaattagaacttcagccctgttcataagggcacatgatgccgtagttgtgacacttagatatacagctattattccatcacagacctgaaactgtgaggtcatcactgggctgaatattatccccattttagaagaagaaggaaaactgggcaaaaaattaactttgttaattttacaggacctgttagattaaaaggtatgatttggtagtttggttcagtggccacaaaagaaggaaagaggtgatttgaagagctagaaatattctgaaataactatggtccaggattgtttgacttttttccccccagcttaagacttaggttagcccacgtagaagaagccatccagaattgtgagaagagaccaaaggaaccacttccccagtagatgacttaattttaagagaatactgtggaaccaaacatgtaagagtaaaaaataaaacatgcttaaagacaaaattaaggtttgaaatggtgacccacattgaccaggaatacaatgtttataaaagtagcctccctcttttactagcactttcattaaaaatttaatggtttattggattagagctttctaaaatattattcattaatttttgtatagtttgctacacatgcatttcaaatcctactctcttctcaggagcagatgtttctatcctaatg

SEQ ID NO: 33235 - DNA, 745 bp, Bovine  19866880994385
  misc_feature (1)..(1): n is a, c, g, or t
ngtccattttgaggttccaggtaggcatgaatatggagggcacactgttgtaccttctacaaggagataaagtttctgagagcctcatacctgtcctcattctcaggtactacgtgattttaaaaatgaatgaaatgagcaaataggctaaattgaaattttggtgtcttgaagacaagaaagaaagagagagagcttggagatattatgcttctatccaaaatcctgatttcagagcttcccaggtggctttagtggtaaagaacctgcctgccaatgcaaaagacatgaggggtgcaggtttgatcccttggtcaggaagatctcctggaggaggatatggcaactcacttcagtattcttgcctggagaatcccatagacagacaagcctagtgggctacagtccacagggtctcaaagagccggacacaactgaggtgacttaacacccatgcactataatttttattagtatagatggtacagtttcagtgaggaacttggtgctcagtgcggcagcttgcaatgaggtgctcaccattctattggaaagtcactagatactcagtcccagcacatgaagaaggatcagaatgaaatgaaggaatggtaatactgaacatatggaagcaatgcagtgattctattaagaatgacagataaatgccagggggattgcaaatccatcacccagtttttcagtgatatataaagaacagagactctaaaacactgatcatttt

SEQ ID NO: 33236 - DNA, 1415 bp, Bovine  19866881036716
  misc_feature (1)..(1): n is a, c, g, or t
natgctgcagtccatggggtcgcaaagagtcagacacaactttaacaattgaaacacaccaattccactcacatggcttggtctgatagatgaagaacaacccccagtgaaatttcttaacatattcttaaaggacaggaaagatgatgtgggttgggagacagtttcgaggttaacaagagatataccagtaaaagggttgctgaacaaggaaaaggaccaatgtgggacattgaagaaatggaaggaactgggctctgctaagaattgtgacagggaggctaatgatcttgaacatgatctctgatggaaagcactgccaggcatgctaagtagagaagaggaagtacagcctagtgctattatttttaggaatgttgaaatataaatggacttgaatatcagcaaatcatcagctgatctcaaacatgagaaagggtcctagaaatctgaatgctgcctcatttgctacacataatatgaaattcccaccaggtccttggtttaaggtttccaaaccatcctagccacccagtttttaggtctgtatttagataaatagtttgggataaaagaagataagcatcacttcttaagtagaatatttttgctcattctctaaaatggtattttttctggctactaaaataaaataacttcattttcaaatatttgaaaaatacagaaaaagcttaaagaagaaaataaaatcatctataatgccatcactcagagacaaccactattaacattttgatgcatgtacttagtctttttctctacacaaggatgtgaatttctaattaccaaaatgtagtggtacctcacatactatattctaacccacttctcccctttaatttactgcaaacattttccaaatcattaactgtttttcatggacagaggagctaggcaggctacagtccagcacaagaacacaactatttttctaaaataattcttagtggttgctccagatataattatgtgtatataccacaatccattcatctaattccctatgattcaatattattataagttttcaactttttgctatcactaagagcacaactttctttcaaaatagtgaagaagaaattggtttcccattaccactatgttttttttgtcagaatgatacacaaattcaaatcatcttggatttcccagcctttggaactgggagaagtaaatctttgttgtataagccatgtagccaacggtatccttttctgtataagatgcacttatttatttttggctgtgctagaaggcaatggcaacccactccagtactctcgcttggagaattccatggacggaggagcctggtgggcccgcagttcatagggtcgctgagttggacacgactgagcgacctcactttcacttttcactttcatgcattg

SEQ ID NO: 33237 - DNA, 1658 bp, Bovine  19866881181358
  misc_feature (1)..(1): n is a, c, g, or t
ncagactgctttttgctacctgttagggttgatctgtgacatcggtgaatttcttgctccttccccagtagacgatcatcaccttgtgctccagcaggcctaaaatgtaaatgaacttgtcttggttctcctgctctagccgcaagtcttagagcaggtactatgcacctggaccacctatgggcctttctcaaatcctccctgttcacactttttcatgatcatctcatgaggtacaggatcatgaaaaaagaattgagtgggtgcagagtccccttgtgtctgggcctcttggagttttaaattggcatacttggccctaaaagagttggttaaaattcagtttttatagcaacatttcttttctttctttttttttttttctattttggtcatgctgcacaacacgtgggaccttagttccccaaccagaaatcgaacccacaccctctgccgtggaagtgcagtgtcttaaccactggaccaccagggaagtcctggcatcatctctctttgctgtggtctgtcaaaggtgatgagaagtggttcgtgtgtcccatttcctcaaagggccttgtcatcctgtggaatttagagtcctaaccactgcaccaccagggaagcccacagcattacatcttaattaatctttgcagctcgcttgttttggaaaataggaaataactcaaagcataagaacatagttggccttttttttagtagcagggcagttcagagctggggtaactctcattggtagccctaaggcacagacagggaaattatcacatggaataggaaagagggggttggaaaactgatcctttagagataggatgccttgcttaatgctgttgtgtgttgtaaatcagtttaagaatagtaaaggtaactgttgttaataatgtttggtcattattctttctaggaaaagtttgtggattttttcccccaaatactcgagtgtaactgactcctcagactgctggttaatttttaatgcttttacacatcaatttccttttagttaaatgtcaggactatttttcctagtactaataatgtcacataataatgtcacattagatgacctttgataactttgcagttgaccttctgaagtgctggagacctttattatgctccatttcagttttcctgggcaaactaaggcatccagaccagattattttagcccttttcctaactgggctggccatcattgaagttgtttggtgcagtttgaatttctaagttatattcaggacagttgctacctgattctcatgtctctgaggtagtgctggtctcatttctagtctcctcgcccccctccttaaaaattgtgcagcagaacttgacagtaagtacttaagatactatttttttttttttttttacaaaatgtgtgtttatttatgtattttggctatgctgggttttcgtcatggcacgtaggcttctctagttgaagtgcacaggcttaattgccctgcggcacatgggatcttagttccccaaccagggattgaaccccaaatctcctgcattggaaggtggattcttaaccactggaccatcagggaagtcccaatataataattttaattgtagaggctttggtcaaatgttctgccccttcatggtgacagtaatgg

SEQ ID NO: 33238 - DNA, 2144 bp, Bovine  19866881205887
  misc_feature (1)..(1): n is a, c, g, or t
ngatggcttcctgcagggcgcttccccgctggcatccccaggaggctccccgaaggggtccccggcgcccacccttgcccggcccgggaccccgctgccctcgccgcaggccccgcgggtggatctgcaaggagctgagctctggaagcgctttcacgagatcggcacggagatgatcatcaccaaggcgggcaggtaaagggcaagctggcgcgaacggcccgggccctggcctcactccacgccttggtgggtgagggaaaaggatctgcagcacgatggggtctctggttagcagtttgtacagataagactaggccctcggtagtggttcacttttgagaccgactttgcctacctaacctggagtgcagtcggcgcggggagtcctctcgttggatgctgcggagaaatcactgtggccgccgaggcggtgacggtgactactgatattccgtgggcaggggtgttaaagattcgtgatccgacttagcatctgttcatgtatttagttagactttcgttatgtttctgaaactgtggaacagattatccaccaccacactaccccttttttaaaaaacgcagtttactctttagccaaactgtcgtttgcttttatagattcgaaacttccaattgcttctttatccacagattcgctggcagtatgagtatgtgctgtgttatgctctcttgatattagattaggatgaaaattactagaatcatctgtaaaccatgtttaatccctgcaaaaacaattgctctgatttttaaaaaccattctttttatagattcacagttactatagttttttccccttagtgaaatccaacaaattagcctaaatttgctgaggaataccaaaacaaaatttgtaagttttatctattttttgaaagtgtgaaatttccacatccatcagttagtaaaataaatggatttgttgcacagatcatgttaattcgaaggcgcacagcaatatttccgtttttaagttttcagttcatttagtgcagtgaaatctatgactactatcttcttcaaaagaaacttttaacacacacacacaactctttcagggagtacacatggcaaaaacctggatagtataaaagtatccaaactagttagaaattacaaaaacatattttattgaatccatatgctaccttctacattttcacagagcttttattaatgatccaaattcagtcttcaacaacacaaagcaacagttgtcttataaaggttgtagttaaacacctttactctttatcttacaggtgcactgagaaaaacacttaaacagccagtgtattaaactgttctcatgcctagttaggaataatggactttcttttctctggaagtggtctttaatggcattattgttatgaaaacatttttggtaaataacagtactaaaatttgtgttataaggttaaattagcaaaaattagattacctggaagggtcctagacataaatcagtagatgaaagttttttgtttttttcttgaagagggaactgctcatacacacacacacacacacacacacacacacacacacacacacacacacacatatatatatacacaataatttgctgttgtattccttgctactgtgctttttaaaaagatagatgcatttactttagtatctcctttgataagcatctctgggaagctaaaagaaatgtgggtttcatttgttttaattagcaaagttgtgagtaagtgtggttaaagtattttcagggcatggtgggggaaggaatgatttggtaaatatacattgtgtttagtttctgctttcaataaagaagttttactatacctttcaaatttagagcaacttttgcacttcacctttaccatgcggcagacaggaagtcctgtctcaataaagaacatattgtttggttatggcatggcacattggctccttgtgcttttttataacccttttaaaatttcacattatagtatattttatcactttgagaaaatcaaattttctatttctactatttggaaccatttattatttgttttgttaaagtcagcctgcttactgatttttgtttaaaaaataaagtgctttctgtaccattatttcttcagaatatata

SEQ ID NO: 33239 - DNA, 1958 bp, Bovine  19866881209314
  misc_feature (1)..(1): n is a, c, g, or t
nctagatgacaatgcccccaccctggttgtagcaaccaaaagtatctccagatgttgttatttgcccctgggagagagggagcaaacctgaccctcactgagaacttctgagttagacaaatctgtgtctggagtcttttagatgagtggccaggcactggcctttagcttaagcaacagtgttctgagccatgggaatggtggtcagaatgcttgactgttaggaaaagagacagaggctgtgagctacataggatggggccacttatgagacaagcaaacacacagtccacaaactgtttcacttacccttgtgacccccatgaaaatgaatagttggccccagagtttaaacctttaggtcataataaacccatgaatttaattattacacattacatctctatagagctacaggttttgtttttgtttttagttgctcagttgtgtctgactcttcacaaccccgtgggctgtagcccagcaggctcctctgtccctaggatttcccaggcaagaataatgcagtgggttactattcctttctctaggagatcttcccaacccagggatcgaacctgagcctcctgtgtctcctgcattgttaagtgggttctttacctctgagccaccagggaagcctcagtttgcatcaaatccagggcttctattgctcggccttcttacaaaaacaaagggttaaatagtgacaggtggcatatattataccataaaaatatctagtcaaatcccgtaaacaaagaaagatgatctccttctctataataaagtcttctctggtgtctcagatggtaaataatctgcctgcaatgcaggagacctgagttcaatccctgggttgggaagatcctctggagaagattatggcaccccactccttgcctggagatttccatggataggggagcctggtgagcaatagtccatgggatcgcagagttcgacacgactgaacaacttacacttttcactttttttccccatgatacagggagaaattccagtacatgttggctaaaacgactccagggttgtgggctacatggagttcatactggatatttatcagtgggactacagcagccagtttgtgccaggaataaataaaataatctttaattctctctcctatatcatccagaatttggatctagttggaaggaaaggaatgattttctccactgtgacaatgctttaaccaacttcttgaactcatttagctgccactgccactgatcctattgttttgttttttacatcatcagagtttgatcaaagggttcagaaaaattagaaatataaagagcagagcatgctgtgcgtcagctgctagtagagaacagattaaacaaacgccagggtttatcacagtcctgggactacccaagccagcagtttcaaacacagcagacccttaaataatttcaaattctttttctattatcctttacaaaaataaagctggatacacactagattcataagcattctctgacacacagaatgatcaagggaagaacacatagcaagcaaaataagatgctatttctcaaaattaaatgttcaataaatataaacaacaaataagaaatgaacttcctcatgagttctgaaatgattctgcttgtgtcatactcttctatgataatcaagcagtggtatgccatctcatttgtagaagtctttgaaacaatttttatactactcatgcacgtcctttttttttcttttgaaaacacaatacaaagaagaaactagaaaccattgataaccttcacctataatacattgagttcagttcagtcacttagtcgtgtttgactctttgtgaccgcatggagtacagcacgccaggttttcctgtctatcaccaactcctggagcttacgcaagcttgtgtccatggagttaatgatgtcatccaaccatctcatctt

SEQ ID NO: 33240 - DNA, 1844 bp, Bovine  19866881250330
  misc_feature (1)..(1): n is a, c, g, or t
nactcacttcctatactttctgggtttctttaaggaagaccacagaactaatgatgaaaaacctcctgaactcaatagaactgaatctttcagaaatggaatgtaataccttacaattcattttttttctattaataaggaaagttcatagaaggagaaaggaaacaaagaaagcagagaacaaggaaaataatatactagatgtatagaatgattaccttttttcctactttgatttgaggcaagaatagatctcaagtttttgctcttcatgatgtccttagaagttttcttttcaacattagaaaatgtcttgaatggtgaactgggtttgccataccctgaactcctaactgatgcatataatccactctggggttttcttttaaataaaggaggtgcacttttggtcttcttgtatggtagctgtttaccagttacagtcccttcttctccagaatcgagttgagatcttaaagtctgcatacaagtacaaactctttagtacttaaataaacttcaactacagttgcaaataagattaacaggtagcaaaatcatagtgataactaaagaacataattcatagaaggcaaaccattatattaaagttctctaaattcatcagaattttaatatttggaaccaacattttcaaaatcaagagtaagacaaagcaaaataataaaacaaaataagcttgccagaaagcaatgaatgaacatggaagaaaacagagaacaagtgttgaaatgacaagaatcttatctttcttctccagatctctcaacgtaaaaatgtagtagtaccctgccttattctacaaggtgatagtttatggtaaacacataactcagaactgtaaaataaaaacggaatgctgtggtcatggtctgattatatataatcagaataaatcaagaacagagaaaaaaggaacagtgaaatgtaagtttctcaagagctgtgaacagcatgtatatgaaatgccaactcacctcttttgtagaacagagactactagacgactgtaaagcactaaaatgatgaatacatgtaattttcttctgctactcaaactctagactatgttcactaaaaaaatgaaaatgtaaagaatggcttctgaaagagagctaatgctacagtggtatttttaaatttggggaccacagagtgttataatagatacttctcacagatgtccaggatttatgtggacatcagtatgtaatcgatcccactagcttaggaaatacatacttctcaacagtatttacgtaacttcatttatcagaatgtcaaatcaatgcaaattataaaaacttaccttatttgttttgtcatcctgaggtaataatgaaggaccaacagatatttttttcttcaaaatatcaaggtacattttatctatttgttcttccacagcatttgctcttggatagttattttctgtaacttcatttgttgccttttctaaaactacattctcttcatttttgtccaacaattggctcacagtttgtggttcttgagacacaacgtttgggttaatcttaaggggtaaagggctaacaaattcagtttctttattctcagcgagtttcttatagctataaaacaaaacaggacacagagaatgaaccctatataagtcctcaaatatcagttttaataatatgtgtatacacattatatataaacatatttacattaatatataacgttaaatatatttaatatttgtaaatgtttaaattaggttattaatgttaaagacattatttacaattctggttaagacagtaaacttatacagcatcacataattgttttaaaatgat

SEQ ID NO: 33241 - DNA, 1815 bp, Bovine  19866881278983
  misc_feature (1)..(1): n is a, c, g, or t
ntttctgactcttaatagacaatttcttagtcctatcacacacacaccacaccacacaaatactcactcataatcttcatctttgagaagaaaaaaataattggaagtgcccaagttacaaatggtagactggttatattcatacaatttaatctatcaactgttacacctggattaaaggtaaaaaatgaagtagtttctctgctctgattatgttctttgctatatttaaatcttctgtgtaagtaaactctagatttgacgtgagaagttattgcattaaaagtcttcaactcacacgcttagtttcaaacttaaattttttaactaggaaaaatggaagaagccagcatgctaatatcataaaaactgataattttggtaatacacattgaaaatctaggaaccacataatagagtaaacatttaaacttactgacagtaagttaaatcataatattttgatgatgtaaatattcagctttgctagtgcagaaaataacctatagtttttatcatgagttagggaagagaaaggacaaagaagaaatgaatctgtgctaattcaggcaaataaacagaaaaaatcccctaaactgagtcattttccaaagcagaaaatctaattcactgaaaaatacaagcgtggctccaatttcacacaagaaagctaaaacaaactatggtggctcacgactcaagccgaaatttatagcagggaggagagagttcatggaaagcctcaggaaattatagggaagaatacttgagcaatgttcattctaactatttctaaatacaggtcaactttgtttctcagtatcatttatttctaggacttagcttttatctggtttgctatgatttttcaatcactcagtcagtcagttcagtccctcagtcgtgtccgactctttgcaaccccatgaatcgcagcacgccaggcctccctgtccatcaccaactcccggagttcactcagattcacgtccatcgagtcagtgacgccatccagccatctcatcctctgttgtccccttctcctcctgccccccaatccctcccagcatcagagtctagacagccagataatttcagggcaacagattttaccttaataatatcttatttcattttcatggtcttttacctgttctcttctgatgtgctgcatctgctattattcctctctcttctgcctaccttataccatgcaattgagacctcctgctcttggaaaatgaatctatttgacctttcccacatatggcttacattttctttctctgccacctgcaaaaggtctggcacaataagtacccagtaatgatatctggaaagtccttcatgactttcttttttaagtcactttcaaaacattgcttgaaattcaccttcattcatggggagttgttcaaggtcagattgatctgtatctgatcacttaaggttaccttagaatatattcaagtttgcactaaataacttcctcttattggcctatgtcttgatataagtattctttaaccccatgtttatgtatgttctttcttccacctaggaaaataattctgatgtcatttatttgttacataccacaatacctaaaatagcattccacacacaataagtactcaaaatgcagctacctgatacttttctgaaaattaaaatattatctacaaatatatttttatagttttaaatatttaaagatggtaaactgaatatatgcagttagtgtcttctaacccttccctaaaataaaagcaaagatggtgtgtgaacgtgtgtgtgtatgtgtgagtgagtgag

SEQ ID NO: 33242 - DNA, 1008 bp, Bovine  19866881282620
  misc_feature (1)..(1): n is a, c, g, or t
ntttgaaccaaacacaccaatcaggcagcactgagaaaaggcaaagtagagagtaatcatcaagtgtttgtgactgactcctccattttactctgttggaattaaaggtaaaaagcccttaatttgggaacattataaatgccatgaaaccaacaactaacacagtaattgctttgacttccaaaatttcccccaacatttcaccctgaaaaatatcaagcatatagcaaagttaaaagaattttatggtcagcatcacctggattatatcattaacatttgctctctcatataactatccattggtccaaccgtcaatctacctgtcaatttatcttatttttatgcatttgaaagtaaattatagatattagttcataacctcctaaatatttcagcatgcatatctttagctggggatttacataaatccccatttacataacagggcacataaaccatgagatatttatatcaaagcatcccctccccatgaagataatttgtttcatagtaagtgtccaggtagcatattttccccaggcatttcagtaaataaccaaaatagaagacagaaatgttagtactcaggaaggagatggcaaacaatgggaggagatgaaacaagagccggtggaaaccagcaaagaactggaaaagaaaaaccatagaaataaggcaaatttggaggaaacgcaaatcaaatggacactgtaacaaaaaaaaaattctttgaaagttgaaaagaattggaaagaaaatgataaagaaacaggcaaaggaaatccaacagatagttgaaattaccaaagagagaaaaactacttaagtagtacgagaatgagagggacagaaacatactggtaaatatgatacaacccctgcaatatagagacatcgtataataattagtatatgtctagcagtataaatgtgatttaactattacacagtgaaatgggaagatgggcaaaaaaagtgggaagaaaaatccaatgatctgtaata

SEQ ID NO: 33243 - DNA, 1502 bp, Bovine  19866881285901
  misc_feature (1)..(1): n is a, c, g, or t
nacttatgattaccttgcttgggaattccgggatatcttcaaaggtgagggtccgtagtgaaggtctccagaatgcatatgactccacaagagcttccaaacccattctaaatggaagggtcaggacaggggacgaacacaagaagccaagttaggagcagttggagttttcactcgtaataagctgctcaggaaacaccactggagttgacagtgcctccctcattggcaggttaaaagcttggcacacacacacaccaaaaaaatggtctggagatgagctactattctgtcaccaagagcacagaggatagaaaccaccagcaggtcctgttaatattctctgaaaaatgagctgatctcaggggatacaaaagctggcccctgcgctaggaagacgacgtgaagcccatccatcctggccgccctgagtccaaggctctgtgtgatctggaagcaccctttttccctgacacatcactacccctctgatgaggagggctctgccacaaaagtgtgctcctgcaaagaggcatttctacccatcgttcagtgccttgactgccagccaagaagagcagtcatccaaggaaaattcacttctctctctgaggcatgatcaccacacccaggacagccagggagagctcagggcagcagccctgaattctcaacccagcctccaggaggaccacaacaaggttatctcatagggggctaaggtacacagacctagtattagcatcagacattatggtaaagcctctacatacacttaataaatggacacaaagagataggataacttcataatggactatccacataatatctataaattttaaaacatggctgactactctaaatacacacaaaaatgtatgtgtctcctaccgtaagtgattcagagtcttccttattgtatatcagataattaagtcctccaggtcctagaaatgagttccttcactcaactagcaccttctcaaggcctttccacttttccctcaaccatttgagccctaatcaatctgttaattcaggtaacattacgctttccatgaaacgcacagctttgctgaagaaaatgcctgattcctgagtgtcacactatacaaggccacctttttgagattgtcagatacagttttagtgaatgcagataatctgtgtttaatgcaaatttaaagacagtgagtatgattaacagcttagactccatgtgatagctgctgtagattccctgcatctccaagtcataacctatgaactaggactagagaaacacccccttcagagtcacacctcctatacaacatggtgaaaactcctgggagacccagagtaagtgacctgtgcatacagataaaaccatcttcccttacttgccctgggctgcactgagcatgaagaacagagtctggctttggatggaatcattgtgccccagagagaggactagttagttctcaggacactggattggggtcaggacaattgga

SEQ ID NO: 33244 - DNA, 1386 bp, Bovine  19866881297561
  misc_feature (1)..(1): n is a, c, g, or t
nccccgcgcctgaacggctaggaaacattatttaatgaaaaacaggaaagaagagtgacttgtcagtttggacttcgggtgaagggagatggttcaacacaggttcaagcactaagggtcctaatcacattcaatttatccctgaaccactattacactattaggagaaagactatttgagaaatatagggacaaaattgcaaaaacacttatttagatgtataacagtaaagttgaatagttaaacacatgtatggtaagggtgtcaacttctattaaaaaaaaaaaagcaatgataatttctcatttctatcaccaacctcaagcagtgaagttaagtacttccagatactttggcaatgatcttaaaaaaaaaaaaatcacattacagtcaaagtttattaaagtcacctacctcctgagttgctattttacgatttagttcagctactttggaagaagaattctcaactgcattttggcaaaggagtttctctacttccctctgatgagatgctttgagagatgtgatgtgtgctgcagtttcttccttgaacctttacagcaaattaaagaaaaccacacataaaagtggttcttcaacctctaattcagttagcctataaacagtataagaagcctggagagtaaagaagcaaacagagagaaggcaccacatctactgcactgtgctcggtgctttagccattactgcctaggaattcttacagtcactccatgagcttgctcttatttactcaattttataaaggcaaacttgagtgcaggaaagagtgatatgtctggggtcctaggtcagtaaattgtagagctggggtttgagtccagcagagctggacaccaccaccagcctggggcactttgagagaaacaaaggctctaaatgtctggatttacggcaaagagctcgttattttaccttttaagataaattcagatttatggtcccaattctttagattctcaaatgttttgtctctaggcaacactcaccagtttttggcccgcgcataacttcagggctagctccaggttgtgcgagtaaaatgatctttatggtaattcttaggacataaggtagtctgaacctaattggaccattaaatgtgagagactgctcatttgtctctgtgacaaaatttatgcattcagtggcagttcagtaaatggcaaagttatgactaaaaagcgggacatttcttacagataaacatttcctctattattcgaaagattattaaaaaatgacacaattttattgaaagtagatatttagcaatcactgttgatacttattaatacggcaattcccaaactataaacaaacatatcagttgcttatttgactatatgaatacttcttca

SEQ ID NO: 33245 - DNA, 4201 bp, Bovine  19866881306189
  misc_feature (1)..(1): n is a, c, g, or t
ncctgtcaagctcactatctactcttccctctcagataaacaggagatggaggctcccagcacattcttttcacactcacgaattcccgaagaccactctgcagtggcacacagagaatctcctgaagtctcactcaggtgttgcctcgggtagaaactaggaaaatattcttcctatcttctcatctgggatgctgtggacaaaccaatagccttatcagttaatattcaggactgggcattttacactcataagaaaccttatgtacaattcaagtaatgatatttaacgataagatatacgttggagggtcacacgcatatgaatcctattgctaaaatttctatcctgaaaccaaaaaaaagtacttatcctattctggaagtttaacatgattttttaaaatttgttattaccttttattggagtatggttgtttacgatgttgttagtttcttctgtacagcaaagtgaatcagctatgtgtatacatgtttgctgttgtttagttgctaagttatgttcaactcttctgcgactctatggactgtagtccaccaggctcctctgtccatgggatttcccaggcaagaatactggagtgggttgccttttctttctccaggggatcttctggacctggggatgggacttctgtctcctgtactggcaagcagattctttactactgagccttctgggaaggcccatgtatgtgtaggattttcaggcaagaatactggagtggattgccatttctttctcctatatatatatatatatatatatatcccctctttttttgatttccttcccatttaggtcaccactgagcattgagtggagtttcctgtgttatatagtaggttctcattaattatctattttatgcatagcagtgtatatgtcaatcccaatctcccaattcatctcaccccctttcccctccttgatatacatacatttgttctctgtgtctctaattctgttttgtaaataagataaaatgatgtttttagaagtaaatgaaattaaagagttaaaatctcccatctcacccaaattgattttagacaacttgccaacattgtcacattccatatggattcccccccttctgttgagttaaattctacactcagaatgctttcttaacaacatcaaaaaatcattctttaaattgatcatacaccttgattctcccttctctgaagtctcctgctaaagacaaggggaggcatacgtgcagaatggaggtaggtgtctgcttgcagcatctgcttttcccttcagaccttcccagcatctcagataagattcttttttgaaaccctctcacaccatttcgctcaccacagatcttctccatcttctccattttctcaatcatctgtttgttcttatcccatgtttgtgaacattctcctccttggccctcatctcatctgtgttgaaacttacccttacatcaaacatacccccttgaaatttctctcaacttctcaggattcacagatcaaaaccaacctcccaatcttcacctctctacccatcgtttcctcctgattctcttctttctgttcatggaaactattttcctagagcctcctctctagactctaaatgttagaactgtcttggaatgaacttctctcccactctatttgacctctaatcactatgtcctcaacgtccttctgattttcccttacattcatactgtctccaccgtcagtatggagaaagtccttcattatctctctcctaccctgttgtaagtgctttctggcaggtcttcccactttcaggctcttatttctcttcatctcacttgataggaacacagttcacttcctgatgcctggcactattcttaaccttgctctgctcaaatgcctctggtctcttcccattctccatgggaaaaaaatccaaagttttgttcctgacaggtgtgaccctctgaggctttttccccccaatctatgtaacacttcatttttcatcccattaaacctttttaacctacccccacccccgccacacacacactttttttttttttttagtttgagggaattccaagtacttaaagatatacagctctcaactttacttggccaaacttattctaagaaaaagcctctttccttctttgcgtgttgaaatcctacctacttttccatatccaaatgccatgaattaatccctgatttctccgagggaagagaatctttttatcttctattcttcacagtacttcgtacttccactgtggcacatactttgtacttgcacagcactatccttccatatagtaggaacggcttctttgaattgtagtaatttatttctccattcaataacatcttccacattgccaacttgaagcttacagtttgttcttgtatacagccacagtagccagtaaagagacatgaattcagtagagaatacttgggatgaacaaatgcatcacctaaacatgcaaatctcctcacatataaagaagattgcatggtccataaagcctcaatatttaaataaagtagcatttcttgcaatatgtgcctttttttctcattcaaatatgatgtggtgtatggatgagaaaagacgatgaagttaagaaacatgccttcagcaatcctgaataaaagaagtatatactcctaatctgatccattaaatggtgtgcttcattccactctgtagaaggcagaataatgactcctcaaagatgttcccgccctaattcccagaacctgtgaatatgttaggttatagtccaaagggacttaacagatgtgattaagtttgttaatcagatgaccttaaaatagggagatttatcctggattatctgtgtgggccaatgtggttacatgagttcttaaatgcagaaaatgtggattgtcagagtcattaggagagatatagtagaagaagaggtaggagagactcaaagtgtgaggagtcaacacacaattgctggctttgaagtagcaggaaaggggccatgagcatctagaagctgggaacagccctgatttgacaaccaggttgtagatcttcagtaatataatcacaaagaactgaattctgccaacaacaacctgaatgaacaaggaaattgattcttctctggagtttccaaaaagaaatgccatcttggtaaaacctagtttttagtcccatgagaactgtatcagacttctgacctacaaaactttgagataatacattgtgttactttaagccacagtttgtggacatttgttggaacagcaatagaaaactcctgtattctccaagtggttgttcagatacatttgatatacaatggttcgaattggttaaaactaagaatagagtgtgtatacttgttgagttagaagcctagaggcacacctgactattttttgatatggaaccacactaaagcattgtaagtaatacagcttattcagtatctcttttatccaatcactctttctacaagcattccatgaatacccatttctacactcacagtataatttttcttggagtttgtaaaattttataattaaatttcatcactagctatagaatggcaggcactcagtaaacagttaaagtttaagtgtgactctgtcactcaggctctctcctcttgaaattcttcattggtaaaatatgggtggtaatttatctaattgagaagtgaggtgaagtcactcagtcatgtccaactctttgcaaccccgtggactgtagcttaccaggctcttccatccatgggattctccaagcaagaatactggagtaggttgccatttccttctccaggggatcttcccaacccagggatcaaacacaggtctcccaaattgcaggcagatgctttaccctctgagccaccagggaaatctcattgaaagggtgatcttaaagacatatgtctaagcaatttaagaaaataggtcattattaatccccaaatattatttgtaagatctaaatcttgatcctttggtgccttgacttaagtatttgtctttgcactttctactagggtctctcatttcacactacagcttttgtaaaggactattattatctggtttctttctggctcaaaattctcaagtagctctccactgcctttaggctcaagtccagattcctcaatctggcatgcatagtctcacaacatgt

SEQ ID NO: 33246 - DNA, 991 bp, Bovine  19866881307806
  misc_feature (1)..(1): n is a, c, g, or t
ncaaggatgggattagacaggtgaaggagtgagactatcccctcaacaaagtcacaagaccctttggaggaattgttgcctacatagactagccaacctgcccttgtactttgcaggtaacattttcagaaaagaggtttcttttttttcagttggcctggtaagaacatttaaggagtaatgagtagctactgaagttaaccagggacatttttccacccagggaatttcccttctgttcaacatttggaaattcagctaaagataattgcaggtaagccttcaccaacagatgtattcattttccattgtagtttcttaaatgggtacttgtacacaaaagaccttcttcctgtatattttcagttctctagggtacaattacatgaaattattcagcagccaagtttgctttgtatcacttgactgggtaaggacacagagaaagctgctccctatggcactgaaagctgcaaatctattttgcctaaatgtttaacagccacattcatcacagtgtaataacaaggcctcccacagacaacatagttcacttgttttcaccctcctgttaagagtttaccagaaagaccaactcaggtcttgatgttgatttgatattacaaataactatgcatgggataaaatggattggtctaacataaattggtttttgttaccacctgcaactttccaacaccatctacaatttaagtgtttttgcatgatgcttacatttttgagtggcaaaatcttaaataagctacaaattttaaaacttttaaatttaaaaactataacacatcttacacttgaaaaacattttgctagctataaagcatacaggtgtgttgtacattatttcatttgtcccttagaatatatcagtagagtagacattattcttagtttaatgaaaagaccagaaaaatgtcttatttacctccggtctctttgaaaatagtaagcaaaactagtcaaagaatttatt

SEQ ID NO: 33247 - DNA, 1637 bp, Bovine  19866881658847
  misc_feature (1)..(1): n is a, c, g, or t
ncttgtagaagttctctcactgctacatttgtctagtcttatagaattgtcagtgaatgagcatgatgaaagaaatccagaaagcgtatttcttgagcttttcataatggggtaaagtgctggctttcaagttctcttactctttgcagtgtagtcatttcatataagttcaatttcaaatcatataatgttcgttttttttaatttaggaagaagaaaaaactggcatgctggctaatggtaaatattatctgtattcataaatttttgtagacagttggtctgttcagatctatatctaattctgaataaattactgtctgtttttaaataatttctgatgaattaaaatttacagattttcccaatatgttttttatgcttatcttaaattcttcctgttgtatttaaggatatatgttttttaaaaaccttggaccaaatgcctttatggataaattttaccaaacattcaaagattattaatgttaatcttccttaaactcttcctaaaaaaaaaaaaacagaaaaagagggaattttttcaaactcattaagtaaaacccagcatcaccttgatacaaaagctagacaaatattcctcaagaagactacagataagcaattatatttgcagtgacatcaaaaagaatacaaacttagggataaattttattaaggaggtaaattatgcctagaactataaaacatcggaaagaaattgaacactaaaataaatagaaaaatattctgtgctcatagattaaaagaattactactgttaaaatgtccatactatccaaagtgatctacagattcagtgaaattcctatcaaattccagtgacatggggagcacatgtatacctgtgatggattcattttgatattcggcaaaactaatacaattatataaagtttaaaaacaaaattaaaaaaaaataaaagaagcaaaaaaaaaaaaaaaattccagtgacatttttcacagaaaaaaaaaaattctaaagtttttatgaaaccacaaaggacttcacataaccaaagcaagcttgagaaggagcaaagcatggaggcatcacactccctgacttcaaaatgtattacaaaactatagtaaccaagacagcatggtactggtataaaaacagacataataccaatgaaacaaaaagtccatgcacctgtggtcacctggtcttcaacaagggtgccaagaatatcaaatgaggacagatagtctattcaatacttcatgtttagaaaactaggtgtccacatgcagaagaatgaaattggatccttatatcacatatgaaagtcgactcaaaatggatcaaagatttaagtataagatcagaaactgcttaaatgaaaagaaaaacataggaatatagctgcttgatgttatactgggcaataatcttttggatatgacccccaaatcacaagcaagaaaagtaaaatagctaaatgggattgaattaaactaaaaaagcttctacatacatagcaaaggaaaatagcagagtgaaaaggcagcttataaagtagggcaaaatatttatgaactgtatatttggtaaaggattaatacccacaacatacagaaaactcacgcaactcggtaacaataacaa

SEQ ID NO: 33248 - DNA, 1096 bp, Bovine  19866881692594
  misc_feature (1)..(1): n is a, c, g, or t
ntctatggactatagcctgccggctactctgtctgtgggattttccaggcaagaatactggagaggcttgcagtttcttcctccatgtgatcttcccaatctagggattgaacctgcatctcctgcattggcaggcagatgctttaccactcagccaccagcgatgccctacattcaagtaattactaaatccccctagattttaattcagaaatgttgcttgaatttgtctatttctgcacaccccatggatagctccttaggtgagatcttcatagtctctctccagttcatgctccaggccatcagcatacgtgttccttgacggggcggatgtgctgttaccactttctacttgacatcactccgtggctctcagtgatctagagcattacaacctaatttgctctgcagggatcaatttcctgtcatatcccttcagtcattctgagcttcttgctattctcttcctttattccaacatcaagcctagtacataggacctgacacaatgtactgcaatcttttgattacaggtctgtcttcatataataataaggatgataacttagctatcctatatcctgagaatttagtacaaatggctagcacatgttacagatttaagaaatatttgttaattaaatgaaacaaaagtccactctgccaaacagctctccaaagtatcttaaccatgttacattctcttcctcaatgtaggagggaattcattttcccacatgctagtcatcacttgttattgcttgtcctttattatggtctccttagtggtataaagtgatatcttattgtggttttaaattgcatatccctaatggttaatgacattgagtatctctttaagggcttactagccatttgtataccttctttgaagaaaaggagggaaacccaacttcattatcttgccggtgtatatctaatctatatttattgatagtattccccactgaattgctttgatacatttttataaaaccaattgaccataaatgtaagggttgtcaatgaattttcaaatctgttctattgatctatttgtctattctgtgtcaggacaacgctgtctttctca

SEQ ID NO: 33249 - DNA, 1027 bp, Bovine  19866881769644
  misc_feature (1)..(1): n is a, c, g, or t
nacacataaattggggattccagaattttcacatgttcttatataggacttttattgttgcagtgtgttattacaactgtttctttgccccagaaatatattaagaatatattaatatattaagaacacaacctgctctatcctccaccacatatataacctttttcaaaggcacagaggtaatttcagaatttatttctggtaagcctggggtgtgctcaggcattgtgatttgctaaattgcattgggcggcagaaccaagaaagccaaggcaaagctgggtaattgaaattgggacatgtcctgctggaacattcttgtccatgtaagtgcctgttaggaaggaagttaccatgaagtccagtatcagaaggtaggcaaatggggacttcctttggcagttcaaatgattaagaccccatgcttccaccgctaggggcatgggttcaatcactggtcaggaaactaagatcctgcatgcagcctggtgtagccaaaaaaaaaaaaaaaaaagtagacaaatggtccagaaactgaacacacagattttgggatgtggaaaccgatgataagcttaatttgggagcaattcaggtactagctggaaaaaccaaggagtgaaccaaaatgagcttaatagccaaaggacaaatggaagtgagaggtcaaagcaatagagccaatctttctctctcaaccagccaaatacctcatttcaatggatgacagtcaacgtttctgggcttcggttcttttcccccaacttgctcccccttttcttggcaagaaaaataagtcttctctatgacgatgtagttggcaattgggagtgggcaggcaacatctcatggggacctttcagaagattatccattttaaaaaattattctcaaattgctccatccatttcaaggagtgaagagtcatttgggaatgtatttgatcatcaggatttttttttcccctggtgctttgtgtttaggatgaataaaagttcatggaaaatgtattaaggttgacagtgca

SEQ ID NO: 33250 - DNA, 682 bp, Bovine  19866881785744
  misc_feature (1)..(1): n is a, c, g, or t
nctaagttgtgtctgactcttctgcaaccccatggactgtagcctgccaggctcctcctctgtgcatgggatttcccaggcaagaatactggagtgagttgccatttcccttctctagaggatcttccccgacacaggggatgaacctgccatctcctgcattagcagaaggattcttgaccactgagccactagggaagcatattacagttgaataaattatggatacttgatcaatttccatcatacgatggaatacagaccagaaaatgcctttgcagaatatttcatgacatacaaaattgatcacataatatactgtaataccaatactgtcagaataatacggaaataggtactacatgaatcaaagtggatagaataaaccaaatattaagagtatatatttagggttgatgggaccgacttttatcactttcttttgtatttccctgtgtttctaagtttgctaccatgaatatatatgtgataatcagaaaaaaattgttttaaatagttcttttttaagttgtggtgtttaaaatgggttaaacttcagttatgctaaaagttcatatttagggaacagctcatttttcaacaatgcctgataaatgaggcagtgcagttcttgtatcaaaaaagcagattaatataataagcaataaatcaaacttagagc

SEQ ID NO: 33251 - DNA, 1378 bp, Bovine  19866881902346
  misc_feature (1)..(1): n is a, c, g, or t
naaggagaaaaggatgaaatcctagagtcttacaggtgagaaatggattaggaatctgctactaatacctttgattccagatttcagtcctgagttctttctcctgatatatctgcaacctctcaaaacagacagaagtgaattatatggttgggctctggctgtgaagggacaggcactggagggtatagtacaaccttgtggcctaggctactgtgatgtagcctctgacttcccatgacagagctggcaggagacaggccaggaagagtgcctggtgatgtccactcagcaggagcacatgacaggcaggcctctggagatgtgtttgcaggtattaagtaatatgatcttacaaagctgggccagcaagtatttcatatgactgatttcgatcacatctaatcaaactgtttaaacttgggaaaagtgaggtcatactgccatttgctagccctttcactagtctaaagaaataatggggaaaaaacaaacaaacaaacaaacaaaccccaaaactgatcataaaatgataaaccaggcttctctggtgcctcagtgatgaagacctgccaatgcaggagacacaggtttgatcctagcccagaaggtcccacaggccatggagcagctgggtccatgcaccacaactactgagcctgtgctctagagcccgggagccataactacggagcccatgtggcacaactgctaaagcccacatgccctggagtccatgctccacagcaagagaagacaccacaagaagaagcctatgcactgcaggctagagagtagcccccactcaccacaactaagagaaagtccacagaggaacaaagacccagcacagctaaaaataagtaaataaatctttaaaatgacaaaccaaaatgacagtagcagataaaatattatagtttatcaagactctacaaccagttatgactatactgtaacaaaagttgtttccatgaatatagaataagttacttaccaacatgtacaaggtatgaataatccttgataactgtctcggctctaaaggaatcatcccgatgatcaactattactgaatctaagttgatatccttaaacagaaatagaaaaggaaaataaacttttttctaaactctatcattatacatttaagctgatcagtggaagttcacatggtaattatttacagagcccacaagctaaacccacattactcctgtttttcgctctctcataccacgttcttctccttcaaagcatacatcataattttaactacatatgtgtctatgcttaatgtctaccttacgcattcatctgtaaactctaagcataagggactgtctaacacaactaagctcagcttatcaaaaagaaa

SEQ ID NO: 33252 - DNA, 1021 bp, Bovine  19866881963588
  misc_feature (1)..(1): n is a, c, g, or t
naatttttttttgcttatgtggcacccaaagtgattaatgtaaccaaacttgtgcaaaggattttcagcacttgactgggatattttaagtatgtcagctgtttcccgcatggtataacatatattattatcaattaatttctcgatttgatcactatcaacttcaactgggctccctgaccatgtagcatcatccagcgagaaaactccagcacaaaatttcacaaaccacttttgaaaagtttgatcagtcacgacaccttccccattcactgcacaaatctttttttatgtttcagtagcatttttacctttcttgaaataaaaaagtatgatacaccaaatatgttgctttttcttccatcttcagtattaaaatggatatgcaacaattcaccagttttggtaaggtttttttttttaatgcaccctgatatgccagctgtcacaatataatctaacaaaactttttctaatgaagttaaagacaactaagctctactagagccatttttgggaaaaaatcaaatgaaccttttggccaactcaatataaatgtgtaaggaaaataatattaatagtgaattttaagtttgcattgattttcatattaaataactttatatatgttatataattgagactctgtatttctgcattatcagattattttacattcaaataatttataattacttagttttagatggtgaataatataggtatatttatatgttatgtttaatggtaaattgatttaaggtgatttaataagatactctgacagtgtattaatgtcattgcatttggaagattttaatagatctgttgattttggtatcactgtctgttaataacagtaaaaaaaacaaataccattgtcttaatggtaaagaactcattattgatcctgtctagcacatgcttatacctctcccagaacttttcctagtcacattttacaatggaaaaattgcttccttgcccgtttcctgcattatagctagtatatggatactgc

SEQ ID NO: 33253 - DNA, 1280 bp, Bovine  19866882030316
  misc_feature (1)..(1): n is a, c, g, or t
nctcagctttacaacggggataatagtctttgccggctcgcccaccatgtggtggcgggataatatatattccggctgggagagacttgtcaactatcccgccgggtggcagttcacagccctcccagattggagggtggtggagtgagggggttacaggtcccggcctgcgacctcccagtagaaggggctagtggtcatttagtgtcctggccacgcttcaggccaggacacgtgatgcccttggggaccgctgggccgcactgtccctgagccctgcctagagcagagcagccttgctggaaccctatactaggctcttggtcgacctcaccatctcgccatgggcagctgccgcagcgggagactcctggctggaacagaaactgagcgtcacccaaaacccaggttgaaaggggacccctctaggttgtcctgaactgtcctgggtctcattggaaaatcaatgcccagagaagagattggcctctgatggtcaaacctcctgggagagtctcaactgaagacatccccaaactttttacaaagctataaaactatttagaagaaaaagcagctacatggatggagggagacagttgagaaaaacaaggtaaatataaagaggaacttaaaaggagtattaatgtgtattttctttgcacctgaatttaggttaaccccatagttttaatgctttaaaccaaagaaccctcctacaaaagacttagatatgtccaactaggccctgggcctgctagcatagttcccaggccagttgcagtgacctgttaccattatcagtacccaagatacagatggtggaggaatgagcttctcgttgtcatttacgtttaaaactgcagggcactccactgatgaactttcttgacttctctcattagtgaggtattcttgggttttgttgttgttgttgttctgttgtttaaaaaggcacatttcactaatttaaaagtaggttagattgtttcaaactgtcacgtcttgaatcacataacacaccaataaatgaatacaaaataacctgtatatggggtagtaagctaagatgactatgggctctccgatgcatagttatttctaacaagacttcatttgaaaaaatgaaaaacattctggggcagttacagttacattagaacatgttgtggaaataagcttgcagttagagaaaaaattattagaaacagctgtgatgttaatgtttcaaaacccagagtattcaatatgctcagtatctacttttcatcatctttttt

SEQ ID NO: 33254 - DNA, 841 bp, Bovine  19866880513816
  misc_feature (1)..(1): n is a, c, g, or t
nactatatgtaagaagtgcatgggaggaggttggggtccccagtgaatctaggtgggtgggcactcacaaatttgagcaggaaggtgttctcccggagggccccaatgcagccggcaaagcccagcacggacatgacgcctccaaccaccacaaacagccacacagggtcaaggcctcccagatctgtcagtgccgagatgttggagagaacgccctgtgcagggggagcagaggcaagtagagggggactggccctcccaccatctcagcccatagcagccctgcaccatatcccactgccttaccttctcactccaggcccagagaccgatggccaggaacagggcccccagcacctgcaagagcagcagcaaaaagctgaaggctgaggcaccaacattctttcccatccccagcagagccccctccctgctggtgctcaggctcttcaggaagccacagggaaagagagaaagaggggaaagcgctgtaaatgggatccagggtcttctccatctttctaagactgcatctcagtgtttcttcccacagggcacagcttgaacactgaaccctccccagccctaagaagggatcccttcttggaacttcagaattggagcagaggagggccaaaacagtcccaccaagcagcagcgactggttcctgagcctcttccctcacctcaggcctatggtaggattccaggctcctggcatcctctccagtatcctcccaagtctggtcctcctgcttccctgcaattctgtgactgccactctactcccgtcccacctttccaacctccatctgccagagtacatcttggcagctcatag

SEQ ID NO: 33255 - DNA, 3504 bp, Bovine  19866880702054
  misc_feature (1)..(1): n is a, c, g, or t
nctacccatcactaccctctacacaccaccaccaaaagtgacattccactcaacattacccagcatcctgcctttccattccccaccactgagctccgccctgaacacaagacctcccaccagctcagcatcactcagaagttccaaatgtcattcaaactctgattgtcacctccactcatggttggcactgctgtcacccactgtgacactgtgtaccatggtcggtgctctgctggtcactcgccacctcccctccccagtgatcccccatcatcacttccgcccaccctgcctatgatctgggtgcacctgccttgtctgggtcatagaccaccatggtgaggtcctcaatggggatgcgcgtggaggcgtgctcatccacgtagccagtgaagttgacttgagtctcgttgggagtgaatgcgcagtcttggaggctgcagttgtaaaactcaggtacatggtcattgacgtctgtcactctcagcgtgacccatatgctcgccttggcctcctgcccgtggatgttggggtgcgtctcggtagcctgagagcagagttgaagccggaaggcagaggtcagagaaccagcattctgagagagctgagatcaaaggtcaaagtgggggtgcagagagtgggggtgcagagagcgggggtgcaaagagggcagtggccccctcactcaccgtgacctgcacttgcacttcctcatcctcctctagcagttgctctctgtccaggggactgttgactgtgatcaccccatcttgcttgccaatatcaaaccagccaggccttgtggaatctgggaagaagcagcaggagcagctccttccggtggctctgacggaactccccaccccttcccttgccccagccccagcctggggacatcccgttctcactggagatgctgtagatcacagggtcattgatgcctctgtcaccatccatggcctccaccttcagcaccgaggttccctgcagggaggcacggtcagtagccagaccctttccctaccactcagctccccccaggccctcccccaggtgcccagcatacctggggtgtatcctcagccacggaggctgagtaaaactccctaacaaactgggggtccaggtctggcttgtcgattacagagatggacacgaagacagacgaggagcactggatgacggtgtgattgttgtacaggccgcccgagtcctgccgggagacaggtctccatgaatctgggccttcgggtccccatgcccccagctcccaccagcgcccctactcacacaggccctcagctccagctgatagaaggaactcttgctgctgtagtcgaggctgccattgaggatgatggaaccattggggtaggatcctgaaagaggtactcactgccttccgtggcaggaatgacctgaggcatagcacagtcaggccaggctgccccaggatggctctgcccctaggacctgctctcagaggccctggggtcgaatcctggctttgctcttgacctcaccaggtcacataacctctctgattctcagcttctgcctctgggaaatgggcaagatactgcctcagcactccaggtgaaagggtggggagaagggttcagtctgcagcagatacccttcttaggcgactggaccgaatggggccagagggggccagagggggccagaggatggtgtggggaccagggctgggccatggcagagctcctgggctggaaggtccctgcaggttgtgtgggagatgctgccccctggtggccacgaggagcggcagcgcccacactcccacgtggaccatacactctcaccttttctatggagtatatcaccgcgccggccgagcctgtgtctttgtccgtggcctgcacagataacaccagggagcccaccggcaaggtctgtaacaaaagaaagtgaaagtgaagtctctcagtcgtgtccgactctttgtgaccccgtggactgaggctcctccatccatgggattctcaagaatactggagtgggttgccatttccttctccaggggatcttcccgacccagaaattgaacccaggcctcctgcattgcaggcagatgctttaacctctgagccaccagggaagcccctctaatacaaaaggtttcatcaactctgagttccaatccattttcttcatgcccaagcacatgcccccacctggagttccagggcccacagccctaccacggggatagtgacagaccttccagaacctgaagcccagtgttccacaggtggcccccttttcttcgcccgggctgggcctcttggggcatctgtacatcggcaggaagcagagttcccacttctcctctccctgatggagcccccttgccacatgaactagcttctgatttgctgagcccctcagggccagtataaatgatcattccagaactcaggttttgccactcccctgcttaaacttccctgtgggttctctgtagcctccagcccaggttgcagacagtactcttcagagctgaaagtttctttcagatgcctttgccccaggacctggccacacactcactaattccacaaggtggccagagagatctctgaaaatcctgaaccagaccacatcactctcaggtcaggtccacctctctgacctcacctgtttctcacactccaccttccatccacagcagctttctagctatgcctacaacactccaggctgattcacacctcacagcagttgctattccctgcctggaaaatccttttcctggagcagcccagggaggctccttgacatttagttctgctcaggtgtcacccacccagagaagactttcctgactggctcaacctaaaagcaaccccttatgctcttcattgagcacaacacctctgaaataatcctatctgcttaatgttttgttcattagtgtctgtgatcttcactacaatgtgagctactgagggtggcaaccaagtctatcatcgccagatatcttcagcaccaaggacagtgccagacacatagtaggcattcagtagagcctgttgaaggtctgtctggatctcaccagcctcttgtctggcctggggggtagggcacacctctcaggtctttgaatccacgtagcaatgaagactcaggagtgttgtgtttcctgcttgtggacgactggagaacctcctccctgcccatgcagttcaagtcaggctgtcatccttgctaaaggggaaggcctatgatgcagactttgacaactggagcattccacacccctcaactgcatgcatgctaggttgcttcagtcatgtctgactctttgtgaccccatggactatagcccaacaggctcctctgtccacaggattttccaggccagaatactagagtgggttgccatttccttctccaggcgatcttcccgacccagagatcaaacctgtgtctcttacatctcctgcattgcaggggattctttaccactagagc

SEQ ID NO: 33256 - DNA, 2133 bp, Bovine  19866880845209
  misc_feature (1)..(1): n is a, c, g, or t
nttggggtaggggccttatcccatgcctgtggccagggctctgcagtgaaattagggattgtgtgaaggtcacctcccctggacagctccactggctaagcaagtagcactcttgtgcaaattatgacaaggaagccccttcctctgggaccgggtttatagcttatcaagcagattgcccttgtgcagtgcactgcctttgcaactatatgtggcagccctatttaggcctgtctctgcccagccaacgataggcttctgggcacatgcagaagggaagtgccagtacaggtatagggtcaaagacaaggaccagatcaaacgtgggtcacggacagggttgagagatattccattcagatttctatcagggactaggctcccaagccctgttcttccccacaagccacccgccccctggctcctgagacctactccttaatcttttccgagttggcgcccacctcctccttgttcagtgagaactgcagcctcacgcggtaactctggtccacggtaaatagctatgggagggggacatggggaagatgagatgcaagggaccctggagtggcagagggcactgggaactgagacagaacctaacactcacgtttagggtgattctggcttcctgggcaggaccctcagaagggctgtcttgggccttgaccgtcacttggtaggtgccttggagagtggaatcaaggctggtcaccaggctacggaaggtaggagggcaccactcagttctgaaacccaggctgtagtcctctcagaacccccttggacccctcctaggatggggaactcactgccctgaggccccgcttggctcccccacccctgtccaggggctgcccgcagttactcaatgttgccagtgaacacgctggcctccgaggaagtggagacccggaagaagccctgaaaagggatcacgggccccatccttagcaatgaaatccacttgaaagatggagaacaggatggctgcgttgttccctgagtcgtcatctctggcctgggagcaagacagagtgaacaaattgtgggggctgggccaggccaggcacgcctccagccccagcaggaatctgaagctagggtagcctgggagcctggccctgccaatgacctcttttggccttccccaggccactgaccaagtgctttaaacaaacagtgtttgaatatgtccctgcttcaactcaacaggtcactgcccaagtctctcccaggtagaaggtcaccctgggaaggttccccctctcactgccacacacgcacaagcctagggacactcagttgtcctgagcacctactgtgtaccaagcaccttcccccagacccctcctttcagcactcgctaacaggagtatgaattcccccagcggaccatgaaatgaggcatttttattcattctagtgcctttcggagaagaatacgaccaacacacagagccgtgaggccactgatgtcactgttcaggatgaggctaaagctggtgttgacgtttcaaaagggagttgatttaaagaaaattgttcaaagccagggccacactcctgacgttggaatgaacgtcttcagccagggctgaagattggaaaactgaccctttgagcctagaaagaacctagagaggaagaattgcatgagtgctaagtggcttcagtcgtgtccaactctgcgactccatggaccgtagcccaccaggctcctctgtccatgggattctccaggcaagagtactggagtgggttgccatgcctgcctccaggggatcttcccaacccagggatcaaacccacatctttatgtctcctgcattggcaggcgggttctttaccactagcgccacctgggaaggcccagaaagagagaattactattccccttttatgggaggacacttggggttctgacagagacctgtcttccccagggcacactcggctgtaagtgggggagggccagacccatccatctccacacccatgccctttccataactcaaggagggccacccacatataaaacgcctgaaccctaaggagtcactgccaagagctgacagcttcttgtctggaagggaaagtgagttcttaaaaggcacaacagctccccag

SEQ ID NO: 33257 - DNA, 713 bp, Bovine  19866880852857
  misc_feature (1)..(1): n is a, c, g, or t
ncaggaagcttatggtctcaggaactactgaatgttctcacagggagtcctggatccccctattcctgaagatagactgccacatgagccaacatattcccttgtttgctgaagccaacttgagagaagcctagctttttctcagtcgctacgaaataaagcctcttccatcccacccaatcaccagctcatttaaaattgagagtcctttctcataagtgcccccgcctggctccagggtaggaatttccatctctagcaagctccatcaccccagcagaagcaggcactgggttgtcacgtgtggcccggctctgctgctccatctaccgagaagctgcacacattcaccttgctattaagtattgccaggagccagcctcctcttagctctgggccctgatgcagccgggctcagagctgcattaaataaagactgcagccctgaaactgttcaaatggatctacatcaacgaggacagcgagggcatgcctttaaatagattatcaccaagagtcagccagggcaggcaaagtttgccttcagatcatcctcccctcgttcctgcatccctcctctgtctacttttagcggactttgccccatatcccgtcagaaattaattcacactgtagtggcttaatgtgttactcctctagatttcagagaggaacagcacacaggagtgggcagtgtttaacctaaaggatgg

SEQ ID NO: 33258 - DNA, 1764 bp, Bovine  19866880972150
  misc_feature (1)..(1): n is a, c, g, or t
nttacggggccttagctagagaaccggggccgcagctaccaaggcaggcctgcaggtgccgcactggagagagcagcccgcaccacaacgaaggcccagagcagccaggatggtaacagacagattttaaatttgttttaaacattgagtgattcagacttttaaaatcactaacccctcccactaaaacagtccagggaaggatcaatgacttcactaacccagaaattaccacccggtaaagaacccaggactcactaaatgttgcactgaatattctcataactaagttcaagttgccttgaaatcaggctggtgtcttttttgctttgactttcattcctcccaatctcctacctcctcctcaccaataaaaggggtgagtttaagtcattttggtacaagaacttttctgaattttgatttgatacataagaaagtgacaaatttgtcatacccttaagtgcaataagggtactctttcaagttagatgctgggttcacaccctgggtgggttaataagatacaatttaatgtgataataagataatactaatcatttactaggattatattaataagataatagattggcatcatttaaatagtaagtctaaatggcagagagtaactactaacatctggtccagaaaaagtggtttctgtctagtttaaaaccttaaagggtaaaacataactttatcaaaaagaactaagtttaccaggcacttctggttgtctcgaagccattgaaagactgggatccaggcgcttttcctacacagactttgagctgagttccccgccacctagtaaaaataacaaagggtgttttcttacagcgagcaccaaagactagccccaatgctgttcttccaacaggcacagagctttatggctttaacacgtcaaagagccgatgagcgacaaacatgccaagggagaaaaaaaaggataaagtcaaaggattcagcgtaccgtcactgatcttaacacccgtgatatgacaaagacactatgcacagtgaaaaggtccccttaccagagagagatgatgtgacgattatgcctacaggcaggtattaatgaggaacatcgtccagctgctgcaaattagcaaagctgctcaggaagagtccatccatcccagaggttctgagaacaacaaacaaccagcgttggcacagccctgcagagtctgccaaacatctccctgtgtttcatgtctttgccataacaacctaaaaagagatactatactcatttcagttttcagtaaattagggctcagggtcaaaataacctgacccacggcaaggggctagggatcaagtcaataaattcattccttgttgctagtactgaccgacattcagacaacgcttatctcgtgttttaaccctcgcagcagtccattgtttattcacactttagaagaaacgaaaaaggagaagtgacttgtccaaggtcacagataagtggcccatcttgtaaggcagatttcagccccatttcaccgagcagttcaaacaaagctctgagggagccgttatttgctttcaacttgtcaactgcccccgacccacccccccccgcatcctgatgaagctcagacggcaaagtaaagagcatcgcagaagccaaagttccgtcaacctcggagcccagggagcgttccgacaaggccacctcccctttcacttcccggggcccggccctccccgcggcccgcagagcgctgacttctcctttaccagatgcaa

SEQ ID NO: 33259 - DNA, 1766 bp, Bovine  19866881007364
  misc_feature (1)..(1): n is a, c, g, or t
ntcgactatgaggcctgtgacttggtcacgctggtcgtgcgggcctatgacctcacaacagacccccgcttccaggcctacagtgacaatggtgaggcagcctggcctgcagggctcagcaggctgcaacacaggggctgtggggaaggactggaatttgtaaggtcggggttcaaatcctggctccagccccggccagctgtgcccctgggaaagtcacgacactgcccagaactttagttgccccatcggtcaagtggagttgggtagtaggttgcctatgaagagtacatgagaatatgtatggaaggcattgagtgcagtgcttggcatgctgttgttgtccagttgcccagtcgtgtctgactctttgcgaccccatggactgcagcatgccaggcctccctctccctaaccatctcccccaaatttgcccaagttcatgtccattgcgttggtaatgccatccagccatctcatcctctgactccctcttctcctcctgccttcaatcgttcccagcatcagggtcttttctaatgagttggctgttcacatcagatgaacaaaatactggagcttcagcttcagcatcagtccttccaatgagtattcagggttgatttcctttaagatcgactggtttgatctccgtgttgtccaagggactttagcacttaatgctgtgatgctgagaggcagtgtaaagagacttcagagccacgtgtgtgctcagatcccacgtctgacaccaagtagcaataacagtcacatcaacagccagcatatattgaatccttactacagcccagcctatgctaggcaccttgcaagcatttcaccattttactcccacacaatccatgtggtaggtgatccctagccaattttatagatgaggaaactgaggtacagaacgggcagttcaataatgtagcttacacagctaaccagggccagaataatgttgtggccaggtgggacatacctgggctgggctcagtcctggcccagtggtctcactgtgtgactttggacaagttgcttatcctctctgaggtctggggagaatgctccctcctacacaggccagaggagactgagttagtaggggaggggtctgaccgtgggtgatgcatgggagggaggctgctgggaacaagcctgaggaccaggctttgtgggtcaagtcttgcttagagaccaaagccagccaatcttttccctctaggaagcctccccatcaccatcgaggatgtgaatgacaacgcgccttattttctgcctgaggataagacttttggtaagctgcaagcccctccctccccacccacactgtactctgccagaacttacctttgggcaactcccacagatgctgctcagaccccaggtgtgcctctggaaagggaggaaggcctccagccctgtctctctctcagggattcaacaggaggagagacccgagttttcactctatctctgtcccaactcacatctgaccctgggcccggccctccttctctggcctcagtttccccatctgcacaatggggggtggaggacctgctaactagcggctcaggggtagctgtaatgggggtctggcagtagagagcttaagggcaggtttggagggatgcgccccgagctgggcttattatggtcagcagttggcccagggggcactggccctgatgccactgacctcttcctgtctacacttgcagtgatcatcccagaactcgtcatgcccaaccagcagg

SEQ ID NO: 33260 - DNA, 818 bp, Bovine  19866881111834
  misc_feature (1)..(1): n is a, c, g, or t
nccctggctcagacacctatgagcacagcttgctgcccacaaaggtcccctccccccagcagctgtaggccccggcccagctgggggcggccctgggatttggctgggtgactcaggctgaatcatggcccagctgctccttggcagccctctcccctactctgcccagagagcctattttgaaggcagagatgggccttgtgtggagggcaggaagcatgggcacttgagaaggaggaatcaggcacaagaaggcctctgtgcccacttctactcctcagtggtctgcaggcacacaggcagcccctgcccatgcccctcgttctcccagaaagagaacccttttgcctggacatgagcatgggtctccctctctgattccaggacccacgttggcgcccttgtcccactttttggctttcataacaacgataactatatttactattctaatggattactcacatgttacagtattccacagttttcaaagcactttctcatcagtattgcatttaattttcttattagttctagagtggactaatagcatccttaggagtggaaattagtatccttaggtttgagcttatgtgaactgtttaaggtcacacagtgggtaaagtgacagagccaggaaccaaattttaggcttcttggtccaacctgtgaaaggtaagcattaaggctggagttgagctgcagttgggcgtgggggggggggcgtggcatgagtatatggggcatggcagggccatggtggggccatggctggggcatcaaaagtagcacaggggcgtggcaagatagggggtatg

SEQ ID NO: 33261 - DNA, 838 bp, Bovine  19866881125083
  misc_feature (1)..(1): n is a, c, g, or t
ngaaggctgtggaagcaagggatatgggcaggggagggggcctccaggtctggggaccttggctttggaggacaactaggagaccagggcacagcaaagatgtgaaagaaaggccattgtcctttctttctgtccaagaaaggcttgggcagcagggagagaggtgggaggtagggccggagtgagggcccacgtgtacagggcctcaaatgtgagggctgggaagacatgggctatgggagccactgaagatttgtgaacaggaggagtaacaggataagggctgagtgttagaaagggccccctcctcgggtggatggaggatccccgctctcctctctgggccgtggagagttgctgagccttccagaactgtgcttcctaacacgtctccagctggaggtactaatgctgatttctctttctctttaaccctctgcctgtctgtccatcttgccctgctgttctcccctcacctaacccccttccctcaaggatcgctgacaaagcattctaccagcagccagatgctgatatcatcggctacgtgtacgtgtctcctttgctcctttgctggggtccctgtgtgtggttggcagtttcttgagtctctcactggtggggtatgaatgagtgtggctgggcccgaggcagtgatcagagaaggaggtgagcctgcagggtggacacaagcaccagccttcatctccatccccccagcaaaggtgtactgagcatctttgagacagatttgccaaatccaagcagagacaaggaaagaatgctgtccatccccaggtgagagaggcaaagggccaagcagcccaactccccccac

SEQ ID NO: 33262 - DNA, 1057 bp, Bovine  19866881151428
  misc_feature (1)..(1): n is a, c, g, or t
nctcacagcccttaccctgcagcatgtcctaaggaaggtatctgactttgtgcacacatgggttgctgccaccacttgcctggggtaacatgtctgcacaaatgtgtgagacacagttcatccctccccatggcccacttctgctcacgcctgcctcagggcctttgcacgtgctgttcctcctgcctgaaatagacttcccacacggtgtgcctcatcacttgggtgtcagctctaatgtcaccttctcagagaagccctcccaactaaagtagccccctcaccccttgactctctatcccatcgctcttgttttcttcatagcacatatccctgtctgaaatcatcttgtgcactggttagctgtttactgtatcttttcccactacagagtcagctccgtgaatgtaggaacctatttgctgtggtaacccctagaacgatccctccctggcgtgaatacttgttgactgaaaagacgtgagggaacaatcagtgacatatgcagatgaggccaaaagcaggccagatcacactcacgagcaggatacatgtacccaatccagatttgggtcacagtcacggggagtgccatgcccgcacaaagccacatgcagactcatgccgagctgtgtctatctgggccgtgcagaatgttaggcgaggtggcttgtgccccaggctggctgggggagcagggagcctggcggcagatttatgggtgtagctggtatgtgtgtgtgtgtgtgtgtgtgttggaaggatagctcaccttcagatcagtggggaactcctccttcttcaccagacctgtggctgctgcaatgttcccagccccagagaacacggctcctcccaggtgtgatgcctgctccttggttttctcagccactgtgtcaaggagagggttgggggcaaaggtcaagcagacatagatgccctcctcctccatagtgtcccagggcctgacttcccacagagcactacaccccgcagaaagctctgggggtgccctctcccgccgccctctgccctcactctctggatgtctgcagac

SEQ ID NO: 33263 - DNA, 654 bp, Bovine  19866881245564
  misc_feature (1)..(1): n is a, c, g, or t
ntacagacacgaatgttgggagcaaaaattattctcccttatctgagctgcgttttctactagcttttattgtaaaaacaatataacatgaaagagactttgggaaaaaaagagggagaaaaatcacccacaattctccttggtgtaactgtttttgttttttgcaaatgcattgccttcaagccttttcctttaagtgtccacatgtttatatagctccaatcctagtgctcactgccgttaaaattccagctcaaagaccacttcccagggcagcttccttggaccccaagaaactccctcccactatgtcgctgcatttctcaccccctgagtgtcatgatttgttttcacatcatcgccggggaccaaactttctgggggcaggagttgcatcccctgagtgtctgtggcccaagcacagggcagggcgcgtgccagacacttctcgtggtctcactttcgcattctgtgctgtcactgtgcattggaacagacgccttgtcccctgtcgctcagtagttttcataacgatcatttttaacggctccagaatatttcatcaagtggatgtttcataatttagttaaccagtcccctactggggaacatttggggttgtttccatttctttttctatcacaaataatgccg

SEQ ID NO: 33264 - DNA, 836 bp, Bovine  19866881275797
  misc_feature (1)..(1): n is a, c, g, or t
naggtgacggatatggcaaagggcactgttccttcctctcctctcctacagagtgggggagccctcccactttgtgggagaggatgcagctaggggtccagaaagaggtcaaaggcctggggatggggggctggcctggtgtcttttctctgccccctttgagggatgacaggggtaggtcggtgatcagaagtcccctgcctctccctctctccagagggagactggtcattggctgggccatcccagccctgtttgagatggaggagacagggagattcatggccatcaggagaggcctaagtggcagctgctccccagagtaggccacaaagggcatatttgaggtcccacttagatgggggaggggactcaactccctgcctgtccacagtgagagcaccaagggccagtgtcctgatgggtgagtcccccagattcaggcccctccccacgccaagatgtcagagctgtgtccctctggaaggctcggggtcaccttgagctcctggcgaatgcctggctgaggtctggggaggggcagtcattctagactgatccttggagagggagctctggcccctgtaacccacccctaccgtagacctctccagccaggatggcagatgtgactctccgtgccccaccccagcagatccagcccagagcctgcagggagatacaccccgatttagaccctaccccctccttactggagcacagaccagatggagttgaggggctgttggtttttcccatatccgcatctttccagcccttctctccccttcccccaccaaaataaaaaagggggatgacgggcactgtcaggtagg

SEQ ID NO: 33265 - DNA, 3651 bp, Bovine  19866881339146
  misc_feature (1)..(1): n is a, c, g, or t
nactcactttattgcaatgttggctttatgtggtggtttggaatggaaactgcaatatctccaaggcacacctgtcatttcccaactcagggtcagctggtgagcaacccccagtgacaccagccacctggaattaggccaacttcacaagttaatgttgcagatctccacagataccagacgcaagttcaggggcccccaggttgccctcacgtctaaccaagtcagggattcacactacccccttagttgttacaatttgctggaatggctcagagaactcaggaaaatattatatttctgattacaaaaggatataattcagagcaaatcaaggggagagatacaggggatgaggtctaggggccccaaatgttaaacttccgtggtctctccccatattgtcaagaatgctttaccctcccagcacgacaacatgcaacagcacagagtatcgccagccaggaagccccctagagtttcagtgtgaagagttcttattgaggtttcattgcataggcatgactgaccaacttgactgaatcatcggtcatgtgactgaactcagtgtccagcttccttctccttgtggggctcaaagttacaactttcctaatcccatggctggtctttctggcaccatcagcctccgttttgagtcacctcattagcataaactatcaggtgtggtctaaggtgccgccatgaataacaaatacagtcctatccctccagaatttttgaggatatagaggttactgaggatagaggttatataggacatagaggtccccagaaacaagggaccgagggtcagccgagtctttattgcacacaaccttaatttcatccacaaccttaatttccctctgccatgtaaactaccatattcacaggttccaagaactaggacataaacatcttggggccactattccatctaccacagcttcccagttgctctctaacatgtcaccctgttttgttttccccattgcacctatccttctataaaacagtcttatttattttgtttgtttgcttactgtctgtctttctctctgctgtgagtctttggcacgtgactaagcaagaaagcagaagaattagaggaggttacactccagctgggtttgaaggatgagcagagtggtttatgggtagctggggctctgagcatctttgcaaagggacagaggagggaaggtcaggtgaatctaggagccctgaatggatcattgtaggtggggcactggggagtgttgtgggagggagaggaggtattgggatggaaaaaggccaggtaacacagaacaacatgtgctaggctacagacctgatggcacttctgggatctgctctagcctctttgctctctcacccagaggccaggagagaagcaccagggtgtggtaaatagggcagggactctggggtcagactatgtgggctcagatcccagttctactgttcataggccacctcttcatggtcatcactgaagatggctcactcagcactcctgtacaacccacttctattctgccctcctctatttggagcccagggagtttcccagtatctcttgtagtgagtgacacagatccagccaatgctggaagcagaatcctggtgaggggtgttctgggaatggaaaaggtccaataaaaaggagaatatattcaactagatcagaattttgccttctcctctccttcctgctttgaatgtcaagttgcatcaggaacaggagcagccactttgtgaccatgagaagcaagctaaaagtaaaggcctaagaaaaactgggcagaatgatggaaagttcctcagtttatcaggtcatcactgagcaactggatccgtgtcaatcatcacccacctctgtgtcttagttggatattctgttacttttggtcaaacatagtcctaattggtacacgcgtgaagcctccatttcctctactattaactagaaggaacaataattgtcaatattcattacacttaagtcatgtgccaggaactcctctaggtgctggtggcaaagcagggaacaagagataaggttcctattcttcttgcatttacattttggcaggcaagacagatgatgaactcataagtaggcaagaatatatatgagagtgagaagtgctatgaggaaaagaaaataacatgatgtgtcggagagactggtgtggacataacatgggaatatgtgagaaggtgatacctaagctgagacctgaatgtgaagataatggcaggacagagcacagggaacagcattccaggagagggaacagcaagagcaaagggcaaagacctggaggcagggccacgcttgatgtgtgggcagaccaggaggaaggccagatgactgggcggccgtgaatgacgaaggcaaagaatggaggtgagaccagagaggtaggtggggtctgatgacatatgctccaataggcagaatggatttattttaatcacaaaaaggaagccatcagagggctttcagacaagtgtgggacaatgacttgaccaccttgcactctgtaggtgcttaataaatgtctacggcctatagtaggtgcatcacttggtgggattcctgtcccttctcaggctcaaccagccccatccccaggctggttgtctcatacccccagctcctgagctggaccccctctgactgccttctgagttatcccagccctgtcttgtcctcccccggggccgtttgctccctccagagcgggcgagcataattgccactttccacaatgacataaaaatctaagaggcacaatcaatacagctcgcacacacatcatcgtctttcattgcaaacgataaaagtgtaaacagcaggggtggcagcagctctggaggctgcagtgggggcagggcaggctgccactgcctccctgcccatcactttccttttggggccccttctccacgctgggaggtgaggcccctcattaaagcccattctctttccaaatgcagcaacccaagcctctttaacctggctagagaaatccaatttttcttccctttcactattttaaacgctctttttttttttttttgcttccttgaactttctatgtctcccaaaatacagagctaagagtgccttcctggaggcagaaggacttgcctgggtcttgcttgtcacaaacccacgaactgacctcagtggggggaccagctctcaatggccggcttctttcactccgcattcagcctgccacccacagcttgtcttggaatgtgcacagaaatcattacattcccagctctcacagactcccggcaacgacttcttcaaactagttacttaatgaacgtcatccaattccgtttcagcctgccatactctcatttgtgaaagccaatccgctttacgattctaacctctggctagaaactgctcccaatttcatgtcatccataaacttgatgaacgattagcttgcttctctgcagtcattcatttatttattcaaccagcatttagtaagcacctactgggtgctgggcactggatacacagtgagaggacatgcaggtcctgtcctggagagacccccatgcttgtggcggagctaacgggaaatgttcattcagtagatccaccctcac

SEQ ID NO: 33266 - DNA, 1574 bp, Bovine  19866880195044
  misc_feature (1)..(1): n is a, c, g, or t
ntttccagtggtcatgtatggatgtgagagttggactgtgaagaaggctgagcaccgaagaattgatgcttttgaactgtggtgttggagaagactcttgagagtcccttggactgcaaggatatccaaccagtccattctgaaggagatcagccccgggatttctttggaaggaatgatgctaaagctgaaactccagtactttggccacctcatgcgaagagctgactcattggaaaagactctgatgctgggagggactggcggcaggaggagaaggggatgacagaggatgagatggctggatggcatcaccgactcgatggacgtgagtctcagtgaactccaggagtcggtgatgggcagggaggcctggcgtgctgtgattcatggggtcacaaagagtcggacacacctgagccactgaactgaactgacctgaaagacactaacttctccatccaagggccagtctttcctctacctctttcacatggtagacgtggagaggaaacaaaagatgtagacgtgttttgaagcctgtctatttcatcagcattttgcattctcttggaacacactgcacacctagttttttccacgatactgttctagcctgtacacccagtaaatgcttctcaactcggaggctgtaaatggactctcccagtgtttctctgtctgtggctatgcaccacctcccagtgagtcacccagtggacgagttaagaaagtaaattcctgagacacccgccccccatctggtgaattagaatctgtgtgtaagagtaaagtttcaagtggagaggccctggattctgactattctcaaatttctcagattattttgaagcagatgaaaagcagaaaaccagtggactaggctgacaatagtattgccagtcttctttgaaagctccctcgaaggaagaagtttaatactacttcccttgactggagaggcaagttcgaaacaggaaaacatccggcatcatagggtcttttgagatctatcttagagtgggcacgctacccaaagtagtacattttctgtaatcaatttcctaagaggggttacagctttctagttttagaattgtgtggataaaatatttggctgaataaaatattacctgccatgactgctaacagtcatgctgaatgtgggctgtgcaaaacgtccctgtggaaatagaaaactaggccagccctttctgggtgacaaaggccatgaataatgcacagagaatgcggtttcttttcatgtagtttgtactgtgctaatatttgtgaccactttagaaagtagaaagtgcagggaaaataggagaaggcataccttaaaatacatatcaagcaaaaaagtccaacaacttagatgttgctttctcatatagtgatatatgattacgggagagaatgacgaatacggtgatttctttgcagatcagatagtaagattagctcatataaggagagtttgcttggtatcaaagctgtgtattttacatttttatctcatgaaacctcattagtttgccatttactgtaacaccttttaataaagttaaata

SEQ ID NO: 33267 - DNA, 1894 bp, Bovine  19866880216519
  misc_feature (1)..(1): n is a, c, g, or t
nccttgactagacgaacctagttggcaaagtaatgtctctgcttttgaatatgctatctaggttggtcataactttccttccaaggagtaagcgtcttttaatttcatggctgcagtcaccatctgtagtgattttggagcccccaaaaataaagtctgccactgtttccactgtttccccatctatttcccatgaagtgatgggaccggatgccatgatcttcgttttctgaatgttgagcgttaggccaactttttcactctccactttcaccttcatcaagaggctttttagtttctcttcactttctgccataagggtggtgtcatctgcatatctgaggttattgatatttctcctggcaatcttgattccagcttgtgtttcttccagtccagcgtttctcatgatgtactctgcatagaagttaaataaacagggtgacaatatacagggtaacaatttactcttctactccttgcattatttcctcttcaaaatttttccctttttctgttgtttgtcctgatccttcatgttggatgctatcttgctgtactcaaaagtctggtgaccatctgttccattgaagagtaagacttgttcatcctttttttgtcattgtggctatcctccatgtctgctgcctctgtgatgaaagcaactcctctcactttcttccaaattatgagccttctattctgaagtgggagatggggtccagactttcaaccaatttcactacatttagcctctgtttgtccctcctaccctctcctaatggcccctggtgtctttgagtctgggacttctctggagtcctggggaaaagccaattattattgtattactcattatttattgctttgcactcatgagtcaggtaatgcaataaaacttatctatttttctgtcctaatctgtgctgggtacttcttgtgcttccaccatcaaactttgagactttggataactgctgagcactgattgccttatcccttcaccctacaggcagctgcagaaaaaaatgctttgatgcttcacatagaggactagagggctgccggtgtgatgcgggctgtaaaggccgaggcgactgctgctgggactttgaagacacctgtgtgcaatcaagtacgaactctgagagcaagtttattagcatgttggttgtgtgatcattaatgcatatgcaaatacttgccagacacttgtgtgttaatagtttgcttggactgacgtaacaaagtcccacatactgagtggtttaagccacagaaattctggaaactagaagtccaagttctaagtgttggcagggttggttcattccaagattgtgagggagaatccgttccttgcctctttctaggttttggtaagttgctggctatcctcggtgttccttggcttgtggcagcaaaactcaaaaatctgcccttatctccagatgcccatctccccgtttcttcacagtcttccctctgcatgtgttcatgtctaaatttcctcttgttacaagaagaataccagtcacactgggttgggacccatgctaatgacctcattttaatttgtctgcaaagaaccttttctaaataaggtcacattcgtagtcatgggggaagagagttaagacttcagcattttggggaagggacacaattcagcccataacaccttgtattcaggatctagcattaccctgtcctctttttcagtattctaaagatagaattcacactttgtttagttgaggttgaggaataacagtctccagcagataaaatactgtcaaattatacacatttcaaaggcaagttttcctatggcttgtcatcttgtttaatttcatttttagggttctggagagcataagactcctatagaaag

SEQ ID NO: 33268 - DNA, 1558 bp, Bovine  19866880342191
  misc_feature (1)..(1): n is a, c, g, or t
natcctctattatgctgctgctgctgctgccaagtcgcttcagtcgtgtctgactctgtgcgaccccatagatggcagcccaccaggctccgccgtccctgggattctccaggcaagaacactggagtgggttgccatttccttctccaatgcgtgaaagtgaaaagtgaaagtgaagtcgctcagtcgtgtccgactcttagtgaccccatggactgcagcccaccaggctcctccgtccatgggattttccaggcaagagtactggagtggggtgccattgccttctctatattgggcccttattaccaagcttattgcatcatctgtatagtatatttgattttatatgcttttctccaactcagcaaagccccatttgcagcaaaaatcactccttatttatctctataatcccagtagctaggacactgcttcatgctttgttgaatgagtgtgttcagtggaagagctcagatccttctcgtctattgatgcagtctaagtattcagtggaatcactcgaatcacgagaataaaaacatttggagaaaagcagtgatggaaaaatataaacatcttgagtattttgactgtgtgtccttgccctccatctaaagttttataatttgaagcaaagctgaattttataattaattcttaaaggaattttaagaaagaaaatgctaaatagactgaagaataatttcacatggcacatggtagaaaaagtccttgtctggaaaccatgacgcttggtttttgtcttgttttggccactgtctagcaatgaatgaatgaattgacaaacacaacacatttctaggcttgattcatcatctaagaagaaaggatctggattaggtgactctaaccctatttcacctctcttaattaactatgaaaacactctgatgtgtccacataaaattgataagtatattattttataattttgttttctcataattcttggtcgctaaattttcactaaaattacctaactcaagtctgttaaaggcttttctgtatcagaggggaaaaaatgaagactttacagggtctccttctaaattctctaaggtagttccctctgtccaggacaggaacctaaggccttcagcttagatatgtgtgaaatagatcaggaatggctcaaattcagaggtgcttctgctatcagaaaggactaaaaatccttgtgttttagtcagacttgccaactgagtctattacaacagagccaattatagtctgagttagcttaggagctgcccagaatactgatctattagtaacattaaatcatcatagaataaaattaaatatgcaacataactgaagaaatgaaaattgtctccagcggaattgaagtagacagtgcatttatgggaggaaaaagaaaaccacccatcaagtatttttgctgcaaacccaagaggcgcaccatctgttggcctcatcattgcactaggtcagcagcagacagttaccctgaagtcagcagagtcagacaactgacattctgaaagacaacagtactgtcagccctccatag

SEQ ID NO: 33269 - DNA, 1257 bp, Bovine  19866880416736
  misc_feature (1)..(1): n is a, c, g, or t
ntaggctttggaagctgaaaagccaagtggcatccatgtttttgctgttctgctccacgctcacctggcaggcagaggcatcaggctgcgtcattttcgcaaaggggaggagatgagattacttgcttacgatgatgattttgacttcaatttccaggagtttcagtacctaaaagaagaacaaacaatcttaccagtatgaatgtttttattctttatcactgaatgtcatcaaaatcctgaagcatatacctgctaagaattagccaggtttttcctggtgtaatgaattgttcatcctatccatagcttcaaagccatccaccatggctgttgcataaccctcacggaatgtgtttgatctgttttccaaaattgaaacttgtttttcttactattcccaggggcaactcaagtcgttgatttcaaaggaaataaaacttaggttttgtgctctaagcaccatttttctagactccccagttagtaatcccttggcttgcagttctggtaatggtaagatcagaagttttgaaagtttcattgcaataaaagtgaatataagatcactttttcttttgactaaggtattaggacatagctaattatattaccgtgtgtaacccggctggcaaccatacttgaagttctgatgaaacaacacagaaaggaatcttgtgccttccaatgatgaacaatttaaaaattttatgatgcttcattttgtcaaattttttgacattgagctcaatagttatacaagttcctaccctacttttcttcttaagagtcagatatttgtactatttatgaaatgagaataatagtaatatcttttatacatgcagtaattctctggtatactctgggagtagaaggatgaagtttgagtgatctcaagattcttaaggactacactccgttttatggtgttgtctggtgttggggctctctaaccagctttttttgggttgtctcagagttcctcaactgatatgtcatgagaggatataaatgttgaaatactgattcctccctctgaatatccaggcagcgaggacaaatctgagggccattacccagagcttgctgcttctggtctgtaactagcctgtccacttacctgacctggagccataaaaaattagtttatttatgtgcagtactgttcaaaaggttgaaaagtactggaaaaaataagttactagtaatttgcctcacaagtctgttttacgaaaataaatacctgattaagga

SEQ ID NO: 33270 - DNA, 1818 bp, Bovine  19866880477251
  misc_feature (1)..(1): n is a, c, g, or t
natttattgtgcgtccttccaaaattatcctgttcagtcataatttaaatgattaagatcaggaagaaatgatggtaggtcttgcttatgatgagctgttctctaatagctcttgttcaaaggcaggtggtcaaaaatggtagcttgaatctgtagatagtccacagatctgtagatgtcctgtttaagactagaaaagtgtcatgtttttatatcactggtgacttaggttgctttttatcttatgctctgtgcctttagacacatttaagaatttgaacacattatacatgcttcagggaaataaaagcagaaaccttttatctctctttattgtatgattgtcttctccacttaaattcttctaattatgtcagtagattagatctcattttatttttcttatcatatgatttcataacatattaaatatatctttgtctatttgaggacaaggtttatttgttggtgatattgactaaaaaagaaaaatggttattttaatctttgattatacattatgacctagagcaagcttcaggttcaagtacatcagaaccacttggggcacttgctagaaatgtagtgtttttttgtttttttttttaagctcctttccctccacctttcaaccctcaccattcccaccagagtcctatttagtagacttaatattggatccaagaagattctgaaggaggaaattcctggatcatattggaaatactggtttcctggctgggaaggagaccaactccaagcctatttgagaaaaactttattatttgcagatgcaaagtttgttgctttctggacaacaatcatttgcaccttttgttttaacctaaatagaatctctcgtggtgaagttctcttttagaattagaggtgatagaattttggtacagaaaatgtctcatacgtcactcttgcagaggaaatagtaatgtgccttagtggttctgactttcttgagcaaggttattgcacagatgaaaacaacaaaataactgaaagcaaaattaatgccatgctttgcggaaaacagagcacaggaaacttcactgatcaaatggaaactgtactgaaaataataaggtggaaagttaattttgtaaacattactacgtggcatgggcttgtgcattcacacaagtcaaattccttttcagttatctagacagttgtattggcttttgctatattgggaagcaaatattatatagaaaattttactttaatgagccaggtcagaaagagaggaacagcaaacgcaaatacaactggcacggtgttaaaagtttagggtcttttaagctcaggtgtcagcaatctgggtctgtgggccaaatctgacccactctgcttatttccgtatggtctgctgatgctaagaattgttttcattcttaaatggctgggaaaaaaaagaatgccttgtgccacacaaaagaaattacatgaaatgtctttgtcttgatgtctacaaatacagttttgttataacagagccatgccatttgctcaaagcctatttatttattatctggctcttcacagaaaaattttcctgatccttgacttagcactctcctctcctgaaaactgtcattccttgagaggaattttaagcatcagcattttaacctctttctatctgcaattcaccccctagttagttttcgtatttctctgggaaactttcatgttcatatttttagttattcaaacaacttctgaggaagaaacaacgtcttaatttcccactatcctttgttgcagaaacatgggagttcattcacaatacctgagacctgc

SEQ ID NO: 33271 - DNA, 1042 bp, Bovine  19866880506753
  misc_feature (1)..(1): n is a, c, g, or t
nttttttttttttttccagtttctagaccaggagtgggaagtggggggtgagggtcatgtcataatcacttctatcccaccaatgccaaaagaaggcctaactaaaaataatattgaaccaatgaataattattattatttttattttttcaatttggaaagagaaagaatgatacttctataaaagaaaacatgagtatctcagagtataatcttaccctgctggacactgtggttcatcaatgctgtcacattcttcttcagcccaacttttctcccctaaaatattttcaagaagtacagtgagttgaacacattcaacagaaacaatggtcgtgatgtttgtgagacacattaggacacgttccccccaaaaaacaaaaaagttaacagatacatagatcatgttgggtgtgattctcagggaatagaacaaatagaagttattctatttcaaaataagagttagttgatatcaggaattaaagaatgagtttataattgcaagactaaagcacattgctgtatttgtgagaacttgaaggcacattttccattttcaaattgtcattaataatattttcaaccaaaatttataaccctacttctatccaccgacagaatcttctgccttagttcctctcatacagtcaagttctgtcaaagaatttcaaggaaccctgcaacacctaggcaagacatcatagtaacaccagcttacacagaattcttaggcactaacttctctcaacatcaggcagacactgtcctcgtttactatgaaagaacctgctacatagtcagccaagactgtgaagtgattgttccacaaatacagcattaaatatgcagctaatatcaaaataacatgagggtgtagtagcagcagagtgtatgactatggataaaaaagactagccgtgtgtagacaatcatgattattaggctgggtgatacaagctttattacatagtctctctattcaggtatatatgtttgaaactttctctaataaaagcttttaaaatattttttcagccaa

SEQ ID NO: 33272 - DNA, 2030 bp, Bovine  19866880526982
  misc_feature (1)..(1): n is a, c, g, or t
ngggcttcctgcatatcagaaatgtcagctatacaaatacgaatagttagatagaagaggttctgctgactcaactggatggtagtcccattggagagctgtatttaagagtaaatgaaatatgttcttactgcttcagagtctccaaggaatcataacgtccgtcataatcagaatcaaacacaggaccgctaacaacattgagaccgtttctttcttcagcatatctctgcagtaaggtgccatgcaagtagtgccatataactgaaacaagaaggaagacgccacagtgtcaaaagaacaagatgacataaatcaactacaaaccaaattatgaatcaaaattagcatttgtcataattagggataaagtgaagtctggccaaaaatccatcgttcagcttttgctctttgaaagactaacgagcaaatgctgaaatcaattctacttcagggcatccctaaacatatgtattatcaatgaagctgagatcacatattatcattaagcataaaaaatataagaacacaaacaaggcaagctattcaaatttattgttaacatctgtattttttttgaaatattctagggcaatggcaccccactccagtactcttgcctggaaaatcccatggatggaggagcctggtaggctgcagttcacggggtggctaagagtcggacatgactgagcgacttcactttcacttttccctttcatgcattgaagaaggaaatggcaacccactccagtgttcttgcctggagaatcccagggacgggggagcctggtgggctgctgtctatgggattgcacagagtcggacacgactgaagcgacttagcagcagcagcagcagagaatttttaactattcaaaagcattctagaggtaaactacaataaaattttccttgtatgctctgtaaattacttaaagtataaatgtgtatttattcttaaaaaagccaatagttacaataattaataatgatgtaaaatctattcattttaaattaaaaacaattatcaagaacttccaaatagttaaataaggcaacagactgaaatttattatctattagtagattacattagctagataagttaggagtaacattacattcttttcccaccaaaagtgtttgtaagattaaaaattttaccttgaaaactctggtacatgggcactatattagttgtaagtaatgcttcagaatatacttgacttgaacctttatgtaattctacaaagaaaataacaagaacaactatttcattcttcacaaatcacagtaagaattatactttctcgtgggggtatttaaaaaatgggctatcatcttaaactcgtaacactttcccagatactagatcaagggcgggtaatgcaatgtgatcaggtcccttaaaaaaaaattggatcttttcttcttcaagatgaagaaacaaaatctttaatacgaagggcctaaattaaacatattcaaattttacctcatttgccttattttcaactaaagtacattgtgtcaacaatctttccctgaactctttcacagagaaaagtaaaaatgagaacatctggcttcagaacacctactaaccagaaaaaacatcacaagggatgtcttttctgaaatgtgctgtacaaggcttctttgtatggacttctggcttggacctatttttataacgcaaaagccaggttctgacttcagaagcttgctctggggactgaactggatattgagcatattgactggagtcttctgacttttttcctttttaggctggcctcaaaatgtcttctcattaacatacagatctgccacttgaaaaaatagaataagatttcagaaaaaaaaaaaaaaaaaagccattccccaggggctctgtatcagtgcaagagcaagcaaactcaggctctccttttacctcatcctttgacaaatcaaagttttctttttaaacaacaaaatgctatctccttcctaagaaccctgatgcatccttttgacctgagttt

SEQ ID NO: 33273 - DNA, 808 bp, Bovine  19866880530248
  misc_feature (1)..(1): n is a, c, g, or t
ngctcagatggtaaagaatctgcctgctgggttgggaagatccctggaggagggcatggcaacccactccagtatatttgcctggagaatccccaaggacagaggtgcctggtgggctacagtccatggggtcacaaagactcagacacagctgagcaactaagcacagcacagtgcaaatatataccaaatactgcatgggacatatttacactaaaaaattattcattgtttatctgaaattcaaatctaaatcaccatcctatattttctctgacaaccttatccctaagtaggtttgaatcagcaaataatgctgtaaaaggctaggttcaacgaacagcatcctagtgtcaactagggggtcaaacttcatccaaaaatatgaatcttcaacagtaggaggaaaatatccatcagttcagttcagtcgctcagtcgtgtccgactctgtgaccccatgaatcgcagcacaccaggcctccctgtccatcaccaatttccagagtttacccaaacccatgtccatggagtcggtgataccatccaaccatctcatcctctgtcgtccccttctcctctccccttcaatctttcccagagtcagggttttttcaagtgagtcagctctttgcatcaggtggccaaaatattggagtttcagcttcaacatcagtccttccaatgaacacccaggaccgatctcctttaggatggactggttggatctccttgcccaacatagccccagtcaaactccgattctctttcaatatctcccagttcaacctgtcctcctccagtcttc

SEQ ID NO: 33274 - DNA, 2959 bp, Bovine  19866880549737
  misc_feature (1)..(1): n is a, c, g, or t
nctacatacgcagatgacaccacccttgtggcagaaagcgaaaaagaactaaagagcctcttgatgaaagtgaaagaggacagtgaaaaagttggcttaaaattcaacattcagaaaactaagatcctggcattcagtcccatcacttcattgcaattagatgggaaaacaatggaaacagtgacagactttatttttgggggctccaaaatcactgcagatggtgactgcaaacatgaaattaaaagatgcttgctccttggaagaaaagctatgcctctgcatattaaaaagcagagagattattgccaacaaagatctgtctagtcaaggctatggtttttccagtagtcatgtgtggatgtgagagttagactataaagaaagctgagcactgaagaactgatgttttgaactgtggtgttggagaagactcttgagagtcccttggactgcaaggagatccaatcagtcattcctaaaggtaatcagtccttatattcattggaaggactgatgctgaagctgaaactccaatactttggccatctgatgtgaagaactgaccactggaaaagaccctgattctgggaaagactgaaacaggaggaaaagggaatgacagatgatgagatggttggatggcatcactgacgcaatggacatgagtttgagtagacttcaggagttggtgatggacagggaagcctggtgtgctgcagtccatggggtcacaaagagttggacatgacttagaaactgaactgaactgaacatattttctgcatagcaattccctcaactgatccctaagtcccaacaacttttttaatttatttatttatttttggctatgctgggtcttcattggtgtgtgggcttttctctacttatggtgagcggggaccaccctctagttgcagagtgcaggattcccttgttgaggagcatgggctctagggagcacaggtttcagtagttgcaggccctgagctctagagcacaggttcaatagttctggcacatgggcttatttgctctgtggcatgccggattctctaggatcagggagcaaacctgtgcctcctgctttggcaggtgaattcctgatcactgagccaccagggaagcccaagtcagctctgaaaaatagattcattaaatgaaataactgcccatggagaagttgtatatctgagacttttgatatcctcttccacatatttcttcaagccatatcagctatgggctggtttcaggacctaatgaagctcaggttcttgatggctgaatgcagaaagaatccagtgagagataaagtgtgtctcttttagaagtaagaagtggatttatttagaaacatacgccacagacagagtgcagactgtcacagagggcaagtgtggccagtgccaatcacttttgaaactttttcctaatagttcacctgagctttggacactggccaaatccacaccttccactgcatcttagacttgggaatagactgcctgtgtcacctagatctgaacctacacttacaagttactagaccctcagaagcccaggtgttccttttcttttcgaaagtgaaagtgttagtcactcagtcctatctgactctttgtgaccccgtgaactgtggccagccaggctcctctgtccatggaattctccaggcaagaatactggcatgggtatccaatcttttctccagggaatcgtccccatccagggatcaaactcacatttcccgcattgcaggcagattctttactatctgagccaccagaaaagtcccaggaatactggaatgggtagttattcctttctccaggagatctttctctttaactttatagcaatctgcacactctgggttctgaaagttttactctgctaccggggtcctgtcccagttggatccagggattccctcaggaggacggcattggtgaaagaatagcaaaaagggagagaaagaggcttgatctaactggtttacatggaaagccaataaaattcgtgacaccaaacttgctctgaccacggaggccacaggcaccctctcgaatagctgaaggtgcccccaccttaggcaccttctcaagtaggtcttagaagcctgggcaggtaagtggtctcagaggacccccactctccaaattagtcatcctgaaggaagaacagagaagaaaaggagagaaagggaagcaagaacgactcggggagaccaagcctgatgagcaaggcccttagctttattttcaaaaggagtttttataccttaagttgtacatagaggataataggggttgcagagtcatgcaaagtcagcagtccttgacccttatcgagaccaggctttcttttctgtatacaaatgctttaggtgatttacatcatcttctggccaggaggtctattaacattttatgactctttgttttgataaaggttagttaaccagaaaacttattttctctaaaagtaatttttctaaagtttggtgccactctccaaaagcactaaagttacattcctatagggcaaaggtgcagtgggctgtagcaaggaaagaatttactacctcaagggtctaaagttgctaacaccaaggccactagttattttttctatataccaactatattaattaatatactcccagggacacagtgggtaagggatatggaaacttggcagcaagcattagctcaacaatgaaatcttctactagttctatcctaataattttaactccccaagaagccctgcattgttagaatatcttaagctttccgtgcctcttgtggttgggaggctgtaaacagtcacatgcatagctgtaagagtccgaaaacctgtcaggcaagttagaaaactatctaagggatttgaattggaacacacctattgtaccctggagaattattaactagagctctaagttgatttt

SEQ ID NO: 33275 - DNA, 1643 bp, Bovine  19866880576997
  misc_feature (1)..(1): n is a, c, g, or t
ntttgttgctaaatgtatgtgtgcatttttcttaagtctcatcatatattcatagagattggtgattttttttttaatctgcacccctaaagtagcaatgcaagtgaaatcaggcattgataaacctgtaatctcatcttggctctgcaagacctctcgccagtcctaaatcagcccttaaaccaatgacttaggacatagttgtctcaacaatcctattggtttaaccaactactatttgggccagagaatctcgtttgcgatgttttaactttaggatctgccatcccatgtttcaaaccacaaggatgtctaccatagtcatcgggctgaaaaagagcttgctctatagacaacatggaacattgagttttttcttctatgatatctatgctatgagctccctttctctaccatacacaaaacacatttcttctcacagtaaacacattgagtcttttattccacacagagtggctaaaaattctttgactggttttaatatttgcagcctaggccagctctagggtcactgaactcatggaagcaaaggggcaacacctgcttaccttggcaaacactcttatagtcagcacagcagtctttcctctgtaaacagtcatctgagcaagagcaaaggctggattccaatctggtctccccacagcgaaatttattgcatgtccatatttgagctgaagaattacacaattcagttttgagcatacaacttattttaagcatccaataccaaaaatataaactttatgcatttcttcttgtattatcatacagtcaaattcttagtttatctgcatccacaaatgaaaatacataaaacaaataaggggcaatccaccacttttcctcttttggcatgggtggcagagaggaatgtagctttacaagctgtggttctggtctacctatctacctacctatcaggtacacttctgagtttggagaaactgaacacctgtcttattcccacccaaggatagaagaactaccagccttgagtgaccattgccacccaggagcagcctgcctagcctgatctgaggaccgacatcaaggaagaggcagtgacaacagaagtaacaataacatggtcaggtctgtaagaacacaggcagccagggtacattccagctgacagtgaaagaatggtagatcagctccccaacgtgcctctggtatttttccaagataggcacttaatgtgagatcagtttgagtaaacctagaggagattgcttcctaaagggccacctgccaggaaatggtgattggcattaatgtcagccctatgatcagacaaatgcattggctaggtgacagctgtatgtttcagtcatgcagcgttcttcattcttcattatatattatgtacttagaaagaaaagatttttaataatgaattaaagggaatacagagcttatccatactgggttatcctctacctcgagcccttttcagaataatgtaagaagctctactgttctagtcttcaatatcattaaaccactagacacacggccaccgctttccttgacttcctagaaaattagatattgcaaactaagctgtctcttccacctcaagaacaatgtttctcccaattaaaataaataaatttaaa

SEQ ID NO: 33276 - DNA, 1359 bp, Bovine  19866880578187
  misc_feature (1)..(1): n is a, c, g, or t
ntccatgaaattttccagacaagaatcctggagtgatttgtcatttcctacttcaggggatcttcccaacccaaggatcaacatatatatgtgtatttcattatttaataaaaattactctatggggcaaggcagtgtccttcatctgactctagtgacgtcatgcagatattccagaggacagtgacttgcaaaaattccttctcatgtgaatcgaaagcccacaagctcttcaaaacaacgatttctccatttgttgtgaaatagatgtattaacagaagctgttagcagagcggctgatcagtaacaaaaattgatctatttgtcactaaggacagcaattggaagctaaaaacctctaccccaggaacagattttctatcctcttcttgtcgctcagtcgtgtccgactctttgtgactccatggacggtagcctgccaggctcctctgtcaatggaattatccaggcaagaatactggagtgggatgccatttcctactccaggggatcttcccaactcaaggatcaaacccatgtctcttgtgtcttctacattggcgggagaattcttttaccattagcaccacctgggagtcgttggagcctttttatgttctagtgtcatataaatcactcagagattgtgttttatcttttccattaaaacaactctaaaagataaattagtatttattaaataacctgaaagtaggacttggggctcctgctcttaaacaataaattaattggaaggaggaagagcacattgcttacaaagtgcccttgtgattacagaagggctgcctacttgtactggacacctttagtctccaagctagtgccaccctacacgccaggagccatagagacataggtgtggacatcggattttctcccaaggggggctacagatggttatcaggaaccagagagtacatatccaacatttcgaccagagactcaattctcactgccagtaagaatttcctggagaggttttaaaagcatcaatgattggactcccacaccagcccaaatgaatcagaacctgtcagggacagggcttgaggatgacatattttggtttaggccagcagatatcaaactttagcatgcatcagaatcacttcaagggcttgttaaagcacagattgctaccccacatctaatatagtgcttttacctggtctagtaacaaatggataaatattgctagatttgtatttgaaaagaacaaatttctaggacaaggaagattaactggtgtccatggatggaggcggtgcctggaagcctgcagtccatggggtcgctgagggtcggacacaactgagcgacttcactttcacttttca

SEQ ID NO: 33277 - DNA, 1245 bp, Bovine  19866880584849
  misc_feature (1)..(1): n is a, c, g, or t
ntttcaggtaacatacagattctttgtgagttatacctgtcagattactaacctgaaataaaagactttctccatttagcaggagtccagttttccctacattatacaagcagatacttcactgagaatacagttacatttactaggctctaaactaaatcagagttgactcattggaaaagattctgatgctgggagggattgggggcaggaggaaaaggggatgacagaggatgagatggctggatggcatcacggactcaatggacgtgagtctgagtgaactccaggagttggtgatggacagggaggcctggcgtgctgcaattcatggggtcgcaaagagtcggacacgactgagcgactgaactgaactgaactgaaactaaatcaaaaggataaactccctgcaaataaactgcctaaaacatattagctatttgaccttggatgagagatttgcattcccttggggtgcttcctctactgaaaagtgaaggcgtggtactagacagtttctgaagttctttccagaagtaatattctgagattctctctcgaagccaatatcctccattagctatgaatcatggggacttccaaaataacagtcaaacttaatccaatgctggaatccccactacaacatctgtttgaccatatccatttataggaaatttactacttctgaggcagtcaaatgaaacatccaacagttattttcaccagaaggttcttctttctcctaagttaaaatcaatatttttgaaacggttgactatagatcatggaaactgaatatctttacataattacatctctctatagtagggtttgggcttccctggtggctcagacggtaaagcggctgcctgcaatgcgggagaccctggttcgatccctggggtgagaagatctcctggagaaggaaatggcaaccttctctttcacatagcaggtttactatatcgaatttaacaacattttaatcaacaacttaaagtaaaattgtatgtaagtttcttggtggctcagtggtaaagaatcgatctctgggtggggaagatcccctggagaaagaaatggaaatccactccagtattcttgcctgggaaatcccatggacggaggagcctggcaggctactgtccatagggtcacaagagttggacatgactgagcaactaaacctctaccaccaccatagttgattaacaatgttgtgttagttttaggtgtacagta

SEQ ID NO: 33278 - DNA, 1770 bp, Bovine  19866880702336
  misc_feature (1)..(1): n is a, c, g, or t
ntgttctttggaaggaatgatgctaaagctgaaacttcgtactttggcccctcatgcgaagagttgactcattggaaaagactctgatgctgggagggattgggggcaggaggagaaggggatgacagaggatgagatggctggatggcatcactgactcgatagacgtgagtctgagtgaactccgggagctggtgatggacagggaggcctggcatgctgcgattcatggggtcacaaagagtcagacatgactgagcaactgatctgatctgatctgatatctcttttaggaggaaaagagaatgatgttaatttgcaagttataatttcagatttttagctctgacatttaaaatcatgaattttgggcaaagtaatctttctgtgcctcagttttctgtactgtatataattctgttaactacctcatagaattattgtgatgattattaataatctaagttgcttatacgagtaccatttagaactgtaactggcaataataagtgctcagtaaatattaagttacataagcaaaatatgtcaataagttaaagatatgtatatttgtgaatttttcttttcttgtgatttttttttcttttaacagaagcttattaagtagaagcaagtctgtaaaagttgcaggagttaccaattgtttatattctttaagttaatttaatttctgattatttaatttctttttgctgctgttcaaagtcacatttcatggttgttttgtagtcttaactgctggagcttattgacatcaaaactttctagcattggagacgaaagcattggcagttgtgtgaacacagtttcctaagaaatcagtgcttacatagtttcctaattttccttctctgtcttctccagatttggctgacagctaaatatcaaggcctgaagacaggcacatttttttggccaggatcagatgtgaaaatcaatggaattttcccggacatctataaaatctataatgggtatgtataactgtactttttctaggacctataacacagaacagtttattttcttatcacagcctgagttctagcatttgaatgatatgttatctgaaaaatgagacctatcaaaataagaactctatttcaaagagttttaaatggatggtagatagtaaaactagatgaggtgtttttttttttttttctggagtttttctagaaagcactggtggtaacatgttggagtttgtgttcagatctttggataggaataagaattgaagtcctggtgaaagtaggggtcctgaatattttcactccaggaagaaagaactaggagaaggagctgaaagtattaaagggacataggtaggagtgaccctttggtgtccaaaaatactatttgaaagaagatattaatggcacctctagatttgcattttcaaattacttttttaaacattccatctatagtggaactgattagagtaatctccctgtgatattcaaaatccgtgtggtattgtggggaaaaaaaaaacaaaacacacgacttttttcctggaagactcccttcggattattttagtgagactagcaaaataatttggcttatacttggggaatttatgtcataaaaccaatacgatagtgtatttgagggacgaaagggaaagttcataaattccaaacaagaaatgcgtattttcttttgtaaccttaggctactgttgattctctgggttcatgtgagcaccttgttattgccattatttcattccataggggt

SEQ ID NO: 33279 - DNA, 1475 bp, Bovine  19866880766570
  misc_feature (1)..(1): n is a, c, g, or t
naaatgcctgctatgagaatgaaataccaattttaatttatctctctgtatcaaggtgagtaaggtatcttagtgaattataaaattatattttataagaaaaaattcttttttggggggtagcagagaaatagcttcatggaattttggacaatatcagttcagttcagttcagtcgctcagtcatgtctgactctttgtgaccccatgaatcgcagcacgccaggtctccctgtccatcaccaactcccggagttcacccagactcacgtccatcgagtcagtgatgccatccagccatctcatcctctgtcgtccccttctcctcctgcccccagtccctcccagcatcagtcttttccaacgagtcaactcttcacatgaggtggccaaagtattggagtttcagctttagcatcattccttccaaagaaaacccagggctgatctccttcagaatggactggttggatctctttgcagtccaagggacttctccaacaccacagttcaaaagcatatagtcaagccatatatttcaatatatctattttaagattatgtatcttctatatgattatttacttgtcaagtttgataaatatgattagaaaataacagtagtatcttggttagagtcatttttcccaacaattaagaaaacaaaatgcttgtaatgttttgattttggaatcatagtattagtacaatagacttaccactagatggagacaagccctcctagcttcactcatgataattttttttactatgagtagaaacccacaacaaaagagttaggattgtaatgcagtactggatgttcagaaccataacaaatatgtgtgtaaggtttcatttatcctcagcatctcagttattaggatctgtttaatctgaggaatgtagcaagtgtttacacaaaaaatctttcgttatcattgagggtaatttccaaactaaataatgacgttataaaggaaggtcttttttcccaagtaatttaacaatatcttcagaatacctaaattttgtttgtttttctgaggttttgttaaatagttttcaatgaaacatcagaaggagttgctctatcactatattattaagagtatatttattgttcaaatgtcaagcaaaccatttgctttgacataagcataaggcaaatatttaggaaaaactaacttgtattcatcagcgagatgtaattttggagttcttgcaggagcagatgagtgcacgtccttttactctgcaatcttagtctggatttaagaagaggtggcaagaatacacagaagaactatataaaaaagatcttcataacccaaataactatgatggtgtgatcactcacctaaagccacacatcctggaatgagaagtcaagtgggccacagaaaacagtgctatgaacaaaggttgtggaggtgatggaattccagctgagctatttcaaatcctgaaagatg

SEQ ID NO: 33280 - DNA, 1108 bp, Bovine  19866880810215
  misc_feature (1)..(1): n is a, c, g, or t
naccagggaaagtcatcttcgaaggtgggacatgcagtctgaattgtctaccagcgagagtggcgcagcaactggtgagggcatggagcatgtggtcagcagggacacagcttgggctctaggatgcagcacatccctgcagagttggggctggtccacacccagggagctggcaaaacagagaagggacattcggggtagagggagggaggagactcaaattcttatgtgtaaaatgaggacactggatcatattggtgtttcctaaactatgagtcataaaaatccgattctagaggtaagtttaagaattcggatttagtaagttaaataggattttttacttctgtactttttggatttagtatattaacgatattgtgacttccctcccccctccctcagtgcagataagactccaagggacagtgctgaacagattagcttattgtctgtgattcctgggataggatgagtccaggaaacacgggagtgggggaaagagagagatccttggctcctgccttcagaatgccctccatgccttccaaagagtaggggaagtggaagggttctttggtgtatttgcagtgatgtcaggggttatcaatttacaaaaacaaatgacaccaaacctttctaattaaggtgaaacttgtgtttaggtagagtgtgtacagacctgtgatgtattgctttaggggctgaaaagttaactccactgcctcaaaagtctttagctactaacaatgaatcccttaattccagtcatgttctttgcatcttgttaaaatgcaatataatgcaatacctcaggagagacagagaaaccctgaaacctgctatcataaaagtgtttggagctgggacttccctggtggttcagtggctaagactccacacttccagtgcagcggacctgcgtttgatccctagtcagggaactagatgccatatggtgcagtcaaataaatagatttttaaaaaagtgtaagaagctgactcggtcagatcattttctgagggaagagcttgattgaaaatatagaaagaaagaaagtataaaaaactggaatatttgttagcatagagaaaaggaagcagaaag

SEQ ID NO: 33281 - DNA, 1068 bp, Bovine  19866880812295
  misc_feature (1)..(1): n is a, c, g, or t
naaatcaagatacgaatgttggataatacagttaagaattgaatggattttttaaaatgtcattttttctttgaaaaccaacctccttcaattttcttggaaaaaaattaaaaaccctgcagagcctgtgatgataaatacagcccttggccagctttgcctgtgctggagtgttggaggtgctgatgtagggtttttttcttaagttattttggggaatagagcttatttaaattccgccagttggaaaaaaaaaacccacccccaaacagtgctgtttcatgttggttgaataattcacgaatgggcagatggaaggacacatatagctacaaactgagtgtcccttcgtataagcactgttttgttaaacactccctagccagttccatcacagttaatgcagttcttgggacgaagaataagatcacttctccactaaagtactatgtgtatgaggtatttattaaaacacctactagccaagcgctattttctggaatcctctaaacaagaacagagtaatcagaattcaggcattgtactgcaaaagaagcttcctgtcaaagaattctactcctgattctgagtttctttatttctgaaaaaataaatctgtttggaaaaacacgatgattgcattactattaaaaagcatgagtgaaaaagcagaaataaatgcactgccatgttttcctgagctctcagcccaggcctcctgcagaggagcagtgggggctgcgtgactcaggaaattaagcgctgggatcagctcctggggccttcatctaattttcagtgaccttgtgaaaattacttcacatgtctgtacctttgctagcttttaaggtgaggagaataatattggcctcccaccaaaggagtatggggggtgaatagcaaatgcatataattgatattgccttgctgatactgtgtgaagagccatgtggaatgataaaccgactggatgtaagatggtggaaggatgacaagtagccaggtgtatttccagaactacagttcagccatgcttagcttggaatccttcgaacgctttgtcatggt

SEQ ID NO: 33282 - DNA, 4377 bp, Bovine  19866880856951
  misc_feature (1)..(1): n is a, c, g, or t
nagatgatgcataaaaagtccctgctatcctgcaatgagagaaagttgactcagattctgtgaagaatggaaacagaagggggagagggaagtgctcaggtagacaccttcatgacattttgaccttttgggagctgaaatcctggatgggaagataaacattaggtaggctgagtagaatcccggaagcagaaatgcttccaccctactttctgattgggcctctgttggcagaatgttcccctcatccacatggaaagggcttcttccaaatgaaaaacagttacacatcgtggccagtcagaatctgaggtagcactctgagccttcactggctctcctgtaggaaaggagcaatactgaacgtctcacatgccttcggggatgctgaagttgcctcagttgagagccagtagagttacccagtgggcgttatagtcaaagacacttacttgtcacttgtgctcagtcgttcagttgtatctgactctttgcgaccccatggactgtagtccaccaggctcctctgttcatgagatttttcaggcaagaatactggagtgggttgccattttcctctctagggaatcttcctcacccagggattgaacctgtgtctcctgtgttggcaggtggattcattaccactgagccacctgggaagccctagtcagagataagatgaccctaactcagacagccaactgtttacaccatgtttggatggaagatgtggctgtactcagaagtggttgcagccctactatgagttgaggtagaatttaatcaactctgaaggattcctgagccttgttggaacaagaagatgagtcaggcatttaccaaccgcactctaaagcagcagtctattataaccgctagagcaactgtccacgcatgcctgctcagtcgcttcagtcagtcatgtccgactctttgtgaccctatggactgtagcccaccgggctcctctgtccatgggatttcccgggcaagaatactggattgggttgccatgccctccttcaggggatcttcctgacccagagatcgaacctgcatctcctgcattgcaggcagattctttacccactgagccacctgggaagccccccctagagcaactaccaagaaaataactttagaaaagctaaaattcaacagaagaattaccatgatataataaaacacatttaaaacagaagtttaaagaagtgaagaagaaacagaaagacaaaaaaaagatatgaggcatagagaaaagaagtagcagagtgctgttgctgttaagtcgcttcagtcgtgtccgactctgtgtcaccaccaggctccaccgtccctgggattctccaggcaagaacactggagtggcaggcatgaattcagattatttggcaaccccaggttttgttcaaaatgaggtacaaaagagacaatggagtggggaacaggggtagcagagaccgtagacaaccagaaagtgaggactgtactgcagttccctttagatggggtctgcacttgccattttcccacagcttctatgacttaattgcattcactttctaattttgttacctgactgacaatgaggtgtttttcctccatcccagaggagtcagtatctcttcctgataccctgggttctcccttcatagatgcatatccagtaggggctctcaaatcttcccagaaattatgcttagattatatttaaatcatttgcagttaaatcatatttaagtattttaatcatgcataatttatgtaaaattaaagcatttaattctctctcttacaggggtagggattgggtgatttaaatatggaaaggatccatttaaatttaatgtaaagttggagaaatgtaaaatattttattgacatttagagatactgtggttttatgtattatttgtaactccagtttataagtgaggaaaccaaggcacagagagttcttgtactctgtacaaagtcatgttgtcatccaagcttcttccagggggaatattttcacgtttacaaaaaaggaagagaaaccaggatgtcacacaaagctttaaaaatgaattaatgtcatggaaaaaatttttttctacatctcataaagatgaaagagacttgtggtttttttttcattttcgactggcctagatgtcttccatgtttcactggagaactggagggatttcagctggagaagctttggagcagctgctaaaataattactctatcgtatatttcacttttaaaaaactgagaaaagttgtttctcaatttctagaggccttagttccaaacacagacaacaagttggttgcgctaggtgttctggtcttactcacatcccagagttccaggcacccaggggagtgttcacatatttttgtacaatacaacctaaggaatcatcaaatcttaccctctcatctctcctgccagtctagactagaatcctcagtcattcaaggaagaatggtttaggactaaggacaacacattgattgcccacctttacgctaactggagaagttttgttacagttttatgtctcttgaccttattgtacttcgggcgtgtggagtgttcacatatttttgtacagtacaacctgaggaatcatcatattttatcctctcatccttactgccatcttagattagagtcttcattcaaggcagaacggtttaggactaaggatgacatattgcttgttcacttttacactaactggaggtgttctgttgcagttttatgtctcttgaccttattgcactttggtgtgggaggctatccctcatatcatgttgaatataaacgagatagaggcatgacttgtctatcgctcagtttgtggttaaacaacatgagtggcctgctcaatccagttttattctgattttagagtttcaactggattttttatagttacccataaaagtcccagttggcattaggcgaggcctgagcataaggcaaaggccacatcctggtggcctgtgtgccaggcccaccctgcagatgtgtttttacgttttgtttggccttgaaagtggttgaaagaaattgtttttctgaatttcatagacaaaattttgcaatctggagaattcacataaacatctaaatttcctgtttctcctgaaaactgactatctggccacagtgggcactagcctgctgagtaaatgccaccacctttaacagggcacaaactcacattcagggggctgcctcactcttttatgttcctgctggtcctggatgtttgaatccatgaccatgcagtcccctccaccaatgggcctagtctttaaaatgatttgttgacttgggatgcagacaatacacctacttcatttgttttcccaagttcaaagccactgggaatgtttctgttgtggtgcttttagaagatctgagactcatttgaccagtctccatggagtaaatctttgaccttgaatttgacttttgggaacagtcaaaggaaaatttagagccaagtttttggggtgaaaaatatgtgtgaccatgtaatagtgaaacctgtttctcttgggtggtttggtttgtaagctgactcaaaggtaattaagggaaaaaaagagctcaatcatgctttgagggctttacttcttccagatgtccattaccctttccactgagctgtcataatatcctatgtgtgtctctattatgcatctatgatttgagttttagttttttgtttactgccctctcctcttggatcagactggaagccacttgggaaagatacacttttgttcatcttcgatcttgttggaggccatcggcactgttgaaagccaagagactgaactgaaggattcattattgaatgaatgaatgaatcaaaggacctaaatggaaagcgtcccaagataattattttaaaggggacaacaaacactttatatcgtaggcatccattcttatttaaaaatatatttgcatatattcctgaaatcaaaatgaattgaaaaattaattgatattggattgtatgactttccttgttccctaacgtcagctccggtattgaaagtcactgttttctacttgacaagcaaaactcatttgtctgcacacttgttgtctccctaactgatgagcaaggaagtgtaaaagctgtagaatcaaaggtgaataaaaatccaccaagaatgatggcctactgctcgtgtcctagtttgaaacaaaatatcaaagtatttcagatattaaattttttggtagcagcagcaacctcaggatagcgcagcgacgacactttgaagctttccatgtagaaagtcaccaataaatatttcacaagagcagcagccccacccccaatgccgaaaatccca

SEQ ID NO: 33283 - DNA, 1528 bp, Bovine  19866880859954
  misc_feature (1)..(1): n is a, c, g, or t
nataactaaagtggcttgaatgaagcagaagcttctgcagctgtggaactcctgagctgtgttatgagacacaattagagagtgtatgctgttggttttggtgaagagcagagtgctgaagacaccagttaaggaatgacagtgtccaaggtggccaaggtgaagcaggatttgctccctttgtcagctgatgcctgcatcccttctcaattccacacctccctgctctatgcccttccattggaaaggggccccgacatcataagatctgtggcatgagagaaccgagtctgcttggtgactccctacttgtcacagaagtttatcagccacctgcacttttaagaatgttgggagagcagcagagagctgtgggaaacactgggcgattttaaactccttcaggaaatacaacaaaaaagagacagattttataaatgcttccacttcatttcttttatgtgaaactcatatacactgaaaaattaatcatatctgacagcagttactttttataatcggaaaaaaaaataccttgtaatccacccctccaattattttccgaaccagtttaaatgttaaggcccaaagctgtgttctttcccattcaagtgtgtcagagtttatcagggattcacaaaccatcctagaaaaaaggaatacccattccagttacaagacaggatttttgtaagttctctaatagccaaggtccacaaactctggatattatatttgtcacagtaagtgttaataattgtcataaaggtacattactcaagcacactttcaaaaaattacataaagcattttatattttttacttatatgaaagactaaacccaaagtagaactaaacccaaaggagactccttaccatcttgagccaccagcgaagtcctaaaatagaactgctcctgctgctaagtcgcttcagccctgtccaactctgtgcaaccccacagacagaagcacaccaggctcccccatccctgggattctccaggcaggaacactggagtggcttgccatttccttctccaatgcatgaaagtgaaaaggaagtcactcagttgtgtccgactcttagcgaccccatggactgcagcctaccaggctcctctgtccatgggattttccaggcaagagtactggaatggggtgccattgccttctccaaagtagaactaagtaatattaattatgttatatttttgctagaaagaaatgtaccaaaagctattggttaaatgtgtatcattaaccaattagtggcaaactgtgtttttccaagacggctgcaataagacttttgaccccacatactcttctaaaatgtaatattgatgctgctcccaggaagagtatcagtgtcaaaagggtagaaaaaaaatctatccctcggtttgggcaggtccaagactggcaaatggaaaggctttcaaggcaaagtgatacagcttctgcctagccctcttatgaaggcttgctccggactccactacactgtagaaagtcaaggtcacac

SEQ ID NO: 33284 - DNA, 2013 bp, Bovine  19866880870233
  misc_feature (1)..(1): n is a, c, g, or t
naatgattatgtctgaggtatgagcagagatgctttcaaagattaccccatgaactaaagttgataaaattctcaaaattccattcatgaaaggtgcagtaaaaagctgtctagcaataggaaaatttccctcataagggaaatacaagcttaaaacacatatagaagagtatatgcagcagtatgattccatttttgtttaaaaaaaataatacacacacagaaaagttctgagggaacaaaacattaacaccagataatagcacatacacaatttttattttctcctttatacttttttgtactttctgaacttcctgcagtatgtagtatccttataacaaaaggaaaatattataagctgtccatacaaagatttttaaacctagaagaaacccaccttaatccaaaacactcagctatcgtcagagagagcaaaacaactgctcaaaggtcacacagcaaattattctcgtgactctgagtctaggactctttacatgatgcctgtctctcaagatctttgactgtcttcccagaaaaatcaatgttctctttttctttgaaagtttccccaaaatgacacaggcataattacaccttcctctgtcaacattcttaacatttacttcccgtgagccgatcagtaaggtatttaaataaataccatacaagcagagttgttctgtacttatttccctagttaatctaaaaacagataagatcaacatagtctatttacaatgctcttaatccacaccctttccaccttcccacctgaatatacttcattcacctgtttctcctggtctccaaaagattctaatctaaatggtgttgggtggcactttataaaaagcatatgtgtttgaaagatgaagtattatggaataaactctgtgccaagaatgttgaacctgattcaacaccacctgaaaaagccctgatctaagattcctttgttttggtattgtgtcaagtatattgtggattgttgagaaggcactgcagtggaaactttgaattaaagagttctactgatggagcaatgtaaagtgaaatctacttgaaattctgatagatgaagagctgaactggaaagaacatgggcatgttatcagaccacagcaaggccagaagactggcagcttagagaattaaagaacaattaaaggacaagcccagggtacagtaaggaaacacaattaaagaaaccaataggagcagaggaagactcctaggagagggaaaacacgcacaggaaggacagtaagagactgcatgcaatgttcttacgcatgacaggcaatggggcaactttaatcaatgtgcctcttaacttcaaaaaaggaaagggacaaatgtcaccagcagcaccaccacttctacccaatgccaacacagttgaggtcattaaagaacatttagttgttttttaatcagaacattatgtgtgaagtcaatggcaggacaagggttgtttggaacccccagctaaagaaattcaggttggtatacctatggagttcagcccctcaaacttcaatgtgcagagagacccctggaggttgtgaaaatgcagattctagtatggtaggtctagggtgggccccaaaattctgcattttgtataagttccaaggagatgactctgatatgctagtctgcagaccacacttgcaaagatgtaagtatcttctgagtaagaaaacaaaaatcagtaatactgcagctttcaataataacatgaaaaatgactatttattcaagtcatactatgtgccactttgtaaactgtatctaacttaattctcctaacacctaacagagttttatgaagtctacctaatgattatggaagctgatattcaggaaatttaagttgtttccataccttcaaacagctaataacaatactttaaatccaattttgtctaacttcatttgtcaataagctatagcaatgagattaatagaattattagttttggggatccttggaaagctccccaa

SEQ ID NO: 33285 - DNA, 1566 bp, Bovine  19866880871594
  misc_feature (1)..(1): n is a, c, g, or t
naggcccataagtgctgaaggccttaaaacccataaaattaacttttactttaaaaatgcaacattcttcataaagtactcacaaagcaaaaaacactcagcagacattgaaagctaagacagagacagaccccagaagccaactgcggaaggaattatcaatcgtgttatgacagatggagtttcatcgggaaaaatcactcagagtttggcttgtgggataccctggagatttcacacaggactaaagtatggaaataaaaaaggaggtgtctcatacctcccaccctcattaagtctaatcctccctagagacctgcagtaacacaaaaagctgggataatccaggtcctaccgagtggtctttcctcaacttccctctctcctccatccctcagacacatgcccaggacaacagataacactgtgtgttctgggacccaactgcccccgacaaaacccactaggacctgggtcagagacacactgtgtccagggatcagtgtgtgtaaagagttcactttgcattttccacattgttcaaatgcactagaaatccaggtagttaaaaggaggaaatccaggtagtcaaaaggaggaacatgaatggcagtaactcaagtgtatgctatccacaggctgtcctccaggacagaatatcaggattgaggggaagcagttcgaagtgtacacaccttggtctgtgccctggccattctgatatgacctaagggtaagagattggatgattttgcacaacttcccaggtgatttgcatataactcctggctcaacacggggcttccttggtggttcaaaaggtaaagaatctgcctgcaatgcaggaaacctgggttcaatcgctgggtcaggaagatccccctgaagaagggaatggcaacccactccagtattcttgcctggaaaattccatggactgagaagcctggcaggttaaagtccaaagagttggatatgactgagtgacaaacactttcactttcataggtaaagaagatcaaatcaaacttttcacagtctgatagttttattttaaagtttaagtggacatcttaagaactctctctttaataagcccataacagaaagagtcgtatatttttaatcagccttttgaacttaggtgaaatgcaaattagactatataggttgtcagcaaacattgaaatccagcatggtgctgccatccataaaatttttaacaaaggcaaggtatgtaaattttgtttgtgtcaggaaatataaaggacaaattttttaaaatctcaagtgggttaggtaaatcacatacctaaaacatgcagaactttcctttgctcttttaccccatctttttacctgcagatttttacctggttctatacacgtttcctggtaatctagacagcaatttccaaggtcaacacaagcagcatcacagcggcagtttccaaatgttctctcaaaacagcgacccttgcaacttttaactgaaaatatcgaatgagttagatgtttctaatcattatataattacaaagcaaatatcaactaatatatcctaag

SEQ ID NO: 33286 - DNA, 1586 bp, Bovine  19866880928005
  misc_feature (1)..(1): n is a, c, g, or t
nttgccacaagatggcgcaagtccagttcagcttggttgtcttgcaacaagcagaggctaaggcaagttagaagtgaaaagagccccctcagagaagataaagcagaggcatggagcagtctgtgggggaggtggtggtgttggagtcggggtgaggaagtgctggtaggtttatttacaaatagggaaacttgggacctgcctgtggtattttctccagaggccgagtttctccctcttttcaggacagagttgcttcttgcacctcttcctcctaacatgaatctttgttttcctttctaaacctccctcagagatgcctttctggtctttagaagtgaccacacaatgtatacaccctacagagtgcaaggtttcttcttcagtcataacacatttttgaagtcagttcatgaatattttcatagaccgtgaactgccccaggactgtaacctataaccagtgatccaaacagtttccactgatcaggtattctgcctttaatccacattcctcccttcttcgcttgagggaactgggagagtatgtggaagggtagttacatcaaaggaacgttccacaggcttcagcttgacgtctttggaagagcatccaggtgtttcaacattttccatctgcgttgtcaactagcattgccagagcagggcaacccctgaggaagtcaacctggaggatcccctgtggggtattggttttccttttccagagaaagatctaagggtgagacaaagtcctgctgttatgactgagtcacattctttgaggtggttggcgttcctactgatgtgtatagttgagatttagaagcctaaaacagcacttagaaaacttcattttttctggtagacattactcactctcatagcaagtgttcctccgttagattattattaagtggggatattcccccaaaataattaatacataatttttgagtgaatgaggtgcctcataaatacacatatgtctcgtctcagttcaaagctagtgtttgaccagtcttgggtgcttttggtcctggtaatcaatacagtggttcttgccatcctgtgagcttttccctgtaacttaaatggcaagtacagcaagataaacaccaaaagaaaagctggtcaaagtcctcctgctgttttaaagagaaggtctgttacatttagaaaatgtctctgcaggaagtagaatttaagatggatcatggatatggagcatgtgcagagactcagttccaggctttcaatcatgatgttaataaaggccaacattcactgaatgctcagtatgagctaagcatggtgctgcggatgccacacatttactcttcacagcaaccccatgaattaggtacttccatttcctttattttatagagaagatgatcgtggcacagaaaggtcaaacaacccatctgaaatcacatatctgctaaatggttgagaaaggatatgaaagcttccaggccacgttacataacccagtctcttaccacacagtacaagctctgtttggaactctacagataaacgtaattgtacaggaatgaggtaaacaagcttattgctttagt

SEQ ID NO: 33287 - DNA, 1569 bp, Bovine  19866880972746
  misc_feature (1)..(1): n is a, c, g, or t
ncttcctcctctgcaaaacagtgtaagtattaccagtacttagcacagtggctggaacattaagaccaatcaacccatatttgttttctaaaatcagtatttttaaagcactttcagaataacattgaaaagacaagaatcattgtctccattttgcaggtccatatagtcaaagctgtggtttttccagtagtcatagatgtcagagctggatcataaagaaagctgagagccgaagaattgatgcttttgaactctgttgctggagaagactcttgagagtcccttggatagcaaggagatcaaaccagtcaatcctaaaggaaatgaacactgaatattcattggaaggactggtgctgaagctgaagctccaatattttggccacttgatgagaagagcagactcactggaaaagatcctgatgctgggaaagactgaaggcaggaggagaaggggacgacagaggatgagatggttggatggcatcatggactcagtgggatgagtttgagcaaaatcagggaaatagtgaaggacagggaagcctggcgtgttgcacttcatggggtcacaaagaatcagatatgacttagaacaacaaacaaacatacactgataccaatatcataaaacgtgagagaagcatattcaataacagcataataaataacaccgtatttattgatgtggtgaaaaactgtgttgtttccattcaaaagaactaattttgccttgaagttatgatgttaagatcagctatcatggagaaaatatccaatttcatgaataaagatagatttggaaatttttaataacagaaatactcttctttggagagtggtttcaaagcagtattttttcaaatctcaggcaataaatgaataaactctctcttgagatccttaccaggtccgtgattctataaaatagggaactaagtgatacaaacctcttgtgtaaagaagcccacacataatacatacttgtaaagtactggggaaacatgactgatgttgacaatgggaatggacgtccagcaacctcagtagtcaagccaccctacagtgactagaactcttagggaagacctctcatttccacaagaactgaaaggccagcactctcttccgaggaactgtctgcagcttttctttaaagaactaaatgcttgtatgcatgtgtgtgcaattaagaggtagccttggtttctattttggagggcatgacgcaactacccagagttttaacataagtaaaactgtaagttcatgactgggggtaaagctacacaatagtatcattcaagataaaatcagtgaccccatttaggtagtgaaagccacaatctacagtccctttcaatatttcacatgaggggctttggtgtggtatggtgaaggcattctctgatcaaaaaatgcagttaccctgacaacaagtaaccgctgggattctgcattctaatctaacataaccagactatggatttaaagttcagccggcagctgctagccggctgtagcccagacagatgttggctggagcatcgaggattatttgccaca

SEQ ID NO: 33288 - DNA, 1045 bp, Bovine  19866881052597
  misc_feature (1)..(1): n is a, c, g, or t
nggaaaaattatggcaggcaggaaatgtaacagattttcaaattctagtagaaatagtttctagagaacaattgccactgttttttttcttttatatatgcatgtgtatttcaaaagtttgataattactactttgatagtgtgaaacacatgctttacttgttgacataagttatttctgttatcactaatcaagtacaataggctgactattaatttcctcagtgcttatttatttaggaatgtaagcttgaacattttgctgaaatccattcacataccatgtattttctgctgtcatagaaaaaggtcataacagacttcaaacagagggaagtttttgtttccaaaataaagtagtaatcaataaaattaaaagaaacaagacagaaaatgtgatataaaatattgatcaatactttcctttcctattttctctcttctcatggttttggttatacttccttcaccgtatttataccagactcccatagagataaacatttaaaaaaaagacctgtggtctccgcccaggacaaggctgatccttccagtcttcttgacttctgccaccacatcagccagcttttcacttgcttttcccacacaccttggattcttcacaatttgaaagggactgtcatcaagattatcagcaaaggacaggtccccataatctttcacatcacactctataattaaaagttttaggttagtaagtgaagtagctcagttgtgtctgactcttttcgaccccatggactgtagcctaccaggctcctcaatccatgggattttccaggcaatcgcactggagtggataggccagttccttctccaaggggatcttcccaaccttaggggatcgaacccgggtctcccgcattgtagacagacactttaccgtctgagccaccggggaagttaggttagtaaaggtgattataaaacagactttaggataattccaattttaccaaataggtgtatttgcaaaaaaaaaaaaaagaacctggaatggctgtaaaatctcatgaaagtaaaa

SEQ ID NO: 33289 - DNA, 697 bp, Bovine  19866881090388
  misc_feature (1)..(1): n is a, c, g, or t
naatgagttttaaataagtatgtcttctgttcgtggaacatctattcttgttctgatttaaatgactggattaatgattattatttctaatgttttctatgttgccattgattgaaactacttgcaatgttcaaatcagagttaaataagcaatgcatataaagagtctaccataaagcttcgaggcattttaaaggcactctaacatttgttttgtttaaaaggaagaaagaaaggacattttgaaggatttcagaggcaaaaatttgagccattttaataattttcaagctcactgcactctgcaaacccaatattacctccaatttgtgatattacaatggaaattatagagcacaagtcagacctggaaagaaagatacagaaaattacttaacatatcaaaaggaatccacgtttactctaattttcttctcggttatgctgacaatctctctcattttggaatgccttccatagatttgtaaaaggccatagacggacataaatggcccagtagagggttaagttgaaaccaaaacattgctcaaaataatcccagtgaaaaaaactatggcaatccttcatttgatgatatgcttccttgtagtgtatttttaattattctaggataaaaagaaatttcaggtgaatttaaaaatccaaggtagcagagactacagctttccatcttttt

SEQ ID NO: 33290 - DNA, 833 bp, Bovine  19866881096563
  misc_feature (1)..(1): n is a, c, g, or t
nggcacctgagtagactgaggtgctggagacccactgctgacggcttgcggaggcacggcagccggttccatcttgctaatgtgagtgatgaatcgaagacggagttttaaagccggttttaaattacagataatcttttctacctaaaaaacaaaagcacattaaaacatattttcaccagagaagttcaatttcccacttttaaagaagtgacttacacatttcctgagacaataaaccagggagtagaacaggtggatgagaagtttctctcatattttgtgttttaacaaaagcagataaaactatttctttcttacctgaaaaaagcatgtgttgtccctcacacactattatatatatgtacatttgtgtatgtgtatctatctatatatgcatacacttaacagaaacatactcactgacctagacagccagtcaccctcctgccaaaagctagtagtttacactgggggttctacacatccaccaagggactcatccttttaaaaccccatctttatgcaaagcaccattatatttcaaagatctttgaataactcaggttcaaaacatttacctatacagttaactttttttggttttgatttacacctggaatgcaaactaaatcatattagacttactcttacttaaaatgctttaaagaaataaatacatcaagtagttccatagctttcttagctttacttatatattcttggatcctactagggaaaggatcggtccattaaaaatccttcctttctgtattcccttgtgtcaaagtttcttaggctcaaatataaggaatatgctaaaaaaaacattt

SEQ ID NO: 33291 - DNA, 874 bp, Bovine  19866881107970
  misc_feature (1)..(1): n is a, c, g, or t
naaaaataaattactttttgaaagtcttacctgtcacggtactcttttgacactttaaatttaatagtgtatctatttactaatttggacaaatttatgataggtgatgttatcctattgcatagaagtatgaatagcagcattacttgtaatagtaaaaactagaaatgtgagtaattccttcaatgatggaaaaagtattagctcagtcatacaataaaatgaatgaggtaaaaatcatatatggaaatagcttcgtaatttactgacaaaataaacagaggctaaaacagtaacattagagctcattttattttaaaaactaaggacatacacatgtagaaataaacttgaaaggatacaaactgaactgctaaatttggttatgttgggaggtgggattgtggggtggacttattctttgtagtttatattatgcatctctctgttgagaggatgttttacataagcacatattctatttccctattcttgagctcagacaaaactcagagcaatataaataaattcaagaagataactcatcttaaaagatatgcaatgaggaatatgtagaatacatttcaactctcctgcatcaaagtcccctcacatttttttcagccaaattttaagagtgatctttaaatctttttcctcttaacaccagccaacaacaaaaatgtgtatgggtaaggaatatttttatatccccttgatgcgaaaattatgtctatatttcttgcctctttgttggtgatattaaatggaaactttaattcacaagatttaaaagtagactctgtggaacaactcaagtgtaaaaaccattagtggcaacagcctttgctaaatactgacatctggatggtgt

SEQ ID NO: 33292 - DNA, 1464 bp, Bovine  19866881142034
  misc_feature (1)..(1): n is a, c, g, or t
ngtggcattgggcaatgggaggacagagagagaagagctacaggggagatggcagttcccccatggggtgggaacgtctgtcggtggcatctagacagcccctccctgggaaggaaaacagtacttggcaaagatctctctgcccctcccctcagttgataaaccagtggaaccaactgttctctgtgtgttcccatcacaatcagcagtgaccatgaagactaaagaccaaagggcccttcacgtaagacctggcctgaataagatactttggacctttcaataaccctggtgaaactaggggaagagaatctagtaacgaatgagattgaatttcccatcattacagaaggatggaggtttagaaatattacattttatttaaatgatgacagaaaattatatattttgcatcctgaaattaaggtatttggtggtgtgtgtgtgtttatattttgtgttccaaattatcaggaaattgcaaaccaaaagtcaattctaataatatttcaatagtttggaactatgaagatagttatccatgaaactatgtttatacatagaaaatagatcaccagacagccttcaaagatttcatttcatttaaaattaaaatcatttcatttaaaatgctatgtatctaaactggaaaatattattccaatatggtaattaaataaaagaaggaaaagttgggcacatttttgattattctttgttgtgaatgttggcacttgaggaaaagcagattgttgggagttaggttttgttctatctaatttgctcaagaaagtaggaacaactttcagcttagatggttagagcgctagtcgccagatggtgacattgacccatcactgtttggttgccatttcaggaaggtcatggaaacatcgtccctggggagtatggcagggcacggatctcaggggcaagaggcaaccattaccaggtgtcctgcagaaggcaagtctgacacgcagtcctctcgggaacttcgtatgcccccttttgctccatgagctgggaggccacttgctgttggtccatcacagttgcacacggtgctgcacttccatcgtgctgagctttcgggatagctttatacaaagacagtgtgggcggccattctgctgtgtgatttgagacacattaggccagaaccttgccgaaaaaaaatccaccctcactaaccctgcagcgtataaggtagaggtattaatgtctttggatgagggtccctgataaaatgcacatatcttctgggaaggtaatcccttttggaagaatttgcattagtatcttactttcacatagaatggaaataggaaaacatgcatttgttagatgattaaatattaacaatggatattttatagggaaatttttcttctcagttaaaaatagaataaaaattactaattacacgtcatgcagactctttttccgtctaaacaatgttaa

SEQ ID NO: 33293 - DNA, 691 bp, Bovine  19866881160380
  misc_feature (1)..(1): n is a, c, g, or t
natttgaaaagaccctgatgctgggaaagattgagggcaagaggagaaggggctgacagaggatgagatggttggatgacatcaccgactcaatggacatgagtttgagtaggctccgggagttggtattggacagggaggcctggcatgcttcagctcatgggattgcaaagagttggactcgactgagcaactgaactgaactgaatgtctgcactcggatttcttacagagttcatacgtacaaccacatctcaataatgcaaaggacagactataggaatctctattactaaaaaaatgtaaaaatttagaagaaaaaaacagaaaaattttccagctcattagcagccacaaaagtgactaaagaaaatgggcaaccccatgagtaggattagttaccatatttgctcactcttccaagtgcactgcccatatacagctcctggctaggggaatgaacttgtcatagtttactccaaatcctgtgcttttataatttggggactatggagttttaaagaacagagtacttcatacaagcactaaatggtctgtgaaaagcaccatcattcttgcaaatccagtatgctgtctgagcaatagggtttatgaccctagagagattaacaaatgacttcaaatgccaaagacttatcctcatctgtcttgggaaatcctttacaagaag

SEQ ID NO: 33294 - DNA, 624 bp, Bovine  19866881198019
  misc_feature (1)..(1): n is a, c, g, or t
ntggaggtatgctgtctgccttgaatctgaaaagcaagagcagaaacaaagccctgagtgtgtgattgaagagcaggactgcggccaagcttgctcagcccctgcacttctgcaggggttagaagggtgggagagggggaacggatgctgaagttgtccattgggcagtcagaatcctagggattcccaggaacgtggagaaagggtcagacacacctttgagaaagaagagataaaacatgctctgttggatttcattttgaagctttcatcccaccttattcctttttcatcccaactttagttttacaataaacttccttctttgaaggaagtgggatcaggagttttggggcatctacgtaatcactgaaaaattctcagacttaacaaaagacaactgaatttgtggatatctgtctgttccttcctttcatgttatctgttgtggattcaggtaagatgcagtatctgttttccctgaagattaaaacaaagtgggacttaccgaccactctgcattgtctgtcttggaacatctcacgttgaccggcaggctaaggacaagcttattgaaggcaagaccttcctttttagtccatttaaacttgttcattgcatcca

SEQ ID NO: 33295 - DNA, 2528 bp, Bovine  19866881237367
  misc_feature (1)..(1): n is a, c, g, or t
ntgagagctcatttttgttttttcaggagtttttctctgtttttttttaatgcctgagtttttggtctaaattgtggcaattttgtgtatccacttgtggatcaatgattttattcttaatactattttattaggctttttatttagttacctagtctttaatacacatgattttaatagctaaatgctggccctcttataagtggaccaaagatcacttaccgaatccaagttggttattgccaatttttaattcaatcatcaatccctaatttcatttcaagttacattgtgacagacatctgcatgaatataacttgatgcaagcaattactgggtctgtttttctaatatttattatttatcttttattggctgcaccagatcatcattgcagtgtgcaggatatttagttgcagcgtgcaaactcttagtggcctcatgtgggatctagttccctgaccagggatagaaccccaggccctttcactgggagtgtggagtccctcatgtgggatctagttccctgaccagggatagaaccccaggccctttcactgggagtgtggagtcttagtcactagatcaccaggaaagtctctactgggcctaaatttaatttgcattttgtgtattattagttaaagttttcctatattgatcactaattccagttgactcttctattttttcagaaacttttcctcaatgaagtattaaggagcttagagtgtttcccatcaaaacatattaactctttacattgtgaaaatactatgtattcacatactaatttactctgtgtggtaatagatgttaactagacttattgtggtgatcattttacaatatttgaatcattatgctatacatctgaaatgaatatgtttgtatctcaacttcttaaaagttaaaatattgattcttcgtcatgttagcagcaattatattgtttcttgcatatagtttacaacaagtctttgtgaggctgttcttttgctcttctgaaattcttaattaccccagaacctaaagttggcaaccagaaatctagatcatcgggtttcagtattcacctactgatggaaactggtttgtcatgatggttgctgagtttgacatctataatctgttacaaattagaaatacagcttttgatcattgtttctttaaaaaataaattctaacaaattcaaagttcttctataatattgttcctcatcttcgagtgttctttcttaagagcaatcaatgagcagagttccagttaagtcacatggtgacaggatatagccagtaaaatcaaagccacgaaaaccaatggacgtggtgactgtgaaatactgtagtgtttttccatatgcaattcatgttttgtatgtatctcagacaaagaagggaagaaagactgagttaaatcataatatatcctaaggctggatcaatgagtaactcaggaaaagaaggcttaacacagaaacacttgctacaatttaaaatagccattctgatccctttttgtctcctatgtgctttattttgtacgtgtgtcttaagtcgcttcagtcatgtccagctctttgcgaccccatggactgtagcccaccaggctcctctgtccatggtattctccaggcaagaataggagtggtttgccattcccttctccaggggatcttcctgatccaggaatcgaacgtgcatctcttgtgtctcctgcattgacaggtagattctttaccattgtgccacttaggaagcccatttaaaatattacacagattcaaaacatgtggtgaaatcagattcctgcctacagagctaatggtactctaaggaagttggtctctacatatttaataattttatttattcacttttggctgtgttgggtcttcttttgggcttttctctacttgtacaagcaggagctactctctagttgcagagcgcaggcttctctttgtggtggcttatcttgttgtggaacatggggtctagggtgcacaggcttcagtagtgtggcacataggtttagttgttctgctgcacgtgggattttcccagatcagggattgaagctgtgtcttctgcattggaagatagattcttcaccacccagccaccaaggaagccctctacgcgtttttgatcatgtactatgaccaccaaaaatacgcactattgtcaatctccatgttaaatactaggaaagtttgagttctggggggaggagccaagatggcggaggagtaggacggggagaacactttctcccccacaaattcatcaaaagagcatttaaacgtcgagtaaattccacaaaacaacttctgaatgccggcagaggacatcaggcacccagaaaagcaacccaactcttcgaaaggagtgcgactgaacaagtgagcctaaaaaaaaaaagtttcccccaccgtcccctttgtgtcagggcggaagccagacactgaagagaccagcaaacagaagaagttataacagagggaaacgcctggaagctacgggca

SEQ ID NO: 33296 - DNA, 1371 bp, Bovine  19866881272819
  misc_feature (1)..(1): n is a, c, g, or t
nctggcaacctagtaacagtcatttcatatacagaagtgctagatagcatataaaagatcaaggaaattatcatgcccaggaagattcatgtgattataataacaggataaggtcaaggaaatttattatgaaagatgattgttaaaagtattatgagaaaaattagacacacaaacctcacagcctgccactgtcgatccaccaaaagattgactttgtcaattctgacatttttggcaaaatgtaggcgttttggcaaatcaggactcaaatagggcttgaaatgctgatcaggttttcggcactgaaaaagaggtaaattatttcttcatgacacctataaaatgggaaaactatgcataaatgtaatggatttccaaatctctttgcacctctgggattattaggcatttgcccttcctcatctcaccaacaggacttcttaagggaaaacagtgtgtggatttagagtctgtatattaaaaattcactacaccgcccctccatcagcatggctacactacaggtaaaccctcactagcaggggtaagaggacccctcatgcttattcaagatcaggatattaggtgtaagagaaaaaaggagtgattaacataaaggcatttctgcttaagcagtcattcctacttcaaatttgcagtgtgtcccaggttatagtaactattctttccctagtgtttctttatcttcaatcactcgcattttattctgtttttactataattgcatattacctatatgtaaataaatctagccccaccccaagcaatggtaaacttataaatccatataaatagatatatatttgcaaatatactttaaacacagaattattaaaaccactacacactctccagaattggtgaacttcaccttgaaaaatcccaattgctttgagctatctagaatttgccctgcttttacaacctgagatgcaagagccaattaaaagcagtttcaattatatttaaagaaatgactgctcttaactgtataaaaagatctataaaatccatgatttgctatttcctgatattaaatcatacaaaaaatgtgaaaaatggtgttgcccaaaactcagtagcctagatcctttgaatgaaacatcagcccattcaatttagaagtcagtgaaactggtaccaaaacaaatttcctatagtggtgtcaatttcaaaacaaaaacagctaaagtaaaagcaactgacaggaatataaaaaattgttgactgaggtttaagaaataaattacaaatggtttggactagaaaatatagaatacaattttcttgaaacccagattaaagacattgcattaatctaaatatatgtattagggaggcagtata

SEQ ID NO: 33297 - DNA, 1051 bp, Bovine  19866881300748
  misc_feature (1)..(1): n is a, c, g, or t
ntcgtattatgattgttgtttgttgctattcagtcgctaagtcctgtctgactctttctgtgaccccagggactgtagcctgtcaggatcctctgtccctgggatttctcaggcaagaatactggggtaagttgccattttctcctccaggggttcttccccacccagggatcaaacctgggtttcctgtgtcgcctgtgtctcctgcattgataggcagactctttaccatctgagccaccagggaagcccaatattatgactacctaccatttttcatcacactttactgtaacatatcatgatcatacgttactgtaacagagagaaaaggattactgacctctctggtgttatgactcagatagctttctggaatactaatagtgctggacgagaccttgctcctggagcagctagcgccacgacaggagggtctgcagctgtggaaggagcacattccgttccttccttgatcagccagattaaacaagagcagggctcccctcatctctgcagctgtgttccagccgggactggagaggtgcccctgacacatggtgtttcctactaagaaaagtgctaaaattacccagaagttcctcaaatcctggcacgagggaggccacacagtcagcacggctcccctctccttttcagcagttttccttgctatttttggagcaagttacctgtggcattttggaggatttatcattgttgtgtcttaaacctgtaactctctagtaatgaccaaatggtggaaatttcagcaaacgcagtttttgactatctgaattcctccacatgcacacctggcatttgcaacctgagtcctaggaaacctcatgaaataaagtctcctgacgggggtgtgtgcatctattgggccccatcttcaggattgcctctttggggcttccctggtggcttagataggaaagaatgtgcctgcaatgcaggagacccaggttcaatccctgagtcgggaagatcccctggagatgggaatggcaacccactccagtattctgccggagaatcccaggac

SEQ ID NO: 33298 - DNA, 938 bp, Bovine  19866881320326
  misc_feature (1)..(1): n is a, c, g, or t
naatttaaaattaaagctgcataatgtttgacttctaagagggaagaacatagctttaactttaaggtctttttttttctaatagaggaagtttccatttcagtatcaaataagtaccacacattgaaaaacagacattgaatatttagatatacatctgtatataaagctagtgtaaaccagtggtgactacttttagatcacacactgctttgtttgctctcttgtcataatatgtgattcctggaaatccaggattttcatattttgaattagattgcaaaattaatactgttatcaccatttcatatatctttaaaatgatctttgttcaagaaataaataacagaattttctactgtgtacttccctctgtcattctggaacaatgatgtctgtagtaaaagttaatgggaagcctgttttaggtgagacctgaaaactaattttttatgaaactcatcctctgtgataatataacatgatgcagctttaatggactaaacctagccttaactttctaagttcaacttcattccatgcttcttggcctctttgttacaatgaatacccattaactggtaacttctgaaactaactgggaggcttttggaatactgtatttaatctctgccctacagcacaagcagcgctgccctgtgctggaggaccagttggtggatctggtggtttatgccatggagcgatctgagaccgaggagaagtttgatgatgggggaacgagccaactcctctggcagcatctctcgagtcagctcattttctttgtgcttttccagtttgcaagtttcccacatatggtcctttctcttcatcagaaggtaagtacacaccctttttcagagccacttcacctgttgattagtatattttagacgggtgtatctagtgaacgcaagttccaagctctgatttct

SEQ ID NO: 33299 - DNA, 3557 bp, Bovine  19866881462920
  misc_feature (1)..(1): n is a, c, g, or t
nccgtatgaactgggatctgtaaacaattagtgatctctggtaaattcattgatagaaaattttaggaatatgtccaatttgtattgagtagacttgtaggttgttctttaatgcacagctccagaatggtaagaaatgtttgactttgaaagctaggattttaatttcacacaagatatctttggggggccaaaatatgaaattaactttcaggggatatgtttccctctgaaaatattgagaaaggaacagttctcttttctgggtgacttagtcacctgcttaaggtcagactcagtgaatcttatgaggtgactttcagtccaattattctgtttttatatggggttcagtaatcaggctgttatgagggtttctctctagacttccctttttagaggccttatgaaggctttctttagttttccctccctctacctaatactatttcttggggaatggatagcattttgacctcagaactgactgacagtttccagggtctcttgtggttaagaagatcttgctacggtgggccaggcccaggcctccacaaagaggtagaccataaagaaggctgagaaccaaagaagtgatgcttttcaactgtggtgttggagaagactcttgagagtcccttggacttcaacgggatcaacccagtcaatcctaaaggaaataaatcctgaatattcattggaaggactaatgctgaaactaaagctccaatactttggccacctgctgcaaagagccgattcattagaaaaaaatccctcatgttgggaaatattaaaggcaggataagaaggggacaacagaaggtgagatggttgggtggcatcaccaagtcaatggacatgagtttgagcaagttccagaagatggtgaaggacaaggatgcctggtgtgctacagtccacggtacgcaaagaatcagacatgaccgagcatctgaacgacaacaacaaagtagtatccatttactattctataaatagtggaattctattctataaataggccaaattctataaaggacataacatcctagtattacctagggagttcacaatccacactactgctggctggaagagctagaagctgtcacctgataattttctgcatttgaaggtaatccaatgaaaaactccatcctatcaagactgttaatccaaccagcaatgcctccttgagaacagtcattcaggtgacatttttaccattgcaatgatagcattaaggggctacagtacagaaaacaaatcaatcctaaaaatgccacagattccaagagaatcagagtgcttgcttattcaccacctgacaatcatagtctatgacggcctagagcttgtcccttgggtcatgccttggaccattagctgcctatgtccctcaaattaacctatgaaaggggcattacactgctgaagcacaaggcaaatctgaatcaaatctcttttgagacccaaagtggaaaattctgaacccccacctcttctctcaactttttcccccttttaaatttctaggagattaacaaaaaaggttttttattagtattatttcatgttgtccctctggctcttctctcccccttcacctccccaccaagtctaaaacactagggatctctggcctcaagggtgctagcctgttaccttagagactgtttctttacaaggcaatagagtacagagggcatgcctttgctgcttaccttggcaaccatgaactgctgaatgctgttctcatgaatgcaagtcattcactgccatctggacatgcccacaggtataaacattttttcatgaaaggaccagggaatacgcattgcatcaataaatctcttgaatgacaaacaaagccatcccatatgttggaaaagctatataacattaaaattaatataagtctcccatggcattacttccaggcaaggtcaaacattcagtttagatatcattcaggcttatcaggcaaacagcatgaatcaggttggggaatgaaatatgaagaagggggtggaaagaggctgtcactgtaaaacggaagaccattgagcttgacccaagaataaatacactatctcaaagagtctaggagagcttattcatttctcactagtatttctctagttggaaaccaagagtaggcttttttctcccccttggctcagtgaaataagataggcatttaccccattcaaaggcatgtttatgttcctcatagacaaaaattacagaagaaattcttaacatatttataaaagcacagaccttgtacttcattgagggtcagaggtggggaagagggtgtaacaagggctctcttatgttttcctataaacaaagttgctatgaaccttggaagtagtcatatttagccttaaacttcaattcttccaagtgtcaactttttaattcggatttgttataatttactgcaaaacactttaataatttactagtttctcatatatgatgtcctttatacatctatatcatgctcattcccccccacacacaccagggaaggaaaatatacagttctagccacactcaggcttatatgtgcccagtcatgtctggcactttgaaaccccatggatggtaatctgccaggctcctctgtctgtgggattttacaggcaagaacactggagtgagttgccatttccttctcttcacaagcttatataaccaaaataaaatttctcccatgaaccaagacttcccatggaaagagaagatggggagaaatcttagccaaaaaaactgttgggatattcttaatatgacaaaacaagggcacaaggaaggaaaagccgagactggtgggcacaggacaaacaggtgtcagggttttcctaattttgccacttttgaagatgatacatcttctaaaaatcattagggaccaatgaaataaccagggagagaggtaaatttctacaaaaattacatcactcctactaacaccccctgccacaaccactgattaatctggtctggtctcaaacatgacttgggatggaattgggaactctggaacaacacagcctcttgccataacacgaagtgatattttttttccttccttggcgataaagttttccagttccgtaaaaatctttgtttaccagatataaaaatgttcactttcaagctgtcaagttgaccttgagctttttcttctctcccttccccctccgccttttgcccttaaaagttcaggatgtctctagcagtaactgttacattctgtctagcaagcctggattgcggacagtgatctaagctctgggaaaaaacatggagttcacccaaaaattgagagagacatgctctcgccccagccgccagctcataggtttcaaagctctgggacagacctcatgaacagctcggggctctagcgtgtaaggtggcagcgccaatgcaaacacagaaagcacttcagcaggtataaacagcagccacacaccaggccaggccccagaaggcaggccataaagggaagaagccaggccaccagcccctgcctgcgt

SEQ ID NO: 33300 - DNA, 830 bp, Bovine  19866881520168
  misc_feature (1)..(1): n is a, c, g, or t
ntagaatagttttactcacttgcatattcaaaaatgtattatcagagccatggaatcccccctcccccaatatttcctttctgaaggattcctaattgtcacataatacgaattaataatgcaaagtccactcataaagcaaaatcgacacccatgacattatttccattaataaagagcaactattttttgatagttaacaatttatttgtaaaaagtataccatttagcctaaagaaatgcttggaacgtagtagatgttcactaaatattagttctctcatgaggataaggaccttctcttctttcatattctttttctaaacactgaaagcacagttctctaataagggagagaccttgtaattctgttgactgaattctggtttactgtttaggttttgctggacagaggtatgtatttatcatctctggctttctggcttccaggagttaatgatcaagtttgagacattaacaatatgcacaatccaaataatttgctgaacataccaataaactgaggtttattgatggatttagtataacaagaatgaaaaaaacagctctgtctaatgaagatggtaattgctcattattataacataaagagcttttgccaatcatttgttagactttgaagctattattaggcataaccataacatgtagaaaagacacaaggcaagtggaacataagaaataatcaagatggatgtgaggggacagagcagtggttgttagctggaggtggccccctctcaccagggaattgcagcaatgcctgcacatatttttttgttgtcactactatagacagtactttttca

SEQ ID NO: 33301 - DNA, 1727 bp, Bovine  19866881582789
  misc_feature (1)..(1): n is a, c, g, or t
nggagattctcagggtcctgaacggattctaacaatactctctgtgggtataatgatagaataagagaggaaactgaggttcaaagaaaccaagtaactttctaacgttaccccctgctatcccctgaatgcttgtgtacccctaaaattcatatgttgatatcttaaaccagaaggtgatgctcttaggaagtgatggctttgggagataattaggtcatgaaagtggtgcccttataaatggtataaaagtgaaagtcactcagttgtgtctgactctgtgaccccatggacatatagtccatggaattctccaggccagaatactggagtgggtagccattccttctccaggggatcttcccgacccagggatcaaacccaggtctcctgcattgcagccagattctttactagctgaggcaccagggaagcccataaatgagatgagtgcccctatacaagagactccggagagattctttgcccattcttctgccatgtgagggcacaatgagaaatctgccttctagaaaaggaccctcatccaactatgctagaacattcatcttgggttttcagcctctgaaactgcaaggaataaatttctcttatttgtatgttacccggtctgcagcccagctggactaagacatcccccttatcaataccagtacattagtggagaatcctagctctttggtccccagtctcaaagcacctggcacacaggagcactcattaagtgcatattgagtgaaagactcagtcttctacgattgttacattgaagttcagagagcacagactcaaatttaaatccctggctactttgctacattatcatcattcttggatgacggttgttaggacccttgaataagaaaagaataattgaatatttctccaaatagtctcctttcacactgacactgtcattgtgcttaacaaacccacatactgtcaccatgacaacgtactgtccttagtcccattccgaccattaaacatactttataaatagaatattcggtttcattctatccaattttgccttaactttttttgtgtgataaagccagagttactaaacaatatactatgtttttgctttaaagctcaggctatggtgctctcatgaggttttgatttaatagttcacacaggtcatatgagacttgtgatgagcatttaacatttagaaactatatatttggttcttgtgacaagtagcaagaaacttttatctggtgggtgtaaaattaggagccagaaacaaaaataaacaaaaatgcctttccttccctggggacacttacagcacaacacataatttattcatgtgtatgatgcatgaatctgtacatttaaaattagagataatatggtcagatagtgtttccctcatttcgtctaacacaaatacgatgactattgatgctctcatatttgcagtttgttttacattttactctgagagtcgcatattatcctaatgctgaagggtttataacttgaaaaataacaagacagtcaaattagcaaaagaagagacagcacattaattccaatcagtgggttgtcttcctgtcttattttaaaatatatttggtaaagaagcagtttcctttacctcagttaataaaatatactccgggaaaattttcagaaaataaaaaacatttcggcctatttaattatattttattttcagtcttaatgattat

SEQ ID NO: 33302 - DNA, 1249 bp, Bovine  19866881702684
  misc_feature (1)..(1): n is a, c, g, or t
ngctggctgcctaagccccgagaaaaagaatcaaatcttcttctgttcatttttatttttactttttaggtttctaggctttgggaatctgccagaaaaagcctgtgaacagccttaggagacctgtttgcagctccccctgggagttgttagccaagtttccaaatccgctcctcatcagtgagacctgtccattgggagtagctcaaagatactctttcaaccaagataattagcttagcaaaagggaggcattgtggcttggagagctcaccattgattacaggttgagataaagattgttctttcctttttccctcctgagaccttggatggtaaagcacttttgaccttgtgcagtagagatcatctttcccattgagaatactgtggggaggaatgagagggaggtggggaggagtgcgtgtccattgtaccacttcttggctctcctgttttccccatcagccttcacataacccacaggcatgtgacgctcaacggtcacatcaggggaaaaacatggccttcctaaggccaatgacggccctgaaggggttcagaatatgccacctcaaggtatgcctctttgacatactgatgattttgagttgaaagtacttgagaagcagcaggtacagatgaggccctctgatcttctctttctgtctaaaagcacagcataaaatttcccatgatggaggtgcccaccctgcaccaggaggagaacatgctcatcatcagagactgatgtatcaaccaaacctactgaattttctattacaggcttccttggtggctcagacagcaaagaatctgcctgcagtgcaggagacccgggtatgccctccgggtcgggaagatcccctgaagaaggaaatggcaactttactccagtattattgcctggggaatcccatggacagaagagcctagtgggctacagtccatagggtcacagagtcagacacaactgtgtgaataacactttcacttccatattttttaacggtctcacaatttgatgccctcccccaaatccctttgtcttatcacattcccacaatttatcattatttatttatttttttggccataccccaaagcatgaaacattttacttccctgatcagggattgaacctgcatctcctgctgtagaagtgcagagtcttaactgctggactgccaagggaagtccctgtcattttccttttgaagacactcatgaacacatgaaaatattaaat

SEQ ID NO: 33303 - DNA, 1658 bp, Bovine  19866881771391
  misc_feature (1)..(1): n is a, c, g, or t
ntaagaactgaagtgaagtctgtagaaatgcaccgtcaagcattgagtgaagcccctcctggagacaatgtgggcttcaatgtgaaaaatgtatctgtcaaagatgtttgtcatggcaatgtggctggtgacagcaaaaatgacccaccaatggaagcagctggcttcacagctcaggtgattatttggaaccatcgaggccaaatcagtgctggatatgcacctgtgctggactgtcacacagctcacgttgcttgcaagtttgctgagctgaagactgatcgtctttctgggaaaaagctggaagatggccctaaattcttgaaatgtggtgatgctgccatcgttgatatggttcctggcaagcccgtgtgtgtcgagagcttctctatcttccccagggctattttttgctgtggatgacatgagacagacagtcgctgtgggtgtcattaaagcagtggacaagaaggcagctggagctagcaaggtcaccaagtctgcccagaaagctcagaaggctaaatgaatattatccccaatacctgccaccccagtattaatcagtgttggaagaatggtctcagaactgtttgtctcaattggccatttaagtttagtagtaaaagactggttaatgacaacaatgcatcgtaaaaccttcagaaggaaaggagaatgtttttgtggtccatatgttttgtgtgtggaagtttaagttatttatttgtaaaatcagtactttttaatgaaaacaacttgaccaaaaatctgtcacagaatttgagacccattaaaaataagtttaatgaggaaaaaaaaaatgggcagattctttaccaaaggagatatatggatggcaaataagcatatgaaaaattgcacactatcataggaaaatacagattaaacgcacaattaaataaatgacatatctaatagaattgctaaaattaaacactaaaacagtggacaacaccaaatgatgatgaggctgcaaagatataagactcccctgtgttggaagatgtgagtgagtgtgattgacctctaccgtagagagctcaccagtcaggtacctgatattggtccttgttctagctgtcactctttgtgattctcagtgtggagtctctctggagtgggatagcttcaaccttctcttgtgtattttttgagctgagactttctccacactgtggcttatccattagtgtccactttctgtctcttaaaatttaatcaaaacttctagtcaaccaatgtacgcattctgtctacccctcagcattgcaaaaggaacagaactagacactcatgtcaacttagaccagaagttccatggactagatttgttctatgtactattcacacttctaaatatgatcgttgctttgaatgtattctcttgggagaacgtatactttttatagtgacaccattgctcaaaacattttttaatgtctttgattaaatgagtgaacaaggtagattttttaccctagaaaatgttgcactggagaaatataattcaaaacaaaatatcctacccacccagaaaacctctctacaaaagtaaaagagaaagaaaacacttggttttattattgaataagcattaaattagagtgtgatggacatcacaagcaatctgcaaa

SEQ ID NO: 33304 - DNA, 752 bp, Bovine  19866881816176
  misc_feature (1)..(1): n is a, c, g, or t
ncatattttcccacaactaattaaggctttatgtgtcctcaacgccaactctcctgctgacaatggtttaattgtggccagtggtagacaagcactcatgttgttttccaatatgggcaaatatttcacaaagttgcctgagttcatatgtatggttaatggtgacatcaatttcttaataggcacagtgttcatttatttgtgattttcatacagtgaacatactgtgaagcatattatgaaacaaatatgaagttattcattccttaaaataatttctgttgtttttgattttgagaggggcaatatgttcatggccagttttattagtcagttttcttttgaaaaatctaggtacctgggattatgtggtggtaaggagaatgtttatgtttctaatactttcccctgctgtcttgcattcctgaatttatatgagctttagcggaaaccagaggcagagagattttaagtgggctcagactaggagttcagtacaattctttttttgttattgttttaaaacgagcgtctttgtaacccaaagttcctgtcctttcactggtaccacagaacttcttgtgtatttctccctccatgtgacaggatggaattctagcaattttctgctttctaattcagaaattactctgttagtatgttgtggttcaagataattacatacaaggatgttttgagattcacataaaaaatgttgtaaatcagctctgtgttttaaaaatcagacttta

SEQ ID NO: 33305 - DNA, 1068 bp, Bovine  19866881987582
  misc_feature (1)..(1): n is a, c, g, or t
naaacccagtgtgcactgtgtacttctcagttcaattcagttgctcagtcgtgtccgactctctgcgaccccatggagttcagcgtgtgtacttttagcacatctcaattttcttaatctcatttcaagggctcaggagtcccatacatgctaccacaatagagtggatctaaatgatcctgggaagactccagacaaaattagaagatggcagcactttgtccttaatgctcttctcctctcttttccccagagagacaccttccttttccccctttcaaggacctgtcttctgcgattcaaattcttgctccaggaaaacaacagagcataggcatggaaatacattgcaatccaaggagccctggatttggaacctgcgatgccatttactagaccttgtgccgatgtgcatgcctgtgtgctaaatcgtttgtcgtgtctaactctttgtgactctatagactgtagcccgccaggctcctctgtctgtggaattctccaggcaaatacttgccatgtcctcctccaggagatcctcctgagccaaggatcgaacccacatctctttacatctcctgaactggcaggcaggttctttaccactagggccacctgggaagccctctagaccttgtagcacaacttaatttgaacttcagatgatattataaaagaaaaattttggtctttacattcattcaacataacagttatttagtgaaaatatttttaaagcaaagtttggaataaattataaatttggtttactttttataggccaagaagagtattggttttccaaaattggacaatctacaatctcactaaatatggcaatgaaaatcaacataaaaggagacatttgtggattattaacacttgtttaaacctcacagtttttcctacaaggtagacacatctaaatgctgtcacatgatagcagcttagttcagactatgaatcactgcccttccaaaaggaacaaaaatatacaattattaacttcccagaaagtgaacacaatattggcaaattcaataagctattcactgtaagtcagttaga

SEQ ID NO: 33306 - DNA, 1085 bp, Bovine  19866882030157
  misc_feature (1)..(1): n is a, c, g, or t
nacctagtttgccttaatgttgaaatgctatttattctacgattgaatatcattgtagagcttctgctattctctgcccattttcatttcttgttgttgttaatttctagcctcctaaaattagttaataaatcaaaaatagctagaggccttcctaccaggaacgctttttgtttttaaatggtaggaaaacactgacagcatagtcacttagctgcaacagcataaggagaaaacacatccaaggcccatgtcacactccctttgaatggctccctaccgtgacacagctcagcctgccagagtttaggactatgaaactcatttcacattccattccaatcctctctgttcagcactcccttcagattcttgaaaccaagaagcctgtcacaattgatcccattctaaacacattttttccaagcaagtacactcgtatgtagagggtgtttgaaaattgatattatcaccctaaatcacagtgatcgcttttcctcttgggcccccttaactgtggtaggttattttcaagagctgcacaaagtacataagacaaatgagaatgagacaatgagaatgcggtatttggagtggaaagaggggattaacatggaggtagtatgaactggtaaaaggtagggcaaccctgcaactacatcagaggcagatcaagcaaatctttctccagacccatattataggacccatattataggacaactaaatgagatcaaaaccagctgaatgtaggggatggcgactttgcaatattaacacacatcaaacattatgcattcttcagggcatttcactggacccaaacaagattctattcctgagggtattttatagtagccactgaaaatgctcgtgatagtttgtatggtcagtgaactcgctttgaattcttagagtcctaattctctattgtcttatttagatagaaaaaccagttggaaagcaatacagtatatgcctctttatctggaatcaaaatacccagaaaagcaaaatgagttgagtggcaaaaacaatgataactgattatctacaatgataaccaaaggcactagtgagaatgt

SEQ ID NO: 33307 - DNA, 991 bp, Bovine  19866882036146
  misc_feature (1)..(1): n is a, c, g, or t
nggcctgagggaacagaaacctttcttaatagtctgctggcttcccattgttaattgaaaaagaaaaattattgcagtatagttgctttacaatgttgtgttacctactgctccttgaacacaccaggcacatgacttcacagcttcccccatctatctgcctgcctaatacctcatctcccccaaatctctatcagatatcactttctcaaggaggctaaccctaaccaccctatttattacttttagcaaactatcctccacattttcacaacacattgtcctggtccttttttattctgctttatttttttctttttatctatagtatttatctaacatataattttttttcatttaattttctcatttgttgtatctattttttattgtttttcttcctctctataaacttctcaagagtaggaatttgtcgattttgttcactgattatctaaagccatggaacaatgtctggaacctagcaggagctcaattaacattagttgaataaataggtttgatgagaagacctgaaataggcaggacatgtggttaatgaataggaaaaagtagttgtttccagaatcaagagacaacaagagaggaagacatttagtatcaaagtcattgaataaagatttgagtctaaatttttgttcttaatttgtggaaaactctgcttacatgctataagagcatgaagtcacaatctgaggggataattgatgatgaaatcatcagaataagcccattttctgagatgagatccagacagatcaggaggtaatatatgaatctattgccaaagtcagttgactggagtcactgtggacaatatttccggttttttctgtatcccagagtaacaggattaaccgtgccatcttccttttcttttgcccttaaattgctaatgtggccataacttataaaaatattcttgggcctaactgggaataaggactataatagaggcagaccaaattta

SEQ ID NO: 33308 - DNA, 1060 bp, Bovine  19866882051992
  misc_feature (1)..(1): n is a, c, g, or t
ntagaatactgtattttagaatacaaagaaacacaattcttattgttttacagcatgactaagaacaaagaaacaaatttccagatcatttaaatgtatatactttcaaaggtattaggttcccctagataaagcattcttatttttattcatattaatttctaaaatagagaataaaatatctcaaaaagctttccaagaatgttatcttttacactctacttaagcattcattgccagtgacaaagctcacaaaacttattgtgtaaaaatagaacgagtgaatcagatgtatgtattagagcaattatgtattatttagcaatttagcctacatttgtgttttatctttcttgctttaactcacttgcctggatcaaaaacaaggaaatgttctagaaatgtgaaaagagagcatagtgtttgaattggtagactgttataatactgctcaaatgattcctgataagtagcatttacttgccttctacttctggtttgattctcccccagtaatactggatattagcaagactttcttattttctttataaaaaccttctttacattcatgctttattaggtcatgtcagttagtctccttaagttctaagatgtttttgtattcagtatcaaaacttcacatatcaccaacactttccctttcctcagctgaaaaacccaagacaggaggatatgacatgtgataacatggaaacacgtgagctgttggctacagttggtttctggaaggggcccagttgttttcaaggtattaaaatgttttctaccacgtggtatcaattattaagcatccccacattcaatccaggttttcggctggactctaagaataaaaatatgaataatatgaataaaacatagagcctcttatctcaagatgctcagcatctagtaaacagagacacactgaagatataattcaatatacgttgtgaacatcatgtattcactcacacactgggaccctgccaagccaggcactgtgatgatcatgctagcaggcaggaactcagaggaaaaggtctggcccaagagg

SEQ ID NO: 33309 - DNA, 737 bp, Bovine  19866882079801
  misc_feature (1)..(1): n is a, c, g, or t
nacttataagatgtgatccagagagattcctgtatattttactttgtactctactctttatactactttatcttctactctacagctgatggtgacttgaggataaccaattcttattttaagccattattttcctcaattaactgtagattctaaagaagtcaccttttaactgctgttttcatctgctttcagctttgaaaagggacataaaagtagtacatctgcctctctgtccccttcacctcccccaccttagttgttttcttagatctaaaaccaccttcatgtgaagcagataatagtattattgacagcatttcaaaacggaaggatttgcaccaaaaaatgcttcacaccctaatggaatatctgtcatcaaactattttcacctaaaggtttcaaaacccttggagtatgaattatgcaatgatgtttgggttgaaaaaatatgccattttcaagaatattttaaatttctgagaaccttacagatttcaagctttatactagtctatgatacagctgtagagtgtaaatcatctacctttttgttttgttcatcatatggctctgttttttatcttcttgttgcttgagagtattaatgaaataacaaaatgaaaattgagttcttttatccttgaatctgataagatgccaaagccataatattgctgaaacacttaagcagtcatgcaaaactcataagaaattttaataattttcaaaaatt

SEQ ID NO: 33310 - DNA, 2064 bp, Bovine  19866880351679
  misc_feature (1)..(1): n is a, c, g, or t
ntttcctctttataggcacaaagaagcattctcaggggctcacctgccccaagcactagctccacgagtcgccttaccttgccaggtgggtaaacggcattgtgtcataatcttaggtaatcacagtcatcagaaagaactgtttcttcatgagtttagcagttgataaggggacaactctggccccttgtgtatccagtcgaccctgtgttagcagaggtctttatctctgtcatcctcattgtaatgctcttccaaaaatggacatcatattcatagttggtctacaatctcctgctcacagatggaaagagcagaattgtgatcttccttaatgttcatctggacatgctgtacaagtgtttctttgagaggcagatggtgctaggggaggagtgtgaacctttggtgagagagacagacctgggttcaaatctcagctttatttcctcccttttaaagttcaccattatatcataagctttctcccaggttattaaatatttttaaaatatttaagtggttgactaacatttcatatgatgatactataatttatttgtatactgtatccatgggtaattgggtccaggacccccactcagatgtcaggatccatggatgctcaagtcaccctacaggttaaccctctgtatctgcaggttgctcatctgtagataaaaggaccaactgtattcatcaataatctggcatttatataacttgcttttttatcattaataactttacattctgatatataaatcttctgaatcggcaagtacggatttagggcagattcctgtatgtagaattactgactcaaagagtatgtatgtatttaggttcttgacccattattgtcaatatgacttccagaaaggtagtattattttgtacttttagcagtatttgacctttcaatgtgctcttgctaatactaacattagtacttcattaatttgataagaaaaattatatccatattgtgtttgcattatttcatcttttaaaaaactgttttctaatattaatgtatcttttatgttgcttctttggggaattgctgtacttcatccattcgtagaaggaaagtaccttgcattttagctcttcggaaataggaatcttttgcaatctttggcacgttacaattgaattagcagcactttttcttggttgtacatgaaataatagttcactttacaatcggtggcagcttagattaagtataatctatatctgtttgctttttcaacctctgccatgtccgcaaccccgtccaacaactgaaactcagtgtccactgagtagcccttgaactttcttgcctttgtcactctgcctgtaacactctttaggcttttcttccctggctaatttctttttgcagtctctccaaatcatctaggtagacttagtgctgatttataatgatttgcttattagtcctttaaccattaatcggtggctttttcaagggtgaggacagccttattcctttatgtcccagtgcccactcagacgacaagcatatattgtgtgctcattaatgcttaggaggctgggtgcactgttgtatgagtgagcattatccagtttaatttatgaatagatagaaagcaaccgtcccctaaagaaggctcatcttggtgtttggattgatataaactaaactaacgtacagctatacgactatactgactgctttttagtattgagtattagtattgaatagaccctgctctgtagtctctggaagtccatttcatcatgtccctatttgtggttattgtgctgtgagaattatagtaattaggaggcaaacagctctaaccccaacaacttcagtgtgtggtgatagtgtttgttcttctttgtaaaatcgtaatattcctgggtcaggtgggatctctaatgtcatcctggacccctgtgagaacaggcagagctgacctggttcccatctgttgaatggggacctattgctggcctgctgggtttctgagacctctgagtcagaggctcaggcaccttgtctttggctttagtttggcaatctaa

SEQ ID NO: 33311 - DNA, 1128 bp, Bovine  19866880440810
  misc_feature (1)..(1): n is a, c, g, or t
ngccagtgcagctggagctggatgaatgaaggtgagagtggtagaaggtgagactgcaaaggccagaggaagcctctgggcccctctaaagatttggcttcaagtgggggagaggggaagccatgaacatttctgagcacagacaaaatacaatcgaattcatattttaaccagatgcctcaggatgctggattgacgactgtgtatagaatataaggtgtcaagagtgagagcacaggtgtcgtttaggccaagggagagatgaaggcagtttggaagtagtagtgggatcgccagaaagtggttagattctggatataattttaagacagtactgagaaaatttgcagacctttggtttctagagtgtgaaaaagaggagtcaagaattactctgaaataaatattcagttaacctttgttgaatggatgaataaatgaatgagtgagtgacatatagctatcaaacagcaggatcaggcttaaagcaaggttagtaggcccacaaaattctagttgtgattctcaactttttaaaatctgagagagagcctttctttagaaaaatgtacatatgtatgtatattccaaatttgtacacaatcttaggaggctcgagaacctcttgaaacccatccaggaatcccctgtgtgaagagagcctacatatcatcatataagcaactaacataaaacttgattttcaagatgcagtttgcttatacttttgcaaaaaataaaaatctctttataaagtacccactgcaatcttacaaaatagattcatacaacaggaagaagacacattgcacttctgtgttctatgtttgtaagtaatgattacaatacatattagtgggatatggcaaaaattttgaattcagtaacataaaaaatagtaattgggggccataaatcattcttaatattataaaaactaaagaaaatgacattttcttacaataagatcacagaagttaataaaacatcatttatttagtaatggctggaaatttaataactcagtctagtgacactggttttctcatgctggtagaagttttccttggcagatttaggtgcccttatttgataacaaattattaaaagaatttaataaatgcaatt

SEQ ID NO: 33312 - DNA, 3418 bp, Bovine  19866880478621
  misc_feature (1)..(1): n is a, c, g, or t
ncctgtgatactttcctgtcacttgtgagggcccaaacctgttaccatggcaacaaaggggaagagtatctttaaaatcacatctaaatagcaaattgagatatttgaaagagggagtcgagtttaattttattagccaacagtagcccaaataaagtagcatagtgttttggtttttttaaaatagcatgttattttactggatagagcaggtttatttaattgaggccttcactgtgggccttaaaattaatctctttgaaggttaggatgagctttttttcaaccagattctttttttttcttctttttaagatttttctgatgtgaaacatttttaaaatctttattgaatttgttgcaatattttttctgttttgattttttggccttaatggatgcagaatcttagatccttgaccagggatcgaacctgcatcctctgcattggaaggcaaagccttaaccactggaccactagggaagaccttcagccagactcttgatcttcaggcacatagacacacaggaagcagcctatacagatgtcccaaaaaatctatgtacagagattatagctccccaacccaactcaaacatctgaacctgaggtctgatagatgcaagagtccttagtgggatgataaaataaatatttgaaatcaagtctattccagaaatcagaggactgtgattgctcacatatattaagcagacatatttcaaaaagaaacattaacctaggcaacacgccatggagctgccacacacaggtttataggcttttcttgaattgatgtattttctttagaaagaaggtaaattcagattctcccccacctttagtcatcctaaaaaaaactctccaatatggttcaggttacaatctatatcttcaccattagggttgatcagacttgtttggagccaggctaacagaaaggggattaaataacaaagacaacaagatttaattgatagagttaaagaaaaattaattggtgtgctatctttttcaagccattcgtatatattttatacagtatgaatggcacactgtgtcacatagatcgtaaaccaattaaaaccatacttctaaccctctaatttctataattccatctgttttagaaggttttaattagtgaagttacaaaagccaaatatatttgaatattttgaaagcaggctgaacagcaaaaacggaaaagttcccataaacatttacccacacaaccatgcacatttcatgagaatgtactttagattaaaatatgaatttttctaaactttaccaacaataaacacgtgcaaagaaaattatgatcatatgttaggctgtataaattaattcaggttttttttctgtttttcatcaagtttctagaatgatttcttctgatgaaaaccccatatctgtcgtttcatctcaactgtgggccacaaggagatagagctagaaaaaactaaaaacattgaacactctcccttaaatactctttccataggtttatgagagaggtttaccattttacaagtggaagggaatttttctcagaggtattaaaaaaacacattcagcctgccagtaatctatttttgagaaataaaagtatagggaagttacgtcatctttaaagactgaacacaaaatccaaagctacagagtaaagaactcaacccatttctctactgtgcaaggaacatgtgatttttcatttttaaagcaatgggtcaacatagaaggccttgctgttttctttggtttaaacgctgtgccgtgcagctgcgtgtggttgggggcctcatctggccacagtcaccggtgactgacagggaggggacaacgtgacgcacgaggtcctgtcccatcaaaatgctcgctttaccatgactgtgactcggtgggtgtccagctctgttcgtcctttcaattggatttctgacatgtaacgaggtgtaattaatatgcttgtctttttcattaccagaaatatgttgaatatagtttattattaattcagctcctaatccatactacctgaacaaactacttttgcttccatttgtactgtataatgtcaactgtggaaaatggctaataaggggaaaggggaatcaatttgactttgagtgtgcacgtcgtgctggaaaactaccctttattgaggatctaccatgtgatgcctgctttatgtgcatcatctctttaatccttgcatcgaccatccaagaaaagagtaattagccccatttgacacgtgaacataggaaaatccaaagaaatccaggcaatgtattacttgctcaagtaataaaaaagaaagaaatgaaaaactccaataacaagcacaggagtaaactttggagccagaaaacatacccagattgtttattttgccccgaagcttttaaggatgctaatgtacctggctactactaccatttttaaaagctcagcttggaaggccggaatacatccaacacctaatatttttattatgtgacagcatttactttaattataaaacatcaatactatctggacttcctatctttattcattttactgtattgttttaatttttactctcttatgaccttcctatctttaaaaggattatctttgccactctgatgtattttgagtttaaaaaaatgggaatcttcccaagaaagaggttaaatagattttgtttgtaaatagttcagcagttgcgggaggcatctgttccttttttgcctcacctgcgcttctctttctttggcttcatacttcctccccacctgccatggacctgtcgtcaggagacccacctccatcccctgccctttttcagagtcctgaagatggggaatgataatgtatgtcagagggaaaagtttctttctccttctaaatgatgattaataagggtctgcagagccactggggacatcttgtttctatgctgataaaaacaaacatactgagaagtaagggagaaagagatagaaggaagagagggggtggcgaaagtcagaaatcaatgttggctcagcttctctgaaacttagtgacaggagcctaaaagttctctcttagtctctctctttctttctctctctggctactttgacttggctaattatcctaatataggcatctgcaaaagtcagcagcattattgtgcaccagttgcaccaatttatattccttaattctgcagggttttttaattcaaaatttccaaagataactatggataatatctcaaaagatttatgtgtattgattttaaaggaagggtattccatgagcccatctttaattatctgtcattttttgtcattgattttatctaccaaatatttaataatcctgaggaatctttcattcaccacagcaatgtatcaatttggggtggatatatatata

SEQ ID NO: 33313 - DNA, 2868 bp, Bovine  19866880510954
  misc_feature (1)..(1): n is a, c, g, or t
ncctaacaggctaaagcaggaggcctggcaagggagaattactagaagattccaggcctctccccaggatcaatcaagtctactctacaggggacaggtctgagcaagcaggctggcatgctggggcagtgtcaagcattggatggctcccttctcagcatccctgcccaagagcagcctcatgaactgtaggtaccatttcctgtggctggtactgtaggtaccatttcctaaggtttgtcttacggtgagccctcccaggtgggtttgcactcagaagttgatgcctttatgggcggatctctgctcctgagactgggcctcagcaaagcgggagggagtctggcatcaggaatgatggcagggttggggggaggctgtcatcttcctcctgtaggcactgtaagtctgcagagccctggtctagaggatcaaccctgtgtggccagctggtcatacccctgtctgctccccagcaagctgcacctccaccactaagaaacccaggatcttacttacctctccattcagaaagcaatagagaacagccaccacaaagccctaaggagagagaacaaacagaacctgagaatgctagcaaggaacctcccactcggggtgtgggaggcagcaggagccgggagtgacaccaggaagcagagaaataagtgaccgagatgcgagcacctgcccaggagcctgcagcaaagcagtcaaagttctgctccactgagatggccacacccctgaagccaagtggctggtggcggcattccctcccacccacaaccctggctttggatctcacattcccttggtcaaatccttcccattcccaagggccagctctgtcccactttctagaagaggccttccccacataccccaaagtgttcaggctcccaagccagcctgcaggccccctgagggcagcactccttcaggacagaacagccctgtctttatccaccaccacctccccaccccgttggccagacagcttcatacatggaacgtacggaacaccacgtggttcctgctacctagtaggtgtttggctcttctacatatattcttgacttatagtctgggcatttagaattcctgtgctgagagataggaacccaggctctgactcccagtctggggctttgccaataaacccctcagccttgccaggctaagaaccttatcaggtaaaacaactgagttaaaatgggaggagggagagaatcaagtcagataaacagaataacttctcaaccatcaaggtcaaatactcctctaatgagttgggcttggaagaggcactgtatcctagggacattcaaaggagccaaccttgccttccctgacccactcatgcacccatctgttcatgcactcactatgcatccttgcactgactcactctgcttcactcactcatttacagccctgtctgctgattccttcaagaacagacttactagtcctccagttttctcattccctggatcacttatttatgtaactgttcatccccctgttcagctcattcagctccctgggatcagatcctgtgctggggatctcgacctgggtaactcagagctccagcactcagagagggaagtcagatgtggagagagaggtctcttgaggacactccacccatccccagggctaatgctgagggacagggagctgctgtctgctgtctctgatggcccaagggaggcctggctcaggactcccagatgcaccagcaacacgaaagcaccggcatgtgttctcatggaagcctagagggcagagagtatgaagggccctcccaggtgtcttctaatctagtactgttattccagaaggggaaactcagagctgagtttaggttaacgacttaggaccaccaacaaggtagaggccagggacctggctccccacaagctcttccctacacacacacacacacacacacacacacacacacacacacacaccacgcctacctggaaggagcccagacccagctcaaacaccagtctctccctcttgctgacgttctccggggagaaagcaaagacagtgtagtggattccaaagagtgggatgagcagcaaggtggacctggcgagccgtctgtagggagagagcaagccgtctactccgggggccaccagggcctgaggccggagccgtgcagggcagagaactgcagtcccaaccgctcctctcccccagcaccggagcccctgcccatggacaccctcaggattctctcccagggcgtgggtcctagggaagatggtcaacagagccccagcttccagaactccctgggaagttctggggagacttccctcagtctgtggggtgcccatccctctaggccacacaggtgtcccgtggaaccactgaacgtgcacaggtgagtatgtgattgacagaaacctctctggggaggtatgaagccctctggaaaaatgaagtcagggcaaaatcctgcagtgggatttggacggacaacgtgatgcatcttcaagcaaaacaaatgtttttcactgaaaggaagctctctgtgcctggaaagggcagccctatgggaccacagagacagtcagcttctctgagtctggggctggccagggatgctcatgaagagtggtggggaggtgctgaccactgggaaggtgtgggcccagagggtagagcacaggagactcatgggagggatgctaggaaggatttactgaccctgaacgtaaacagccaccatccagcaggaggaacctgccacctgggaaactgcttcagaggtggtgaagaaggctgtctgcggggctgggagtggaaccgggaagagaaacggccctagggacctcacta

SEQ ID NO: 33314 - DNA, 1905 bp, Bovine  19866880513626
  misc_feature (1)..(1): n is a, c, g, or t
ntctccttccctctgagtctttgcgtaggagcggggggtgctgctgtccacaggggtggttgatttcatggcaggtgagggtgactagaccagttattcttccttccagatactcattcatctattcaactgtccatctgtttgttactttatatccatctatatctttattcattcaactatccctgtatctatctacccatccatccgtatatccatccgtccactctattcaacattttgttgttgtttagttgctcagtcatgtccgactctttgcgaccccatggactgcagcatgccaggcctccctgtccatcaccaactcctggagcttgctcaaactcatgaccattaagttggtgatgccatctaaccatctcacaaattcagcatttactgagcacctattatgtgccaggctctgtgctcaatactgggggatgcagaaataaataaaatcagagaaacgggccatcaggccagtgataaagctttggaatgcttgctacggcaattacatatgacaatatgcctggcacatagtaatgtgatgaatatgtctactttgcatttttccaaagacctggcccaggtcacagcctgttgggggtgggggaaaaggtagtaggaagactacagacatccaaggccaagccagggtgatggggtcctttctctttgacctcacagggcttcattgttgctatcctgtactgcttcctcaaccaagaggtatgtgactcagactacccttattctttaagcctttcctcccaccactcctaagcctgcctctctcctgtccagcccctgtaaatcccacctcaggccataacttgagtcctgcaatcctttgtggaaatctgtcctgagtttctggatcaagcttaacctgaatacttcctgtgaacatcttttatccatccttcctctggtcttggccaagcttactatccattcatcatgaggtagaaaagcgcctctcagggattagaagagggatgtaggggctggggtgggggctaaaaggggtccttccattctgtattcctaaaattgaacattagagagagttacgggaaggagtaagtcagatcctagagagacagagagaagacacagaggaaacaataaagtctaaggtagacacacaaagtctaggaaaatagattcaggcgaaagacagggaagatgatggagagcagaggcaggggtgctgagagagagcacctggaagagatacgcaaaaagaacaaaccaaaaaggtgaacacacacgtgaacagacagaatgtccctgtcctgcccagtcatgtctgactctttcccttgggattcctttgtccatgggattttctaggcaagaatactggaatgtgttgccattcccttctccagaggatcttcctgacatagggatcaaacccaagtatcctgaattgcaggtagatttttttttggctgttttttgccactttattattatttttttgattgaaggataattgctttacagaattttgtttttttctgtcagacatcagcaagaatcagccataggtacacccatcaggcctccctcctgaaagtccctcccatctccctccccatcccaccttctaggttgtcacagagcccctgtttgagttccctgagtcatacagcaaattcccattggctacctattttacatacggtattgtaagtttccatgttactctctccatgcaggcagattctttactgtctgagccaccagtaaagtccctatagacagaatagatggtgccagtgcacttgtagaatcatggagagatggcagagaggagtaaattataacattcaacccagaagacacttcatattttccccttaggacagacttgctatcgggcagtagtgt

SEQ ID NO: 33315 - DNA, 2685 bp, Bovine  19866880519203
  misc_feature (1)..(1): n is a, c, g, or t
nagagatgactgtcctcatgaaacggactctcgaccggccggaacacactgaccggccccgctccctctgagctgtaacctttgggccacgctaacgtcccagtgccccacccaactcctttctcctccttcctggtcctccttccagagcatcttagtccccaattattcagagccacaggagccctgccaaggaagaaattagagctacacatcagctcttctatatttaccacctgacggctgaggaggatctatcttctacacaattaaatgaaaagagttttaatatcggcaggcaaaggactcgggcatcaatggagaattaggttagagccagcaattggattagcgcccagctgcaagtgaaatgaggactcggacacagtagggttatccttcttctggcgacaggcccttcctacgtggagggcggagacgctgtgttcttgagactggtcgagtccacccctcaaaccctgggacccaagactacgagggacaacctttgccagaatcctctgtgaagagaaagccctgggctggctgcagcagacgagggcacaccgaggcctccagagccagtcagacaccacctcccatgctgagaagtaaaccgcattcgcatcccctcctccatgcctcctccctcctgcagcagcccctcccaagagagctgctttagcccctggccccccaactgcctctcttctccccttccagcctcacctgcaatcttccctaagccgcctccttcacgaagcagaggagagagatgcaggtgcacaggtgtccccccgtgacagctgttgaagacgcagcaaaaatgctagttaagtaattgtccctttgggttttttttttccaatgtcacactaagttggtttctctggatttattaagtgggaagagcatgaacacatcctaattttgccaagagttgatttgggggcaaattccagcacttcctggggagcgacctcacacacccgtccccttgtttctgactaccttctaccttcccccaggagacacaggttcaatccctgggtagagaagatcccctggaggaggaaatgacaactcaagtattcttgcctgaaaaatcccatggacttaggagcgtggtgggctgcagaccatggggtcgcaaattgttgaacacaagtgagcaactgagcacacaggtgctaccttccccaggctgccacagcctccctgacaaagccacctcaaatccttggctggaaactatggcaactccttcctgtcagctccctgaaggtggacgtcacatctctttctccaaacagaaccccaggagagacatacaacagcccagcctcatgacaatactgagcccctgttctgcttgcgcagacctccagaaggaaagactccgcggccaagtgcgtctccgctggctgtgttccccctttctcactcacagtgagttcttccttcctctttcctaagttctctggttggagtccaagtgtgctggcatcacctcaaaggaagacagaaatcagctggcaattgccagagaaggccagtcatcttcctccaaacccgaatccaatagccctgaatgtgaactgggtcctgggtgctgtgcctcttgcagaggggaaaactgaggctccaggaagcatcagtaatgcagcccctagggaaccggtatagaatgaactgtctggagactccctggtccccaggtcagtgactgaaaaggacacttactgactgcccatcagtgcacagcctgcccggtcctgagcagaactggggtggggtgtcaagagcagcgcagagactgatacatcaccctgtttgtagttgtcatttagtcagtgagtcatgtctgacgctttcgcgaccccatagactatagcccaccaggctcctctgtccaggggatttctaggcaagaatactggagtgggttgccatttcctccgccaggggatcttcccaacccagagatcgaacctgggttgcctgcattggcaagcaggttctttaccacggagccacctgggaaaccccgttatcctgtgtataagctcacaagttagcctgctactgttacacagatgccagccaaagagcccagactcctagatctgagaccaaggacttcattactcaggcaaaagcagtccccagagcactctgatggttggctctggttctctgctgccactcaagtcccacacaggctttgcgagaggcccaggatgggtggggtactcagtggctagagtaacaggagaggaacactggcctcgggagattttccacttttatagaaagtgggagaaagactgctctttgcctttgagatgttacctcttctctcaagattgcttgtggcaaacatgactctgaggagtggcccaggtgaagagaggtcagggccttgcattcgtggagtacccaggaggaatgtgggaaaatgcccagggttgccagagagctgtctgtctccgcacgagggaaatgcaggagcagggtgggcacggttcctgcccctggggtgtcccaagtgaccacactcagtgtgctgcctcgtgcttgcccactgggcctctccttggaggcctcgcacacgtttactacagaagtaacatcataaataagggctgggtcctctgggtatcccacagtaaaaacaaaaagcta

SEQ ID NO: 33316 - DNA, 1167 bp, Bovine  19866880570159
  misc_feature (1)..(1): n is a, c, g, or t
nagacgctgtggcccatggtgtagatgatccttaccgcggagaagtaggatttctggggagggtggaggcagaaggaatctcagcaacggggcctctgaggaaagggaggcttgaccatcaagcaggtgatgctttgaattctacccccaaactgtcggtgtggtgtgaggctggggtgtctgtggggaccaaggcaagctccctttggagttttccctttggagtttgtttacagcctgtaagctagggagggaacaggatgggggagggaagcgggggtgggggggaaggaatgaggatcaagatgcttaactctagctgctgctgggagatgggagaaagaagctgccacagaaactgtgcgtccctggggagtgacaaagctcaggaggaaatcgggcttgtttattgacatccagcttgctcattagcttgggaacacgacatccgcaaataaaggggagagcaggaacagcttcaaggctaagctctttccacaaacaagtatttgaatcaatcaactcagcctggatcccagagatggagacagaaggtgtagcctttcggggaggggattgatcagggacccagctcccctgagggatgcaggcaatcacccctgactgcccctccctgactcagtctttttatctgaaagaatgtcagactcatgctctgccttcagggctggagggagagagctatggggttatgggaatggaagcaatttgccaaggcactgctcagtttggaagcatggagtgtgctgctggggtaggagtcacttccatcattgggtttccctcgctgtcccacagccatgcacaccactccacagactgaggatcagagagggcagggagcttttgcagtggtccttgcccagaacaactcagagcctttgtttcccgcaaccacccccagctcccagtcctggagctggggcacagagagggtgtcgaggagacactggccaggtaacactgcccaccctgccttctgcctccctcttcctcctagcagcgtagcccacctgtcactctggagcaagttgctctctactaattctcactccctctcttccagccatcttccagaagtgtgctgtcattcacattccgacccgccaacttcagtggaggtggcagcccctaccatcgtgcagt

SEQ ID NO: 33317 - DNA, 1051 bp, Bovine  19866880598046
  misc_feature (1)..(1): n is a, c, g, or t
nctccaaatgtccctgcctgcctggtacctgcacctgtgtgtttccttcccccttgggtgtaggctggacctagtgacttacttctaatgaacagaatagggcagaagtgatggcagatcacttctgaggttagagaacatagagacttttgactcactatcacttgtttctctctcttttctcccgttgctctccctctgggaacagccagctgccaggttgtcagccgccctatggagaggcccagtggcaaggaataatgtcttcagccaacagccctcggagaatctgagatctgccaatagccacgagtaaacccagaataggaatcttccctaaatcaggttttgagatgactacagccttgtgagagactctgatccagaggactagctgagctgctctggcttcctgacctatagaaactatgatatggtacaaatttgttattttaagctgttaaacttgggggtaatttggtatacagcaatagataattaacacaaattttatgagaagaaaagaaactaaacacataacattgctagaaatatttggaagcatcatgatttcaattactgtttacaacaaggagttagatcttcctattttgggagttaatcagtttggtaggaaagggagttccatttggcaataggaaatgatcactatattaagaaatactaagctatcattgtgcaagaaaacacagttattgacttacaattaaatcataagcatgtataagacacctacaatttgtgcaatactactttagatgacagaatgaaaacaacataatcaaaagattgcccctaccatttattgaactagagtctattgatgcataaactactcactgagattatactaggcagattttgaagccattttcattcttccaggccatctggacacctcacatggaaactccaaatggacaacatagcttctaagatttagttagcttacttctagaaaccagtttatattatagatggaacctgcagttaaatactcacaacttgcaatgtctgtgtaagatgacag

SEQ ID NO: 33318 - DNA, 1489 bp, Bovine  19866880600461
  misc_feature (1)..(1): n is a, c, g, or t
nttggtaaccccatggactgtagctcaccaggctcctctgtcccaggaattctccaggcaagaataatggagtgggttgccattcccttctccaggggaatgctggactattaaaaataaatctattatgaacatagatgtacaggctttggtaagtgttcatttatctgaaacaaagcccaagagtacaattcctagctcatatggcaattgcatgtttcattttatgagaaatggacaaactgttttccagagtggctgcagcatttcatgtttccaccagtcatttatgaatgatccagtacctctacatgcttgtcagcatttggtgtttgatttttttaaaagtaattcttataggtgtgtaacattatctcatcatcattttatttgcattcccctaacgagtaatgctgttgatcctcttttcatatgcttgtttgctatcttaatgtttctttggtgaaatttgtcttcatgtctttcacccaatttctaattaggttgtttgattttttttttaactgttgagctttgaaaattctttatacgttttaaatactaatccttctgtatcagaaatatatttttgcaaatgttttctccatctatagcttgtcttctcaatttttagcagagtctattgtagagaaaaagttttaatttttaccatcgtatatatcattagattagctataaagcataagttgagatgatttctgggggtcttcagtgaagctgaacaatgttaggaattttaaaacagtcttttgtcccttaatttcccaagttcaaagggaatattttcaaagagagaagagagtatgaattctttatttcccgttggatagacatctatttctcccaagttcaggttgttggtggtgatgatttttttcccagggctttctatgcatactttaaatgattatgcccaacccccccttaaggcagatgtaaacagcaactgagatggcagatggtaatgtaaatctagacctcggagagtttgaaataacagccacatatgtgcagtgttgaagtcatggacccttggcctacagtgttcccagtttaagtgcaaggagccattgtatctgtgacatgatttgtggatccaggagccctctgatgtgcggctcaattggcttctggcttcatttctgatgaatgcttaatggtaaatagctttaaatgaacgtatttttattttaatcacaaatgttcaatctttatgaataagagtggtcacagtgatggacattttcagacagtttatttcagtcaatagccaataaaatgtgcacttgaaatatttgccttccaaaagcaatctaaggcagctccgtgttgatgggtgttggggctccagcttttcaattaagagaaagagagggaaagagagagagcactgaacatttgtaggctggtgtttaatcccagagatcggctggcatcacttaggttatctctttaatcctcagagagg

SEQ ID NO: 33319 - DNA, 1763 bp, Bovine  19866880615597
  misc_feature (1)..(1): n is a, c, g, or t
nagaacttcccagctgagctgaacccaaattgccaacccacagaattgtaagtgactgttgtctgaagccacttagttttggagtgtatctaacagatacagtggtagaagagatagcagtaattgatatacccgctaatagggtcttctagtgtgtttacatcaataatatcctgtttcctgatccaaattttgatagcacttatgcattcacactaagattcactgaactgtataattatgatatttgtgcatatatatcatagccctgggtattctttggaaggaatgttgaagctgaaactccagtactttggccacctcatgtgaagagttgactcattggaaaagactctgatgctgggagggattgggggcaggaggagaaggggataacagaggatgagatggctggatggcatcaccgactcaatggacgtgagtttgagtgaattccgatagttggtaatggacagggaggcctggcgtgctgtgattcatggggtcacaaagagtcagacacgactgagccactgaactgaactgaactgaacatacatacatagcatgtgtattttacttcagtttaaaaagtagaaataaaataaaaattttatgtactgttatggtataatttcctagatatatagttaaggaagaaaataagagatcagaagaaggcatatggtatctactatttatgtaaaaaaaagaacaaagaatatgtgcatcttcttatgtgtgtatatgtgtatgtgacttctttacttgtatatgcatcctttatatctttaaatatacataagaaactcaataatactgcttcatgcttccttcaagaggggaatgggtaactaggggatggaataggaaaagagagacaattttcactgcctattattttacactttttgaatatgaccacacatgcttatcaccttgttttaaattcaatagttaaattataattctaaaagaccattctcctaggtactctactgtaacagaccacataaaatcagagggagcaaatatcaagagagatgctagagaaatactcagctacatgaggtcaagaggaaggatttggtatgggaaataaaatatgacactcacagctgtaatttgccacccaagtctgcgatcaagaaaaaccagcccttggatttgaattgttttacatggcagttatatgggcttgctcacaacttagtggaataaagatgaaagaatgagtccagagaactgattagaaaccaaaaatatgcctataaatgtacagttatctctctgtgccaacagttccacaactaaggattcaaccaaccacaggttgtgtagcactgcagtatgtatttattgggggaaaaaattgtgcataagtgatttgaacacacaaaattcaaacccatactgttcaactagagtttgcttctaagagagattccagagcgcttacttgagccctccaccacctgagggaacagtgagaaggctctgtctgtggaccagaacacagactctccagaccctaaatccaccagcatcttcaccttggacctcccaggctccagaactgtgagaaataaacttgttacttttacaccactctttctattgtgttctataatagcagccttcccaaatggactaagacacctctcctttcattatgtttctttcaagtagtcacttctctgctaccatggtattcagctaatagtctttgttgggggtctcacccaagcagcaggcttcagagc

SEQ ID NO: 33320 - DNA, 1355 bp, Bovine  19866880643065
  misc_feature (1)..(1): n is a, c, g, or t
ntgtaaaagatttgtcttagactgatttattaggaagtattccctgaaaaaatagtagaggggtgtgaagtaggactggcaacagaataaggtaattcactttttaacacactcttccacacactgataaagatctaatttttttcatcatctctgattccacaggcactatctgttattttagctttgaaaagagctatgaccttaaatcacagagtagattccctagatatctgggagagtagttttcatgtttttcttttttttttttttctggtttcctctgtgcccaaagcaagaaacagcatgagaatcagtacaagtgaatgagacaaaacccacaagtccaaaaaggtttctcaaatgcgtatgttggcagtgtaaaaacattagcttgtcttttaaacaactgtcagaatcccaaacctttcctgcctattttttgcctttccaaatctgagtacttcattaataaaaaagaatgattttaatcttggtagtttgcatatacggtgtgtctgtcctggtcacattccaatctagataattgtatcttctcttcctcaaaccccctgttgcttatattccaagtggcattcttctttcctttttaaccaagggcttccaggcatcaccctgagatggtaaacagctggagggagctaccccagagatagctgcacatcagcggcagttgtgctcatcccagtataatttatctatcaacttgttcaatttttaaattccttggcatgcttcagggagaaaagcctagagaagggaaagtcctattgttactcctataacctcagtagatttggagcactgctctaattaaaatggagacaacaccagcaattaaaaagtgataggcctgtgcagagaggatgattaatatggagtttttcaatatcaagtatttctttgataacctataatgaatttagcctcaagttttagatgtcaaggtatcatacctcagtgcaacattaagcatttctaagttacacaagaggggtgttgagatatatataaccaaatacctttagtaatttacttaaaatctatatcagcataaaatcaaaagtatcttgacttttgtgaataacactgcactgtaggtggaaagaacagagttcagaccaattatttcagaggaaacatatcctgattggtctcctccattaacagtcactctttagacaagtcccttacctttcacatcattcaatgtgccatttctaaagaaaaaatatcactatattctcttgtaattttctggtttatgtttttgcctcattcctgctctcacagtactttagggacagtgctttacctaaaataaattcaataaa

SEQ ID NO: 33321 - DNA, 1452 bp, Bovine  19866880644209
  misc_feature (1)..(1): n is a, c, g, or t
naaaacagaaaaagattcatagacttagaggatgaacttatggttgctggggatgaggaaggatggggaaagggatagttagggagtttgggatggacatgtacacactgctatatttaaaatggataaccaacagagatctactgtatagcatatggacctctgctcaacgttacgtggcagcctgaaaggagggagtttaggggagaatggatacacatatatgtatggctgaatccctgcgctgttcacctgaaattatcacaacattactaactggctataccctaatacaaaacaaaacattaaaaaagttaaagtaacaaaactagagtacaaaaccattaaacttgactaaattctttccaagcatctatctgcaattgtgttagtttattcttcaggtttaaagaaatgactgaatagtcaaatacctacttcaagcatcatgtcttaaacccctaaacttctgcacaatcactgataatatgacacggagacaatcgttcctaatcagtgttttaacaagtcaagttgttcagattattataaacatttgaatatttttatttaattacaggtgagcattctataagcaattggcaataagagttttcttacatgctttatatactaaaattctgttgctcacttgtataaatatacaattattgttgcaataataaattactgcaaattattatttgggatgactgctaactttatgtttaaaaagcaattattaagaaatctcaatttaaaaaaaagaaatctcaattaattaaaaataaaagcagagggtggacagttaatatctatattaatggtgggcctttagccagctaattttggaaagttaattttagaaatgtcttctgggagcaaataaaggtttataaaaatttcagtgataacataagacagaatacagaggtgattatatttctaaactatagaattatttcatacactagaacccataatacgacaaaataaaatttagaaactacatttaatgttagttatttaacttttgagtaaaaaagttctctctggcaattgcattttgtatgtgtgaattataaaaaaaagcatcaactttgacactgcaaaatctcacaaggaggaaacccccaaaatcatgctcaacaacattcatgaaatatcagactcagtaaaggatcagggtttgaagaaaagaataatgtatgacaaaagagtaagattccccaagtagtcttgctccttaattaacctagcggaaagtcagtttctgtatagcaaaaagattttgctttgtagtgggaccaggaggtggtaagcagatctgacctcaaattgctgcttctgtcctataaagtggaattttcacctatcgactactttttcaaacctgatactgtaaaaatcatcaaaactttagatcaagctgctgctttatacatacgtccc

SEQ ID NO: 33322 - DNA, 1274 bp, Bovine  19866880675564
  misc_feature (1)..(1): n is a, c, g, or t
ncttacagatccctcccccgcagaggtggatggggtcactctaacgtgtacctattcatttacaagtttattggctcctctggccttgggctatggcccagattctaggaggagggacatgagaagaacagcagcggacacaaaaggacctgggaaagagagtcaggaatgagacaggaaagaagtgctgggaggaagcatgagagttcccatgggacgctgtggagggtggtagacccaggtagctgcccaagttcaggtgtgggctccagtcacaggctgtgaccagactaacacgcagatgtcagcaccttcaccctcgagtgtgaaggtgtcgtccacttgatatgagtcacccgggctggcagaagttcaagatcgtggccgtgccatctccgcgagatctcagtcctcacctccaagaacaagagggagggcgttaggaaggtcccactgtcacttctttattcagccccagtggggttgagggtgccggggaggccatgcaggagaaactgagacaggggtttcctgcagcaggagaagctacggttggccacagccacagctaagtactacctctagaggatactacttcctccttcctgcaagtatttctgaccattccgtttggctccttctctgtcttttagtactgcttttgtcttggaccacttaaagacaattatgggtgttttcttgagtttctggccaaaaaataagtactctgtcctctccaagtagcccagggcccatgagccattacaggcaggtatggaagtcctgtgtttgctcccagatcccaaataagtctgcaggagactcagagaggctactgggggcaaagaatgtcagaagagagggagccaagaagagacagaagtgtcaggtaaggggtagcaatgctccacagctggagcctggcaggtctgtgtacccaggtctccagcagaacagctgctgctgttgctgctgctgctgctgctaagtcacttcagtcgtgtctgactcttagcgaccccatggactgcagcccaccaggctcctccatccatgggattttccaggcaagagtattggagtggggtgccagtgccttctctagcagaacagctgataagctggtaagtcacttcagtcgtgtctgactctgtgcgaccccagagatggcagcccaccaggctcccccatccctgggattctccaggcaagaacactggagtgggttgccatttccttctccaatgctgggacagagttaaattctcacacta

SEQ ID NO: 33323 - DNA, 3078 bp, Bovine  19866880702820
  misc_feature (1)..(1): n is a, c, g, or t
ntgtccgactctttgtgaccccacggactataaagtccatggaattctccaggccagaacactggagtgggtagcttttcccttctctaggggatcgtcccaatccagggatcgaagccaggtctcccgcattgcaggtggattctttaccagctgaaccacaacggaagcccaagaacactggagtgggtagcctatcccttctccagcggttcttcctgacctaggaatcgaactggggtctcctgcattgcaggtgaattctttaccaactgagatatcagggaagcctcatgtttatcacatttaaaagaattcagtgcttttttgacttagaaaatgtcactttaaatgcagatacaggcttagattcattattttaaaaataaatctatccccattccattagactattatgtatgaataaaatttcttttctgtgtaagagtaagtagagtctcatttcttatatcctcagaattgaaattacaagtaaatttggatgtgcagttgtagagcaatgagagattacctgttctagaaagcctgggttctgagctataacagggataatcctgagtaataccctttgatttcatgactccctaaccttgtttttacccatcttctgaaaatgtgttgaatagtgtatttactatttaagttagtagtgctgaaagtcagtgtcttacatacaggggtttcaaattcaaatggacactgaggtaattaaaaaacaagtgaagtggaattgcattttctttaaaacaccttggggtagcttttagttttacaaagaaagataattttcattaaatatgtggcccattgtttatcattttttatgaagatcctcttcttttagcagagaaatagtataatgataaatggcatatattgtgtggccgtaggtcgtggagacaggaggaaatgatgaggacgatggtggggttcaattttcacaatgtgagaatcgaacccaaggttcccaggtcttatgaatttgcaagagaaaccatgagcctgttttcttatgttgaaatatcctacattttatttatttaaacaatttttaaaattaatttttattggagtgcagttactttacaatattgtgttagtctctactgtacaataaagtgaatcagctatacatacataacccctcccttttggctttgcttcctatttaggtcaccacagagcactgagtagagttccctgtgctctgcagttggttcccatgagttatctgttttatgcatggtctcaatagtgtgtgtgtcaatccccatctcccaattcatcccaccaccactttcccccttagtgttcttacatttgttctctacatcgggtctctatttctgccttgcaaataaggtcatctatataatttttctagattctactatatgcattaagatgtgatacttgtttttctgacttacttcactctgtatgacagtctccatgtccatccgcatctctgccagggaccccggttttgtttctttttgtggctgagtaatagcccaccgtaaatatgtaccacatcttgtttatccattcctctgttggtggatgggaagtcctaccttttaaaatagatcttttaagaagtagtttacagaaaaaatgagacatgaatgccaaccagatccaggaggatcacaaacagtttgcaattgctgcttagaaaaaaaataacccggaaagttaagggaaagcagtttcagtgagatgtctgatatgaagactagctctttcctggattgaattgttatccctaaaggtaatgtgagctgctcagtgagtgtgtatacagtagggtatcagaaatctatttgattgaatgagacatgataagaaatacataacatttttgtgatggaatgttgagagttgaaggcctgtgcttggaacaagtggggaagaaagcagcctggaagccaccataccaggtggcaaagggcaccttggttccatcactgaggactgagtggggctcccagataaaacatcagggcacaagatgggatgatacagtctagctgaagcgtaccaagtctctgtgaggcagagaccagtcaagacgaactccttttaaaggtgacttttctaaaatcagcaagtgttaaacaaggcatttttgtttaggatagttcatataaaaggttggctttaaaaaaatcagtgtttccgaatgcttttttgccttgcgccatctccctagcaattgctattctcgccttccctgtcggtgatgcatcccacttttccattcttcctaaagaagtatatgagaagactccttaaactcatgatggcctcaccattctgggtcctggcccacaaagctcatcttggccaatcacctgtatgtgcttgtagactgaaaaggagcgaacagcctgcactcacagttagtcagttcatagtaccacatgcatttgtttgagtttttcttttagcaaggactttccccatgtgagaaaaagaaatttgtattcacactgctttgtcgagttttcaaatgtgttttagggggatacaattcaaacactaaaataatccatttcatgcatattaattgatttttacatgaaaacaattcccatttgcatgagagctttggcaagttttgagtctggggaagatattataaacagtagtggggaaaaataaaaccaaacattgcactatgttggcaagagcttagggaaacaagtgcgcttatactagtcttcttggtgtcagtggcagtaagtccatggatcctcctggctcctggctggctcctatcactctctatccagagcctcaagtttgtggttccttggatttgaatcctgagcattttctgctctccagtgactctttctttaaatgaattaattctatcctgtggatttaaaaaactttgtgttgctgtctctcaaatttgcttcttcaggccagatcactcccttgatttccacctcattaacattcccctttgatgtcccagggacacagagcactcatctccaaatgatttagataaaaaacatttattggctcacatatcacattgaa

SEQ ID NO: 33324 - DNA, 2543 bp, Bovine  19866880715881
  misc_feature (1)..(1): n is a, c, g, or t
nctccctgtgtctccccagcctccagatggccaagggtggagggaagggaaagcaaggatgagcccagcccctgatgaacctctcattccatccccacccactcctaacagtcagagctgggctcctgctggatggacagatggacagatgatcagcagtctgtcctctccaaggttcctcttaccgatggtttccgtctcccagactgaaacagagcaagagagaaaacacagaggtgagcaaggctggctaaagtcaatctgctctctgagccctgctgatggtgccctcctccttcccactctcagactctgaagagaggttgtgctggggccccagaggcctgagaactacaagctgggattctactgttcaactagagacttctatctctcctgcaagaacagggcacagttactgagaaagtgaggcattccaaaggaggagcgagatcgcgttcctgcatctccaacagctgcaaagcagcaactattactatgagcatgagattcggccctgggaaccaggaaataaaaggaaaactgcggttctcagctttctaagtatttaagtcaagtctaactttgtgaatggagatgctaaaaggccctgccttaatgaaccattaagaggcaggtgtaaataacacattcattgtgcaattgccagagggaggcatagaatctgaaagaaagcgtatcttaagaaaattttatttaacggctgattcattttaccttttctgtgcgtggtggaaaagtagtcctgccacggtacctgacccagagtagatgttctgtcaactttaaataaatgactgaatgaaaggagtacgtgaatggaggaagtgattaattggtttctataggaatgaattagaaattggagctgaatcactgggctgtcaccccgcttgatgaaccaccattcacactgtgcctctcctttcagcacttcccgttctgctctgggttggatccagtcctcatgccactgtcaggatgggagagtttaactgctggactggcctggactgatattctggaggtgggaggtatggctaacgggcccaaacggaaagtcggggaggcgagatgggggcagcatagctagaccctgccttccctagtcctgggcggggagccagggacagggccgggcatccccaggacgctgcctctatctccccgtaccacctcctccaagcagactcccctgcaggcagaaacaaggttgctggactttcaggtgtgaaaaaaatttgcctctgcctctgacgtggactagaggacagtggagtgaagcacagcctggagactctctacttctagagggacactggccgaggccttaggcacgtgagggaggaagctgaggaccaggtctcaagggactcatgcatggctacacaagtgtctcagagcctctagtccctgtaggagtccctaccctccttcctcaaaccaagaccccaacccaggactaggtggtccatgcatggttctcagtacatcacctgcctggagcccagtccctccatctccctctacccagcctaactctgggacacccacagagttggggcggagggccggtctggctccaggcccctcccagtgtcaatgtgcactaaaagcagacaccaaccttcttttgggattcatgagtctctgccaaggcagaaataggcctggagagccctccagactcacatccaaaggagagatccctcggaaccctttcccctcaggcccctccccatggagaacagtcatctgggcctccctgtatgagtgatggtggtcataacatcagctcacactttcggctgaccatcaagctacacccagtcctgctaagggacttccacatgcatcttccacttaaattctcccagtcaccattccacattcccatctgatagactaggaaatggggggacagaggggtgactgccctgctcaaggtccccagctgggttacgcaatggagcccacatccgagagcctagccttgcccctctgacgtacctctacggggctttgccatgtgtgaggggtgcttctgtgtccctctgtgcacaggggtccctgatttcatctcaccagcacagagctctgaaatgggaaccacctccctgcaggttaccccggtctttggtgcttgtctcccaggaatgcctggggtccgacttgggggaacaggctggaccgagtgtagcctaaagaggccctgggggaaacccaccttggtctgggttgaagattcggaagagttcagggcaactgaccaggaccatctcacccacgtgggcgggcttccaacacgtgatgttgtcccacatcccagggcaccctgtggggatgaaaaccatggtgtccagcagtccagcagtccctccccacacacacacacagagcacacacactcacagagcacacacacacagcacacacccacagagcacacacacagagtgcgtacacacagagtgcatacacacacacacacacacatacaacacacacacacacagagcaca

SEQ ID NO: 33325 - DNA, 2507 bp, Bovine  19866880808847
  misc_feature (1)..(1): n is a, c, g, or t
ncgaaaatcttctaacctacctggtaatgaagcagcagacaaacaaccatctgggcagatatttatcttgttaagttaaacatgcacctggccccttaattatcaactgtaattgacaactttcatcctcgcagagtacttttctgtccatgccacagtggtgcaagtaattaggtaataattaatgattctttaagtgcattatttcctatgagctcaattttcactatatgtgtatttcaagagcaacaactctgcttgttttgcccttatagataaatgttaaaaagaattaaaatcactatgcttatcctaagtatctagaggatcatctataatcaattctgaccttttatctactccatgtagtgcttattttattttcattcagccgtaccaaataaccataaagtatcagagctaattgtagagaccaaatgaatatacattcacaaagacacttattactatgttacacataataaggaaacatgtaaatatataaatgaccaacactggacaaaggataagcaaatttatggtacatgaactaaacaaaatattatgcaacattttaaaataattttgaagactatgaaaaatttcttaatagattctgattacaattatataaaatatgtatgatgaaaagcaaaaaatgaaaggaaataagcaggtcaataaagcctacaaatgaaaatgattttaccagagaataggaaaacgcatgttttatttttaaaatattttacttacatttctgaataggtcatacatacccatagtacaacatcccaaacatacaggaggatatgttcaatgtctgccttgaatctgtcattcaataaccttgtctcattcccagaagtaacttttgtagaaagtagtaacttttaactagtttttgtatgtattccagacagttaatgcatttataaaaagtatatatacatgttttttaacacaaattgtagcagtaatgtcatattcacaccttgatattttcattcaatacatcttggaatagttccatatcattacatagaaagccacctaattatttttaatggctatgatgttttattatgtgaatttatcataatttatttaaccattctgtattcatgtcatttaggtttattccaatctttcactatttgaaataaaatgttccagacaaaagccaatgtgattcatttaaaatgaaaatgagatcagacttctgatttgaagatagcattatagagttagaatttcctccttcatctccccataagtctttgtaaagtaaaaagaacaggaaatataaacatggaacccataaacattttctttgtagcagtggataaagagaaaaaccttacagatatctatccatcttaggaaatttatctatctatcttaggaaaaaagataaaagtaaaatgaatttatataccaaatcctggatcataaagaaaaatctaccttgatacagaacccatacttatcctccacggaaaccttattaaaaatcccatccaggaaagtgatatatacttcaaattttagtaattaaaggtttatgcttctgataattacatagtaactggtttcaaaccaactttcccactaaaatcaaccaaaaacaacacttggaatatgcttttaaaatatgtatttgaaagtttttgaatagctacaaaacagtgaagatttgcaaaaacaaatcctgaaaagaatgagtttgcaatgaggtgagcttgaccttaatttcctactgcttttctgatcaaggaatttgatgattcacaagtggtggctaataatagagaaactgagcaagtatttcctacacttccataagacttcgggcaaaacaagtagaggagggaccctaataaacaccgaagaatttcagttgagagccctaaaggatctgtgttgtagaagtagagatgaacctggaaaatagtccatcccttataaagactgaagcctagtttcaaattaactcattacctgactgggattaaaataattctatcctaccctggatgtctatcagggcaaaacaaaccctttctaggtatagataacaccatccagaccatctccaaaatatttttatatgcaatgtagggacttagtaaaaacttgttgcaacatcagaaaataaagccagatggtataaatcatgagggaaaaaaaaaaaaagaaaaacaggtaacagacactgagtcacaggtgaatcaatattggttttatcagacactgtttttaaaatcagtgattattggtgttcaagaaattaggtgacaagatggtaggtttaattagagaactgcaaacagtacaatagaaaaaatagaattttaatttaaaaactaaagtttaaaactcaaaagttgtgttaatagcaacatacattatatctacacacagatacatacacatatatgtaatatattatatataattattatatatatgatatatgggtttatatgtgtatacatacacacacg

SEQ ID NO: 33326 - DNA, 978 bp, Bovine  19866880823144
  misc_feature (1)..(1): n is a, c, g, or t
ncttatacagttttacagtggaatctgggaataagggtgagtcagcagcctaagaagaggacccttaacatccatgaccatgatccctgtagcactaccagtgaccccaaagaggctctgaatgtcctactgtgtctgtggttaaaggaaggtctgtggatccttatggagcccaagccaagaatctgacttgtttgcccgtgaagttggtaaccaacaggagttagtctgcacccattgatggtggttcttagaaaggaaaaagagaaggaaactgaaggatgcccatggggctctttcctgtaagttatccatgtgtcctgatcagaggttccctgaagataggtaaaaaggagactgtgggaccactccgctaatatgccctaatgtttgtcagaagacagggcagaaagtacaaaaccatgccttgcgaagactcgggatataagtagtatgggcagatgtgtccaacttttggtaactcttgatattcatatggaaagaaggagcaagggcctaaaggtaattttcataaaaggagcatcccaaatgatttctatcagtaagtgaacctgggtaagcaatgtttcaatgaaagaaacttcaaagtctcttgagactttgaagagacttgaaagagacttcaaaatctctctcaaagcctcaagagacaaggccctagagggagatccaggctctgctgatggctctgggaagccagggaaagtgtcacaagcacctcaggacctcttggtcactggatcattcccatcagccaatacacctggtgtaatagctctcatccccagaaaaagaacatcttttgtctctacctctcctccagctatctttttagtcactgctcccttttgcctcatcactcctccaaatacttttctgtctccacttcctctactccgatttctcacttgaagggtcatataactggcctttctctccaacctattcctctgaaat

SEQ ID NO: 33327 - DNA, 2008 bp, Bovine  19866880825259
  misc_feature (1)..(1): n is a, c, g, or t
nagttgactcattggaaaagacccttgatgctgggagggattgggggcaggaggagaaggggatgacagaggatgagatggctggatggcatcactgactcgatggacatgaatttgagtaaactcctgggagttggtgatggacagggaggcctggcgtgctgcagttcatggggtcgcaaagagtcagacacgactgagtgactgaactaaactgaactgagaagaaagaagtaaaaaaaacccaaaggatcggattaactactggtagaaactacctcacagcagtagtgttgactgtagcagcatgatcaatggtgaagtgtattgtaaatcattcattgttaaaaccagtttagcactagagtctcacaggtttaatttttaaagtaaattagaaaggattcaaagttattgttatagcaccatattgcatatgagagaaaaggacagggtaccagctagtgttcccagaactgttcatcatctttggcctattttacccaccaaggttcatgacatgggcatactctggggagtatgcagagtttatgataatatattaggcttatatgataggaaaagaaaataagaaaaacaagtccgaggatctctgccttaaaaacaaagaagtttgatcaagatcaaggtccaggcaagcaaagacagaaaattaagagtgtgaatctatcccaaatatcaacatatctgatactgaatgtgagatccaaaaggagactagatgtaaaatacatgccatggaggcctcctcttgcactgttaggatctagagtacacaagatcatctctattaacttttcttggcacacccatcccaaagataaagacaaaagtttcaagacattctacttgcaagctacaatgcatcagctaacttccccctatcccctacattctcagcttaccaggcaactttctggtatgaattgacctcctgagtagcctttccttcaggagaaagaaaccactgactggccagtagatgtgagcattccagtgtacatgaaggatatattttataggaaaatgataatcaaaacaacacccctgggcacaagtattcatttcagtgtcaacaagtcttctatagcagaatccacctttcatttactgtcaatatggaatttatttgtctgacaatgtcaaaaataagatatccatatacatgtggatttgaaacttctaggctcttccactgacccttttatctatctggatgccaatactatactgccttgattattatagatttataagtcttgaaagcaggcttacctgttcagtcttccaacttttttcttcttttcccaagctgctttgcctattctgagtaccttgcatttaaatataaattttaaaacgagctcgtcaatttctaccccaaaagcctgccaggattttaacggatggcatggaatctatagatcaatttagaaagaacttaaatttcaactatctctggaaaatactcagaaactaaataatatactactaaatagtccttagatcaatgtagaagtaaaaattagagaatattttgaatgaaatgcgaataaaaatgcaacatatcaaagtttgtggcattttactaaataaaacaatatttagagggaatatacagcatgatgcttagtgttaatctatagtctttctatttgtttcctatttgtctcatctattctttgttatcattttttttttttaccttcttttggattagttattcttacgatttcattttatctcttttggttgattagttatatgtcattattttgttactttggtaattgttttagagtttatggtaaatgctcttaatttatctcaatctactttcaaatgacattgtatcacttcatgtataatatcagaactttataatagcatatacacttctcctctccagatttttatgctatttttggcatatatttattttatatatactataacccaaaatatattttgttccaatagtcaatta

SEQ ID NO: 33328 - DNA, 1858 bp, Bovine  19866880837758
  misc_feature (1)..(1): n is a, c, g, or t
nccaccaaggaaagccaaaaaagagaaaaggccagtcaccctcttccagtcctctctcacttcagaggccttccccttctcctgacaatgtctcatttccataccctgttgtccagtggggagaactgagcccaccattagcatcatagaaatacaaagcaaatgggatggccctggaaggtacagtgtgtatgtggctgctgtgtgcgatgcttcctcttggctgagaccccacctcctcccagctccccttctctagaccaggggcagccttgaccttccagggagcagagtaagcagtggatagccctggcaagctgatggtcaggtgtcctgactcacatccacgtctgttttgcaggagagttcggttttgcagacagtaaatccttggatctctcaggtaagggatgagctaaaattgaccatgggctggctagagggagaacatctaacatatgaggtcacagggagctaacctgtgagcttgggaacctccttccaggctgggctatgcccctctgtggctctgtgatctttggtagctcactttccttctctgattaagttgtgggttttctccatggaaatttgcatgcaagtgctcagacagaacactgtgcatataatttcaggaaaggacagatctcagtaaaagaactcctggattaaatggcctgtgatagcttggagctcccacaagtagaacagtggttctcatactttgtgatcacagtcacgggcatgctaagtcacttcaattgtgtctgactctttgtgaccccgtggactatagcccaccaggctcacagaagtccatgggattctccaggcagaaatattggagtgggttgccattcccttctccagcacagtcacctagtgggcttgttaaaacagattcctgaacctcaccccaagagtctctgatagagcagtctgggtggggcctgagagtgtgcattttggccagtctccctggtgatgctaatgggcccgtctagggagggcacccacttcgagaacctctggcctaagattctgtgcttctatgaagttgctggagcaaaacagcctagtgaagtaggcgcaggcactgcagggtgtgggcagtctggagagtactccatcttccggagatttctatcagaacaatagaccagcagattcatggaatagttctaaacaaaaaggtttatacttttctgagcccacactatgttttgaaaagggtaagaaggaaaataaaagaaaggaaatggcttgtatctccaggatacttttaaaaaaaaaatgtttttcagtgcagcttccctttcctcttcccaccaccctgatgtgggcagagcagagaggagacccagggaagggaagggcttggccactgccatggtcccctaggacgtgcagactttctgaaagaaatgttcagagggacttggaaggagggtgccaatagcagcctgaaacagatttgctggaagaaaaaaccatttggcatcaaactgtgggacagaagtgacctcgtctctcctgggcctgccagacgtcctccttgtcctgggtcacatacaactcagaatctgagctgcaataagagaccagtctccctgctctgggcagaggtctctttatggcagggatcacccaccctctgctgctccccaaagccccaggaagtgcatttctgactcttggttgaaaagaactggccttggatcttccaactcaatcagcaggacacgaggttggaaaagtgttggcgtctcctgtgttggctgctgcccttgtccctgtccgagcgccccagagatggccttctgagcagggcttcttccagcagcatggatgctggggc

SEQ ID NO: 33329 - DNA, 2597 bp, Bovine  19866880871930
  misc_feature (1)..(1): n is a, c, g, or t
ntgttctgaaaggacgtctgcatagttaggagaacagagggagaaacagggtgaaacacatatgtctcagaacacaaggacagtgtgtccatatttgcacatgcatctggtgatgtgcaaacatctaataatcaacttttcaaatatcttaataaaagcaggttctttatcataagaattcatatctatggaggctacactagataacatgctttatacaaagggtttttacatgactgatttcattttagcctcacaaaaccatgaggttttttaatactaccactgttactttgctgaagaaagtgaggcaaagatgtgctggaggaattgagctgagttttgtctgctgctgaagcctacccttgctagaacgatggggcatttgctgttccataagctatgtgctactatgtagcttaactagttctcactggcttaactagttctctgcttctaccacctgcttcctctcccctcttctacacatgaacgttctctccattatgcacaaactgtctaaaaacagcctcctctagaaaaccagtctacagttcatagcccaaactgagctcccagggtccttatctgaggccctcgtttatgatgttatctcttactgcatatttcagctgcttatgtgtttctcttatctccgttttataaaatggaaagtttctttccagaaaggaaaagttctatttcttttgtctccctaagagtaggttgtgaatagagaggacattaaataaatggcctgaaaggaaggggtagaggaaataagacaaaacttttggaaacaagagagtgtcacaagtcacatgcatggttgttacagagactcattaactgttcccaagactgttttgctctgctcctgcctcagacctgggctgcatttctcagcctcccttgcagtcaggtgaggaagtgactgaaggaagtgtgtgcgcctgccaaccctccattctgtctgccctgggtctgctggatgccccttatggtgactttagaagccaaatgctgatggtgtccattgtcttgagttcctgaatgactgtttggagcaaagcctgcctctccacttcccccaacttccattgatgagagaaaagtaaatttgtattctgttatccactcatattttagaatttacgtgttatagtgaccctccttagagtaactaagataaatacagagactgtaccaatgattgaaaaatattgattgaaaaatttaaggggaaaaaaatgtaagatccatgtggtctagaagccagtagctcccttttacagacatgcaaactgacctcattgtccattacctggtatgaaaggcggaacatgcagggctggtgtgtcttttctccttggttttttctggtctgactcaacattcagggtgacttgtacatttttcccctttataggcttctttttgagatcacaatccttaataaactggtctgaaagatcatctgattttgacaagatccaaaaaaaaaaaaaaaaaaagaatatgacatgagcaaaggttcagtcacagactggttggtttacagttaaatctgatgggagggaggaatcttttgatctgagaaagaaaagcatttattgattgtggcctcttctatggaggactttgcatgcacagatatatgcaataaaagggaaaagtagaactttgtaaaactccaaatgaagggaactcaaatgggatggataatcaaggcaaagaggaactttaaaatccacttaagcaagccacagagtgggtttaagttacatttcagattggggaacagattctctgtaccagaatgttcctcctggattttctttactcaagccttactctctttggaaggcccaagggcccgtagggagccttattctctctttggtcttacagcaaggttctgtctattcctcacagctttcatttctatggctggtcaagtcacaccagtgattaaggcttgcacttcagcactggtctttacactgccccctggctttacaatcctcctatttacttatcccaacccaggccttcttatcttcttattcatcaccttacagtccccactcccctgcgttacctcaccagagcctctgaagtctggattcggcatcaggtccatcagatgttgttgtatacaattaattccatctgataccctgttgcccattaaggtattttctctgctctgtcttactcctctgtgctttggtttctgtggctgtgcttcgagttcctctgtcattgttttagcacttcattccctaatgatctatctcctgagctggatagagccttcttggagattaaaggttaaacgtcctttcgataattttattcttagttgtgtttcccaccaataaatgcatgttgaaacaatgattaggtggagttagactgatatgagttaaaattttgactctgtttcttgttagttctgagaacttggcaagaatttcttttttttgggggggggggggagtcttaatacttaggaactttaatattctctcaacttataagatggggataatattaaatcaatgtgtgcgcatgtgtgtatgagagagacaaag

SEQ ID NO: 33330 - DNA, 1038 bp, Bovine  19866880894249
  misc_feature (1)..(1): n is a, c, g, or t
nccttttccaggccttgggaacatgctaacactgattctgaggagcaaggtgacacttagctaagtcatgtgatattctaaagaatttccctatattagtcaggcttggatttacttgacggaatgaaaagttagaaggttatgtccacagcccaatgtgatatctgattaacgtaccctctggttatataaaaattcatatcttttgtcaaacctatttttaacctgagggctgaattcaggtcaaaaataccacattttaaaatcaaatttgttcttttagaagacctaaatttgcagtattcctcgaggaatgactgttactcaaagtagggcatagaaaggttttttgattaggacactctcagctttggaagataagcctctccacactgttgagtgaatacacagatatacttgtgttcattgtgaaacttcgcaatttaatttgtgagggctcttgtttttacagaactcaggactccacttctcttggaaaaatgatttgaaagtggtaactttcccaggtccccatctagccccggcttagttttgctccagaaagtacccttatccctcacaccccctgtaccaccagctgcagccttctttgtcttagcaaccacaaaacagtaacttactggaaacttgcttttctcgccgtaaatgttctcagagtaaagacctgaagcacttaccaggcagtccaggtgctgagatgagaaggcaagggatgggaaggaagcgcttcctctctgaagctgggccggctcctcagtggcagtgactgctgctgcccgtctccagctcctcttatcaagggaccagctgctgctgttgccatggggatgctctgtttctcaggcgccagggtaagggggatggagagggaaagaggactcatctcacagccactgctcccaattgtaataattgtccattacaaaaacaatgcacagaatagtgctttgagtacctggtgtgcaagaagtccagacaaaccagctaggtcctttaatcccaataacaaccctgcat

SEQ ID NO: 33331 - DNA, 753 bp, Bovine  19866880916632
  misc_feature (1)..(1): n is a, c, g, or t
nccccctccccatcccacccctctaggttgttacagagcagaaagccttttttttaaagaactcccccaggctagatttggtcctctagatgcttcttttggagctctgtttttcctgtgtacaccattatcatgcaattgtttgagctgcatgaccgcctcccagtgttggactctgtcatgtccatggccagctcattctgaatgtcagtcttatgtctgaacttgtgacagtgtgcagactctctctgggtagaagtcagcaggggctccccagcatcccctgccactagcaggccaaggccgtgccgtcagaagtagctctgtgtggcttgggtttggaagagaacaccaagaggaagccaggtgcaatcgagcttttggtaagcaggccagtggaggagtttggcttttcaggacagccgtgttgggtatctggcattttatccccagtgttactggtatgagcagctgtgtctgtagccaaaagcggtggaatgaggaattcgccacagtggtcccctggtggggcatgggcactgcttctgactcttctcctggagaccagtgagctccctaacatcactgactacatcatgtttctacttaacccaacccaagaagttctatcttctgacccatatcctccctagccagaccctaagccccttgaataagggttgttctggagctgtttgcagctgtgtttctaggctctacaagctgtctgccacctaagcatgtactgagcaa

SEQ ID NO: 33332 - DNA, 2070 bp, Bovine  19866880920892
  misc_feature (1)..(1): n is a, c, g, or t
ncctaggagtggtcatggctttctgctcttgctagcctaggggtgcttccccatatcttataggtgccctgaattcagctcacctcagcgaatagttttttttcaaagatctcttcagttaaactcttttgaatatgctattgcctttttgtccgagtgtaacatcctgtacaatcaaccagacaattaaaaatattttgcaaatctagtataaaacacgtagcattgtatctttttattttaatcctaattagtttccttttaatagaaaggggattagggtttctagggacctgaacccaccctagtttggagaaaagatcgacagaggactggacactaacctccatatctgtcatatttaatctctttcacttctctgtcctgttcattttgatgtttgtctaaagaatgtatttcatattaccttcttatttttgcactatcagtattattttttattacttctaagtcattttaaagtctgataaaattattttatatattcccattcatttatttaacaactatattactaatttgctactctgtgccaggcactggtggaatgaagagagttgaaagacacagtccagcctgtgaggaacttgtttagtggacaaggcacagattatgggtaaaatagatggtaaagaaaaattactaaagtgccttttaatttaataacaataaaaatacactagaaaaaaaatacactagaacatatttttcaacatatgttttaggaacacataattcacaaggcatgcctcctaagcaatgaaataaagtaatcttaaagctgatgactagccgctgtctaggaaaaaaaaatagcttgatgtatttattcatttattccagaaatatctattgagtgcttactgtgaggtaggcagtgttctagatttaggggataccatgtaaataacattgtatctctcctctgcagaagttcacagtctcatgttctgagaatgaactctgaggatgtcagtagcccttacaaagtaaaaatgtccttctcacaagagcctttggacacttttgaaactaagtccctttatctggggtttcagtaacactgtcttttcccttaaagcatgatttcaccgacacgagtaaactatttggattcaaatctaaaaactattcagaagagaaattctgaatacctattacagggaggaaaaaatcaaatgaagctgtcgtaggtatctttgtgatattcatgatagcaaaggaagacatgataacaaaggagaaagataatcacggatctataaatagtaaaatgcaaacacaagtatattagaaaatcttatttctacctagtagcaccagattagtgactgtaattggaatgttgttaatcatattgctcagaataaggttacaacacccaaacctaatgcatgattgtggtcataagctgtgtgtgtgcacgctcagtgtccagctctttgcaactccatgcaaccccatgccaggctcccctgtcactggattttctaggcaagaatactggagtgggttaccatttcctcctccgtgggatcttccccacctagggatcgaaccctgtattggctggcagattctttaccactgcaccatctgggaagcctggtcacaagatggcctatttcgaatcgactttttgaaaggaattatacaactggcttaatttcaagcaagcaattttaatgtcttttgttacacaaagtaacttccattgctttgtgtgatgttatgattctttttttcctggcctttgtttttacaaaagaaaaaccagaagatacatacagcagtaacagattttgaggctgaattctttttttcttggtagtacatgtttttgccaagtttgcaacccacttgaacttctgtttgttctttgattttagaataaacttgggttccttttaacattgggaaaaattacaaattttgccataaagaagtcttaacaaagtttactcaagatttttttatcatcaccaagtatatgtaattaaagaaccttcttaatacatccagtgtagcttaatctgaaatatatatcat

SEQ ID NO: 33333 - DNA, 1914 bp, Bovine  19866880986493
  misc_feature (1)..(1): n is a, c, g, or t
ngaagaaattaaggataaaagatgcttttaacattcctaagactttcactgaaggtttcagattcaattatgaaaatcaatgcaacttcacagtgggtgttatgaaacatcagatcttataaagtggtttcacagattaaataagaaatgttgctgtgaattatacaatgatttactaagcattagagttggggttgtagaggagggagagaaaacatgtgtcttcttgctgtatctttcctgagcacccttcctgtcctagatgacttgacaagagacagaaaatggtgaactgagaatctgaatacagagtttcccaaagtcagctagtgaatgtccctgagacaagagaaagggaatcaaactggccctaaagagctcttttttgacattaaattgatctgattctgcgaatagggaatttaaattatcttctgaaaattctatcagggatacacttttcaggtttcagagaaagattaaaatatctttgtagttgctcttcagccattaagtcatgtctgactctctgcagccccatggactatagtctgtcaggctcctctgttcatgaaattccccaggcaagaatactggagtgagttgccatttccttctccaggggatcttcctggaccaaggatcaaatccatgtctcttgcattggcaggtggattctttaccactgagtcaccagggaagcctatttaatgagagtcagaatgttggaacctctttgactaagctgacatgactccgtgtgtaggcaccaggcaatgtcaaccagttccgtgatcctgggccttagcacagcccctaaatttaaaagaccagtgagcctgaatctacacacatacaaaaatacatctacacaagggcttcccttgtggctcagttggtaaagaatctgcctgcaatgagggagacctgggttcgatacctgggttgggaagatactctggagaagggaaagactacccactccagtattctggcctggagaattccatggactatatagtccatggggttgcaaagagtcggacataactgagcgacatacactttcactgtcaaggccttttagagatattctatacaattccaagagcttgtctgattgggagacattctgtaggatttaaactctttaaactcaagcattttgtgactttccatggaactttcaggttttgtgagcgttctggggaaacagtaggatacatgaagaggacgagggttctggagaacgtactttcacacataaaatgtaactgagagctatctatctgcctataactctggtatcaaaccttagttctgtctctgccttttttttagtctcactgagtcttagtctcttcatctacaaaatgtacatagagtaggtaagaagataatggtagaattatggtcacaaaagttcctcctaatgttggacatttataaccagaacaaatttgatctcctatggccaaagtcagactgagtctcattaggctagatcactgtactgatcaccaaactactccaagagagcagaaagaaatgaaactacacagaattccatattttttttaaaatggcagtacaaaggcttaaaaattagcaatactgttactgaacagataagaaaagataatgaaagaaaaaattcaggaatgattgggaaaactataaatgaactgtaaatgaaaactcattttctaataacaaatttaactttttatagggcagcatatacattgtaagacttttttattggtattacctttaatgcttcaataacagctggtgggtagctcagtccaaccatgtttgatgtccgtctatacattctggcaaagtcagaaggaaaaaaaatacaatattatatcttacaaagaaaaattagcaggccacaagtattacaca

SEQ ID NO: 33334 - DNA, 1620 bp, Bovine  19866881071280
  misc_feature (1)..(1): n is a, c, g, or t
nacagtaggaactgttgatacacatttgcaaacccttataaccctaaaaactttctccagtttcatagatggccaccctagagagatgagatgaagtgtctaatgccaataccaggcaataattccactgatgccccagtgatagcattactgacagatgacattgtaaactcagtgaatatgtgctgtgacccaagccttaggccctaaatacccccaagagtgcctaggccacagacaatggagccatttaagattaatccaagacccaaggttcacctttaaagtgaaagttgctcagttgtgtccaactctttgtgaccccatgaactatacagtccatggacttctccaggccagaatactggagtgggtagcctttcccttctccaggggatcttcccaacaaggggtcaaacccaggtctcctgcaatgcaggcggattctttaccagttgagccacaagggaagtccaagaatactggagtgggtagcctatcccttctccagcaaatcttcacaacctagcaatcgaacaggggtctcctgcattgcaggcagattcttcaccaactgaactatcaaggaagccctaaggttcaccttggctaccaaaattggcactgtcatatgacagccattgtctagctaatagtcctaaagaaaagtccactgacaactcagtaggtaggaaaacatttggacacatctgactatttttaatcctcttcacttaaatgaattaaagaagaaaaaaagctatcactggaaatgaagagataatcatagtaaaaagtcaagatttattctgaatattagaccttagagaaacagaaggatggatactgtgagaaactgtgagatggatagtctctctagcccctcatttttgggagactttagctcatattctcaaatttcagtgttctttagaaccacctggggtgctcagaaaaacatgttgattctttggtggaggattctgaagaatcctggcttgtggcctggaatatgcattttaacaagcacctaatttaactgccttaaaccaatcttctcttcttagcaaatttggcccaagcactagtcctgtgaatttcctattagtctaacgtgaaggaagcctgaacctcctcatttcctcccactttaaacctggagtctgtccagggtgtctcttcctgagtcacacagcatatgcccttctaaagaacagcacaattctccatttctgataaccgcaccttagaagattagagataaaaccacccaaattagaagttagtattcactgcatggaaacaaataaaaagaataaaagtgcagcatatttcaaatttagagattggtggtggctaattattctcttccttaaatgttattttgtgctatgttcttacattaatcacaaaggttaagatgacagtagcaggatgattattttattaattgtattctctcaggcttttgggaaattttctgtaacagaagaaaacaatagcgattccatataaattgctggcagcggagtgaaaaataacctttttctaataaccactatgtaaaaaaaaaagaatctatgtcatctctccagttcaacttcaatccactgaaaataa

SEQ ID NO: 33335 - DNA, 1001 bp, Bovine  19866881168420
  misc_feature (1)..(1): n is a, c, g, or t
ncgtatccgactctttgcaaccccatgggactgcagcacgcaaggcctccctgtccaacaccaactcccagagtttactcaaactcgtgtccattgagtcggtgataccatccaaccatctcatcctctgtcgtccccttctcttcccgccttcaatctttcccagcatcggggtctttttcaatgagtcagttctttgcatcaggtggccaaagtattggcatttcagcttcagcatcagtccttccaatgaatattaaggactgatttcctttaggatggactggttggatatccttgcagtccaagggactaaacgtagaaggagaaaacaaacaaacaaacaataaaaaacaccaagtttcctgccctgggtaagggcaagtctacagaaacaaagtaaaattaatgtatgtgaaagcacttaatgaatctgtaaggctaatactaatggagcatattataatcactaatgtgaattcaccaaggaagaaatgttgtcaatagaatgtgcttgctagtttacggatttgccagtctgtgggaacagggaaatgtcaaggactgaggtctgacctagggataaaattaccaattcattccaccttcctttcagggttcttatgacaattaacttgccaagtttcaaccgcaagaccatatgtttgttagatcaggtggggaaatgtggtttatcctgattgtttgtattaacattattagtgcaatgcttcatttattatgctgatccaaattcagtctgtcaggaggtttctcaggacacaaaagtataaaaatacgtaagtgcaagtgatttttaggctaggaaaactgaacacctcttccccagcagatcttgtgggcaatcaacttggaccttacacagagttgtactcagtgctgatcagagtcccaatcctttttaaagccttgaagatccttccaaagtgtcagaggaagattcccatgtgctaatgacagctttaatatttaacaaattt

SEQ ID NO: 33336 - DNA, 1442 bp, Bovine  19866881217279
  misc_feature (1)..(1): n is a, c, g, or t
ntcttgcctggagaagcccccatggacagaggaacctggcaggctacaatctacagattcgcaaagagtcagacacaactgagggattaagcacataaacatatatagatatacatataaatacacattttttaatgtctggaagctcacacaccaaaattgtaaaaatggagaaaaaggaaaggggcaaggtatagactgtagggaatggaatagttgcttttgctccagtattccaatgtttaagaaaatgtatttgtgcactacttgtaaaattaaaattaagatcactagtagctagtgtttagttttccttgtcaccagtgggtattgtagatgtcagggtagagtctgtcctcgctacaagcaggtggggttttttttaatggactatcaggtttctccctgagaatccctccaacccacagcaaaagccccaaggcacttggccgcacaggcttttcagtcccacctatgtctgttgccccctggtggtgatgctgagtaactgctgccttttcctgatgtcagtgggaggggccaggctagaaagcagcccttgcctcaaaatggctccaggcatgtgcatagctggggctggggtcttatagctgatggacaggcctcaggatgcagctctttctggatatttggccctgatctgctttcctcgagtgggctgcagacagagggtacttggccagagcaaggctggagcgagccctgtccctggctgagttttagcacctcttcctgttccatgactctgtccttccttcaggggcaggaacaggctagcacaggagctggagtcctggggcctcagcgtggatccctatggagagaagccccatccttggccctctgaaagggaatcacttagctgaggctctagagctccagctgcctgaagccatgaccactcacatgtgcctatgacccagctttgcatgaagctggggtcagggctcagtctctgtctggagtcatagttcagtctgtgatccctttggggtcagagttggatcaggttctgagctcagactggggtcaaggttagggctcaggctggggctgggtcaggtctcagcctccatccaggatcaggatcaggaggaggaccagagcctctgggctctgaaggcaaatccgtttctcttctcaggttttcaggtcaatctcagagtcccaaagtgatttttcccctgagcagaaattacggccccgcaggagcacctgctaaatgggggtggggcggggtgggacaaggggagtggcagggtgggggaggcgcaccggccctcagccaggcagcacctagacaatgcgacactttgttctttaactgaagaaggcgcgcgctttgatttgtgtatggataactcatttcttgataaactttaaacttcccgcagactttgccctcctcccagagcaggctt

SEQ ID NO: 33337 - DNA, 723 bp, Bovine  19866881623191
  misc_feature (1)..(1): n is a, c, g, or t
naaactcctaacctccgtaaaagacagaaagaggcaggaagggttagagagcaccgagctgaaatctaagaaaacattgtcaagaacgttttcctcatcaccgggagaaaatgccttgctgaagggcaggaggaaaacagcaagatgagtaggctgtgtgacgcgctgccagcaaaacatcccaagtgatgacagctgacgtgctcacagtattttaggatctctccaccactcgcacatttgttccttagatacactgacgaaggcccacagtacagatgattgactctcttcccattgaggctttgctactgaggcataacagtatcaaagtcatggtcctgggaaacacaagctattggtgcaatgaacactacactgtgtatattaataaaattcttcagtgcctttcccacaggattcgggaaccttcttctttgcctcttggtagcacagcttcctctgcagtgtctctctcctagacattgcctcgatgccaccaacagtgtttgcccagccaggcctctgctgttagggccttgatctgttaaatatgataaacttactctcaataacatggctgttcatagtgtcatgagtggcgctgttgaaatgacagctaaattgaagcttcattttcaaggcctcaactaggaatgcaacaatacaaacgatgaagataattggctcccaggccctaagatcactagcttatctcagata

SEQ ID NO: 33338 - DNA, 653 bp, Bovine  19866881727960
  misc_feature (1)..(1): n is a, c, g, or t
nggtttctgttagttcagaagccagctcccatgaagatacacaggtgtggttcaggaaacatgactgaagctgaccagagctgatggcctccaagatggcactgatgggcctaccacagccagcatttcattccgagactgtgagatctccgcaacagagaccctgagtgaggggaagggcccacacaccaccccctgcttctcctggttcagtggatatctacctaggctgggttccagttaagtcagccactgtcttctgcttgagaacagaagccagaataaatgtcaattcatttcaaatatgtctgccaatattttaaagaaaaaaatggatgaggtggaggagcattaattaaaataatcaggaattaataatgtttaaattgacgttcatgaatctttcagtccgggtttcccactgcacccagactgaaattgttcaatgtgaaaacaagctattattattttttttttttttttgatgaaacacttttaggtaggtttcctagaggagcactgaggcttttgcagatgtccaataaaaacatgcagaagaattctcacttttctaaacctccctgaacccaaattcacttattagataaaccctgtctaaggttctataggcttggttaccaattctaattcta

SEQ ID NO: 33339 - DNA, 632 bp, Bovine  19866881734743
  misc_feature (1)..(1): n is a, c, g, or t
ntacttacttttatggctctcttagataattacctttcctcctctgtcatgtccctggaaaggagtgcctgttgtcctctgaggtgctgctcaatttcttctaaatgctcccggaaactctggcacaccgtcttcattgtttccatctcatggactgtgcactgcgaacaattagaaagagctgggaagcaagggctttctgagtcactgcaagagttcactgcagtggcacctgccttcccacctgggctttcttgtgtgcaatgtagccctgctgctaatgtgctggagagagaacaggaaaagcctagacttcggctttttcagtcaaatagagacatatgtggctgggacaagagagcagtgactattgaatggcccttggagacattatgttccagggacaagaagtcagtctggaaacctaggtaatatagggtgtaaggatgtagacaggatcagagaggtagggccccataatgcaggcttgtgtttagaaaagctgagtcttgtataatcttgttttactttggtgccaagtcctgcctcactctgaatctcagtgatattgaacacatctactggatgatatgtgcttgattagagagtctgcttagaatattttttactag

SEQ ID NO: 33340 - DNA, 1055 bp, Bovine  19866881793431
  misc_feature (1)..(1): n is a, c, g, or t
nccctgctgagctatgtactatatacagtatctgttctctttcctttaccccaaggggccatggagatctgctctgtggggtccctgaggggaataaagacgaggttttcctccctgacccagactcaagaggctgctccaatgcccatcttgcaacaggaagaccgctgggaataaagccagctccccgcagagacaggcctgagatgctctcagcacagaaacctcaccctcctttttctgagccagtcagcttctcacagaggttaactctgctcccgagaaaaggaaggttaaccctgaccccagaatggggctgagccctaagccctggcttcaaacagcgttgagcctaagcacaagcttaacccggactcaggcccacactccatgcctggccactgcccaagttctgagcccagccattccttctcccagcagccagtgagagtggaggtggctcagggctgctgccccctgcaggaacctcagcccccagcaggtcctctgattgggtctggagcatcatcttggtctacagaggagggcaaacgtcatcatctgagccgctggaacaaacctacaggaaaaggagtgagtgccggtctgtgggcacaggcaggaggtcctctccgtctctcctggggattcccaggcttaaatttgttctgggaacagagggaaaacccagaaaattgttgtgggcagatctgaaagggtctcagcccaacacataactctgctgaccaaggggattcagacacagctctgaaatctcccctctcccatcacatcctgcccctttttgaattcccccattgtcccctcctctccccacccagcagtagatacctcccagctcaaagcactccaggtagggcagttttgtacaagactggaacccactggggccttttcttccaggaagccttgtttaatatcatcttgcctgtaaattccttgaggggaggaataatggtgcaagcaagcttggagtcaagggcctgcctgcctgcactgtagctacagcttcattctttcccacggattcatcc

SEQ ID NO: 33341 - DNA, 802 bp, Bovine  19866881961475
  misc_feature (1)..(1): n is a, c, g, or t
ntttccttaaattaggaaccaagcgtatcaccaaaaactaaaccacacaattcttaaagtactgggaaatcctatcagattgaaatttggcatagaaaagttagtcatcaaaaatactaatggtggagcttctctgaactaggtaaaaccaagaaaagcctttcatatttaccaattcaatgtttttcaaagaaaagcaaatttttgtaactggaagtgctttggtacttatggataattcaagtgaaaagagtcttctaagaaaatcaataacgtatcaaaggattgagggaggaatattgggtgtttaagaaaacaaatgcttcttcaacccttcaaaaccttccatttacacatggacatcatgaattaaaacttgaatgcagtttttaggctgagatgaataatatgtaataattccacaagaactccacatttgattagaaatttagtaatccttttataaatcaggatgtacagaggatatgtgatatccaaatctaccccatttgtgaaaactaaatctcaaatcaaaccaatcatttgaatgttaccacctacttgccatgtgggacatttcaaaaagtcatataatagaaaatttatcatcgacttcttgccattttagctcacctggtttcatcaatgtacacagattcaagcacggaggctgcatattccaaattcttcttgagatctaccactgaagcctcccctctctctaactgtttgaccaaagatcgtaacctggaggtgggggaagagacatcattcaattagaatagaagaaacaaaaaataat

SEQ ID NO: 33342 - DNA, 912 bp, Bovine  19866882042959
  misc_feature (1)..(1): n is a, c, g, or t
nctggggctgccgcagctgggccctgcaacctgaggagcaggactgctttgggaggtagagcagggccttggaggacagcgagaagccaaaagctgtcaatgtccggggcttttgtgggaaggggctggtctgtagtgtccccctcatccgtctgaatctcctggtgtggatatttctcttctggggctccccccaccctgtctctgtgtgcacgtctctctccttctgtgcctgtccttttgtttttctctgactctttcttctactttatggggctccagcttccagctgtgggaagtgaaggaccaacccattaggcagctggcttgtctctgtgatactggacatctggggctagggttggctggaggtggctggagctttgcacttgcatccagatggccagctacctgctctgtcagaatcctggttccctttgcacactcccctcagtatgtctctctctctttcctcactgtcttctctctagattattctaccccaggtgtccctgacacagacaggatgctgtgtgtgtatgtgtgtgtgtgtgtgtgtgtagggagtctggggaatgacaggtgggacagcacaacccaagttcacggagcctgtctgccggctttccagggagcaggtcaggctggcaggcaggatgaggttgatgggcagtccgtttcccagcctcagagatgttgcataagcagccgcagccccgcgcacattcccatggttacggggctgggaaaggctggcggtggtggcatcgccatggcaccagcatggcccagggctcagctggcatggtgctggcacagagcaactctgagttctcactggacagatctctgccaggcagggctcctcccgggcatcgagtggcttgtggagtcaggcaggaggcaagcagc

SEQ ID NO: 33343 - DNA, 2692 bp, Bovine  19866880158608
  misc_feature (1)..(1): n is a, c, g, or t
naatcactgcagatggtgagtgcagccatgaaattaaaagacgcttactccttggaaggaaagttatgaccaacctagatagcatattcaaaagcagagacattactttgccaacaaaggtttgtctagtcaaagctatggtttttcctgtggtcatgtatggatgtgaaagttggactgtgaagaaggctgagtgccaaagaattgatgcttttgaactgtggtgttggagaagactcttgagagtcccttggactgcaaggagatccaaccagtccattctaagggagatcagtcctgggtgttctatggaaggaatgatgctaaagctgaaactccatattttggccacctcatgggaagagttgactcactggaaaagagtctgatgctgggaggaattggaggcaggagaagaaggggacgacagaggatgagatggctggatggcatcaccgacttgatggacatgagtttgggtgaactctgggagttggtgatggacagggaggcctggcatgctgcagttcatggggtcgcaaagagttggacccgcactgagtgactgaactggactgaactgaactgaaggtgatggatagggatgcctggcgtgttgcagtccatggggtggcaaagcgtcagacacgactgagtgactgaaccgactgactgactgaagttggtgccagcagtaaagaatctgcctgccaatgcagaagatataggagatgcaggtttgatgcctggtttgggaagatcctctggagtaggaaatggcaacccagtccagtattcttacctgggaaatcccattgacagagaagcctggtgggctgtagtccacaggatcgcaaagagttggacatgattgagcactgaaaaggatctgcacccccaaaagcaagcattcgttttgggctatatgcaccctatttcccagagtcccgagcaaagtctgacccaatggtctaaagaaaatgtttatttcagtagaagctgagcataaccagggacatattacagtcaaagaccttcttctgcagaatcttttaaaaacaattagatgaggagatgcagttttttggacttaattcatgccaagatcatgcatatacttaggagcaaatacttgcagctgtgtcattataaacaaacacggcaaatattgctacccaatctttttctgcacaacttttcagacagctaataccaataaacaagagggtcctgcaaattaaaatctttcattttttatagtccagtaaacctgatgccaaaattggatggccctagagatcaacttaacataaatttactgaataatcatcagaatactttgtatggttacatgagatcacagtgaggcataaaatatggtgtacacccttgaggaactttgaatcctcccgtaggagggtcctacaggaaatctagatgagaggagagagctggaagatgtaaaatgtttaagcatataaagagcaacaattggggaatttggctgaggtagggaggagcagagaaaaagaaggtaagatccagagaggaagagagttgctcagaagggctccagcattaatgatcactgatcctgaaaaacaagtctttactgtctgctccactctgcattgtctacaggatgtaggtgcctcgagttagaaagaaggattgttggagccatagatgcatcagtgtttctagaatgcctaataatataaggaatatgtttgaactatttgaagtattttttaaaaatggagaacaaacagtgaaatcaaaccaattcttgaagttagtactttgataagattggagaacactaaggcatttttatactactaaattagttactagacatagaaatgtatctgtaaagtatactgtatacttaatcaaatatttaatggacagcatttgtgtgtgtctttgacaacttaagccaactcttttcactgtacatttatgagaggaaactgttagttctttccatgatttgtagaaattatttttgccatggaactctttacaaagttatcttctaattttattttccctagcacattctacttaggctagcaatacattataagtgctctatttaataatgctgcataggaagctttatgtctgttccagtgattaaatttactgaaagtaactatgtaaacttaattttttaaatctaatattatatccaaaaagatatttatccaatgaatatgccaaaatcagtgtctgcatttgttaaacataactttttacaattcctgtttactaatatctccaactaatcttatatttttccaaaaaatgcacagtgtctaattgcatgcaactggatataagcttcaaatgtgcttacttggatcattctctgtttggaaaagaaatatctaccattataaccaaggtttctctttttatttagttttaaagcagctgaaaacataacgcagtgaactcatctttaaagaggtttcctattggtatctcagagcttaaatactgcaagtaggattgcagatggtccgtctgtatgatacagcctatcaaatgactgatctcttacatgggcagatggctgagaggcctgacagcagctcagtttccaagttgcgagtgagtgtgtgtgtgtgtgtgtgtgtgtgtgtgtgaaaaaataaagagagagagagagagagagagactg

SEQ ID NO: 33344 - DNA, 2038 bp, Bovine  19866880216256
  misc_feature (1)..(1): n is a, c, g, or t
ntttctttatatatatataatgagttgttttttccccccaatgattctctgcctccaggcaaatctatttaagtgaatgtgtacacatataatccatgggttctagaaactgagaaaataggaaatcttgacctctcaatggctctcaggtggtgttccacagcaccctccaggagcaccaggaacaggactgaagcagtgagaaaccaagatacaccagtgatgccctgctctggtcactcctataacttcaacaagcagctcaacttattctcttttttttttttaatataatttttgctttattattttattcatgcatatgaagaaaaggttttgtgaacctaaaaatatttatgtaaatgcttagtatgttttagctttgtctttctcattagattccaggcttctgcacccaaagggccgggcacagtaattgctagataattgggtcagtttgttcctgattggctcctctgcaaatgtacagatgacaaccacagtgatcatgtctcttaatcttttcaaacaactctattctagtctcctaaacgctagttcctttctgtgttctctcattttcttaaataatggtgtcttgggcctcccagaatgaacatgaattatagctccattatgtctttatagatagcaagttttagctttctttccaaagcacacaaatggattttaaggagatctgtaaatggttataatttaagatcagagggtattatccttgagataagattagaatttggcagggaaaaaaaaaaacaaaaaacacaacttttatttagaaacttggcaacttgaacatagaagcttactgcagcagaatttcaagtcagatacttggttgggatgcaagaagtaaaggttggaaaacaagaagtaggttacatttgaaaggactaagtagtgagtgaatttacttcttaaactgttatcttcttccccatatttactctgttgtactgaaatgtttgttttgttgtttcaggcagagagagagagaatgcacaagcacttcatcataagaaactagcttacatgttcatgatggctgacaagttcgaaatctggagggcaagctgacaggctagaaattcacgtaagatttaacgtcacagtcttgagtcgaaattctgaaggctggtgaggcaagtgagcaactcaggcagggtttctacattggagtcttgaggctgaattccttctttggaatctaggctggcgctgaccgaactactgcacaccacaggctagtcgagttgacatagaaaattgaccatcactgtgtcttgttactgatcagcctctggtttctaaaatcttttcctcagtcagctctactcagttccacctcacttcacaaagtaaaataaagcttaattttagtcttttaagggtcttccatttgctagagaccagccatccctgaactagtctggatttccgagagcttctggatgacacagccacacaggccaaatccccaagcagccttgtgtgacagaggcattcctggctggtaggtttggcagaagagagagcggagagagaaatggattatgtgaggtaggttgaccccagaatttcaatacagacttatcagctaatcagtactattacagacagtatatcatttgtatcattattgctaaaattttcaagaagtctgaggcagtccacctttgaggtacacacttcaagaatgtggctaagggcggctctgaactgctctttcatcctgtgttcagaatctcagtggtcatctccatggatttgtttagagaagaactgaggtattcaacaccataattcaagctcccaaaatgacatctgtccaaatgaacacaagtggctgcataaaatgagcactaaaaaatgaggttaaccgtagtcatgcttcatgagctctcgtatgctgtttcagtctgcttaaaaagcagacatatgacccaggatggtatggggagggaggagggaggagggttcaggatggggaacacatgtatacctgtggcggattcat

SEQ ID NO: 33345 - DNA, 4048 bp, Bovine  19866880234178
  misc_feature (1)..(1): n is a, c, g, or t
ntttcatatgctattgctaggaatagaaattgtttaaaagtgttttaaaaatctcttagcaatttttaataaattcctaaattgaaaaaatatatccaaaccataaaaagtcccaatattatatttaagaacattctagtagttctcaaaattattactcagaccatctcaaacttccctcacatttttctgaattgaaatgttcagatgagtacttgctaaaaagacacaaatatgaacaagtgtttgttcaacaaagtccttgccaaaagagattcatggataatttcaggcgagagacctgaaattactaatagagaagatcatggaagcactagaggatttacaaaatgatatggtaaaaaatagatgagaagtaaaattgaatctggttaaagaaatgtagaaagtgcatgaagaatacttgccagaagtgatattatgtagggccttgcaggataatatgagttttcctttccaattagcttgggagagatgtggagatagaattttagatcacatccacgatattaaatgtacagagataagaaactgtatgttggaagagtatgtgtagtaaaagaagaaacagaaagtatattggggccaaatttcataacatatatgttataaaaagaagtaggatagttactgtgacttcctagtatatcaaattacttaaaatctgttgctattagaaatgatacctatttgcagaagtacatcatatcactactttaaattttatatgtactatttacttgaatatcacaagaaactcctattattttaaagatttatgtcattttaatgaaataattttgatgagagtaaaatgaagaaatctgaaatgttacgtgtatttaaaaaaacatgccctgttactttgagactgtgtgtgtatactgtcgtgtctgaccctttgcagtcccatagactgtagcctgcccaggcttctctgtccatggagttttccaggcaagaatactggagcgggtcgccacttcctactccagggagtcttcctgacccagagatcgaacctgtgtctcccaattctcctacattggcgggtggattctttaccactgcaccacctgggaagtagctgttactttgagaaattcactgaataagagtgtttctttttcctggaatttttataggcagttaactgcttgttgaaacaagtagcatgtgttttatagtgaaaaaaatgttttgtctttctcatcccatatttaatatgtttagaaacatgcaaaagtctgatatgttactgacatacttgatatctgtaacttttaaaatggaaatcataagctaggattctttagcttataggtaaccgatatccacttctacttggttgagctgaaagaggaaatttacaatgaggatattcagatatgttgagtaagcaaggagatttgaaaacgccttaggaagagtgaacacaccagagggtgagatggttggatggcatcaccgactgatggatgtgagtctgagcgagctctggggttggtgatggacagggaggcctggcatgctgcagtccatggggtcgcaaagagttggacacgactgagcaactgaactgaactgaactaggaagagtgaaaaccagggtgattctatggatctcagaagtaagagttctgtcatttcgtggctccagctggctctcaagaatccaactgactgtcggatcaatcacctgtggtcatcctgacaggacatagaacagagcaataggggcttaattcacaatcagcatacattggtgaaaatataaaatttgggaatgattcttcctccaaatagattttccaaagaattaaagcattttgttttatacataaatgaatgagtctaagggaatactcttttcttaaaatctcactgaacttatacatcctctttatcctagcccttggctgtaagaaaaaggtatgcaaaaatagaacaggctgcgtccaacattttctttacatattgtttgggaaaatgtctaacatactgtttgtcagaggcaaaagtttccagagagctatagttagtggctataaaaagattaagagaagcattgtattaaatgttacccttagctgatctagctgaaaaaaaaaaaaaaatgacaaaagagaagggtgtttgagacgacaaggggtatgataaaaagtcactgctcacggtttggataaatcaaaaaggccctgttgaagcctgaatgcaacctctctatttggctgtcctgtaacgtactaagtcgcctcagtcgtgtccgactctttgcaaccccggactgtagcctgccaggcttcctctgtccatgggattctccaggcaagaatactggagtgggctgtcaaccccttctttagggttcttcgcaacccagggatctacctgtgttggcaagcaggttctttaccacagcaccacctggaagcccttggttgtactagcagagcgaaacagacctgagtcacagagtgaggtgtacacctagggtgacctggctgaagcattagtgtaggtaccagcccaagaaaggttaaaaagttcatgtttcctgaggtgtctgggaaagcccagaggagagaacactgtgcttcctaacacaggctaatatttagttgctaaatgataactaagggcttattatgtgccagataactcagattggcttgctttatttcacttaacattcaaaatagcttaatgagataagcactgttctgtactccagtttactgaagcagccacacagaaagtccaagcttttggaccatgtgattttattttgatactctgtataaacagatgtcagcataaaaaaattttaagaggaaaaccagtccctttgttgttaaaagtttatcctaaaataaactaagtgatgacagtttctcaggcagcacccaacattagtgaagctctaactttgtgccatattaaagatgtgtaagcttgaccagggttatgaatttgattattgtttaaacggctggcaatttagcagtttatctttgccagacccctcaaagcttttctcaattatagaaaaaaaaaatgccttgcactttggcaagtgaatatttttcagttgttgctcatcccaaacaggggacccagcatttttatttctgtatatgagagtcaggcttcccaggtggcactactggtaaagaatccacctgccgttaacaaacatgggtttgatccctgggtcgggaagatcccctggaggagggcatggcaatccactccagtattcttgcctagataatgccatggacagaggagcctggtgggctatagaccatggggtcataaagagttggacatgactgaagtgacttagcatgcatgcatgcagagtcagcaaggatattcattattattctgagcatgcatgataaaattgttaattagaagtttataaccaagtgaatgaacttatggtatttctgtaatttatatattataacaaataaaatgtgtagtcaatataatgaattattagttacaaatttaatgataacaagggtagttcatactttgtagaactatgaattctcatatcatatgtatttttttcctttgggcatttttttgtctcctaacttgtattctgattatttgaatatctccccctctatattttaggcacaactagccagggactataattgaattatactctcagcattttccccagttatgtcaagaattaggattctttaacttttgtacctcaagcacacaagttttacagtactttggggagaattattttccatgtctgagtttccttatcacagcgattcgttctattgcttatttctattctaggacctataaattgcttcacagtagggtttttcaaactagacagtgtataccaacctccacagtttttgccaaatagatcatctgcactgttacctaattaatattttcaagtaaatttgagacttttatctaaaatttacttggaaggaactatctaactatgcaaaggaaaaacagaataaggcaa

SEQ ID NO: 33346 - DNA, 1901 bp, Bovine  19866880283109
  misc_feature (1)..(1): n is a, c, g, or t
nttcccaaagagcacacatacttcaggttttctcttaatatgtgtagaagaccatgtaggggtgtaattttgtttgttttatttcagaacttctctttcttgaatcacaagcaagcatgtgtctgaagtaaacaaacaaaatgggcatgtgcgtttcttttcaagaaactaataggatttaggatgagttatcaccaggccttgccagtttgtactaatgtgttaacatgtacacagagataagttccaggtgatagaaggagctttagctgcattctcactacagcccagactctacttttatgcttctaattttagttggggaaaatccaaccagtacatctaggtgtgcaaggttgtggagaatcacagccaagctctgtgtgaatcagtgtgcgttgctgtgaagcaattgaggactgaattgaatttttcaagtaaatatgttatttgaaaattctccattgagtttatcctaagaataatatatactttttgatctatataaggattttcttcgaaatatccaaggaagcatattttcagccagtctctatgataaatggcttgatgttattgatcaagggaatgaggacgacaaaataaaggcgacccagaggtaatgatgccataattactcaactctgagaaaatacaaccaacatactcttaggaaaatattagcttatactttacagctgtgtcctctaaaataatgaccagtatcacggggtttcacttgatcatgcccatggaagccagtttgaaatgagatgcatgccttattggtcacactgtaattgtcaccaatcttattaacatggaatgcttgaccattttatgccttctgaatacacgaaactgatggaggtgaaatccactggtctcaaaagagatgataaagaaccaatccgccagtggtatgatcttaaatacaaacacataactaaccagagtagttcttatctgaatcaggaattaaattcagtgaaacattttgtatgcattcatgcctggaactgtgagaatggactgtgtacatggtataaaaagaagtactttgttctctgtatttccacttactaagcaaaatgactcgctttatttataagtgtgttttctgtccttaggcttctagaccagctgccgagagccaatgtagtttttctgcgatatctttttgcagttttacgcaatattgagcaacattcctcatccaatcagatgacagcttataatttatcagtgtgtataaccccaagcattcttcatctgcctaattctggcagctcagaattaggaaactttaccaaaaaggtaacgagatctcttattcttatgccttgtggggcagagtccccatcttgaacctgaagtctgtagtattaactctgatgaaccagtttttaaagtgcacattttaattacactgccttggagtggcagagtcctactctggttgggcatgggaaggtgtattataactgagaacagttgactcacttcccctttgccacccaagagattaaatgatagagaggtaagagtaggatgatatgatagaaaagaacctggctttggaatcagagagccaaggttcaactctcagcctaatcactgagggtatacaagcctccaaactatgatttcatcattacacaatgatgacaacacccaatacatctggtcactgtcggcacaccttagcagcctgggcaatatgagcacctgaggctccacacatactggccgcactctgccagctgtggctcattcaggaaagtatttggcttccattgtgtctccgccagaggatgaggaagctagtaaaatatttcagaacatcctaacagagccacaacatgcctaatatgatcacagatctttcccaagctgccccg

SEQ ID NO: 33347 - DNA, 3814 bp, Bovine  19866880289689
  misc_feature (1)..(1): n is a, c, g, or t
nctaaaggagatcgtcctgagtgttcctggaaggactgatgttgaaactgaaactccaatactttggccaccttatgagaagaactgactcatttgaaaagaccttcatgctgggaaagattgatggcaggaggtgaaggggatgacagaggatgagatggttggatggcatcactgagtcaatggaatgagtttgggtaaactccgggagttggtgatggacagggaagcctggcatgctgtggtccatggggtcgcaaagagttggacacgactgagcgactgaattgaactgaaatgcagagtacataatgcaaaatgctgggctggatttttcagtcatatgctggactcaagattgctgggagaaatatcaacaacttcagaaatgcagatgataccactctaatggcagaaagtgaaaaggaactaaagagcctcttgatgaggctgaaagaggagagtgaaaaatctggcttgaaactcaacattcaaaaaactaagatcatggcatccaatcccaccacttcatggcaaatagaaggtaaaagtagaagcggtgacagattttattttcttgggctccaaaatcactgtggatagtaactgcagccattaaattaagacacttgctccttgcaaggaaagctatgacaaacctagatagtgtattaaaaagtagagacatcactttgctgacaaatatccgtccaagtcaaagctatggtttttccagtagtcatgtacagctgtgagagttggaccagaaagaaggctgagcactgaagaattgatgctttattactgtggtgctggagaagaatgttgagaatcccttggacagcaaggagatcaaactaatcagtcctgaaggaaatcaatcctgaatagtcactagaagcatgaatgctgaagctgatgctccaatagtctggccacctgatgcaaagtccctcattggaaaagaccctgatgctgggaaagactgaaggcagaaggagaaggggacagcagaggatgagatggttagacaacatcgcagattcaatggactaaatttgagtgaagtcaggatacagtgaaggacaggggactctggcatgctgcagttcatgcagtcgcaaagatttgtacaagcctgagggactgagcaacaacaataacaaaagtgcttggatgtgcaaggcaaagtacctgataagacaggctgtgttgtgggtgcgggagggcgtaaaggaggagtagcagaagacagcggctagccaggctcaacatgtatttgggaagactcttaagagaacaagcaagcaaaaaaaaaataaaaataaaaataaataaaaaataaataaaaaaaaaagagaacaagcaaaaaatacctgttgaaagctgaaagtggaatggtgctaccaattataaaactgtttgaagacagtgggcactgcctcactctagtattcttgctggagagtcccatggacagaggggcctggagggctacagtccgtaggtcgcaaagagttggacacgactgaagtgactgagtatgcacacacacaggatgcaagaaggtgattcttggagtatttgaaagctgttttagttgactgatgagactttgagaggagcctaaatgacatgtgagagagagaacaatcctcgcctagctgcatagcagaagccatagagaagggggaaaatgacacatgcaaatttgtatcaatactagggatttgactttgaatgcactttgcacctgtgcttttgatcttcacttgttcacttcacaagtttgtctgttaaatccaaagtgagcacaagtgtttgagaaattaaattacttttccattgactctaaaaagaatccacctaagacaacaaaattttatgtcactatgaaaaaattacttttttccccaagtttatatttaaaatcgataggttgcattaaatagtattatagtaaattcatcctggaccaatatggaaatcttcaggtatatgagaaaattcagagtaaatgttaatagaagaaataaaacacactaacttatattgacagtaaactgcacacgacaaaactacaaaatttgagtggagaaattagatttgatagatttatgactgcaaaagaacactcaaaaacgcaaaagctgtaaagtgtaaaagtggatatgaaaaacaaatagactgattactcaaaggaaaatgtaatataaaatgtttatatacagtagttgatacctgctgaatattttcaaataaaattccaatgtagacaaaatttcttatttatatatttacatttattaaaaataattgtcaaagcatcctcaggattaaaacagtgggataaaaggaacaggtgaagcatcttcttcatgtgcaagatacatctaaaacaagttacattgtttacagaagagtgtaacaatttttctaacattttattataatacttgctcagtcttctcagtgatacttaaaatcatagatactgagacagatgctattaaatctgaaaaagttgaaactcagtttacatatgttctgatagttattaatatatcaaagtgtactgcaacccatgctttgaaagttctcccatatcttgtgtaactctgtatattatggaattttcatatttgtaaatactcacttgcaaaatgtatttgaatccaaatcaaacctacctgacaggtcttcatcagagaatatctaggtcccttcagtgcaagtgggacttggtaagttctcaggatgctttggtatgttccaaggtgcaagataaattagaatccattttggaaaagatatttttcacatatcctgtccctcccccactctactagagagaatgttaaatcatcttcttttctacaaaattaaagttacatggttacaaagtatcaacattcagggtaaaaattaacctcctgtaagctgtatagtgggagaggtaggacatgagtgataaagtgataacaaaaatgaataaatatatgtgtgtcttaggtttaagctgagaaaccatactttgcacatttttaacgacagggccatgaaactggaaagactctggaggatgatgtacaatcacttcttattgtgtatgttgaaaacggaatgcagttctctgccttcagtttagtgcttgccctgaaaagttaagcaccagcaagaagtttctgctttattgactatgccaaagcctttgactgtgtggatcataatcaactgggaaattctgaaagagatgggaataccagaccacctgacctgcctcttgagaaacctgtatgcaggtcaggaagcaacagttagaactggacatggaacaacagattggttccaaataggaaaaggagtatgttaaggctgtatattgtcaccctgctaatttaacttctatgcagagtacatcatgagaaacgctgggctgaaagaagcacaagctgggatcaagattgccgggagaaatattaataacctcagatatgcagatggcaccacccttatggcagaaagtgaagaggacctaaaaagcctcttggtgaaaatgaaagtggagagtgaaaaagttggcttaaagctcaacattcagaaacgaagatcatggcatctggtctcatgctttcatgggaaatagatggggaaacagtgtcagactttattttggggggctccaaaatcactgcagatggtgattgcagccatgaaattaaaagacgcttactccttggaaggaaagttatgaccaacctagatagcatattcaaaagcagagacattactttgccaacaaaggtttgtctag

SEQ ID NO: 33348 - DNA, 3355 bp, Bovine  19866880292038
  misc_feature (1)..(1): n is a, c, g, or t
nctaatcagtactattacagacagtatatcatttgtatcattattgctaaaattttcaagaagtctgaggcagtccacctttgaggtacacacttcaagaatgtggctaagggcggctctgaactgctctttcatcctgtgttcagaatctcagtggtcatctccatggatttgtttagagaagaactgaggtattcaacaccataattcaagctcccaaaatgacatctgtccaaatgaacacaagtggctgcataaaatgagcactaaaaaatgaggttaaccgtagtcatgcttcatgagctctcgtatgctgtttcagtctgcttaaaaagcagacatatgacccaggatggtatggggagggaggagggaggagggttcaggatggggaacacatgtatacctgtggcggattcattttgatatttggcaaaactaatacaattttgtaaagtttaaaaataaaataaaattgtagttggaggaaaaaaaaaagcagacatatgcatttctatatttgatgtcctacagataagtatctggtgatattcagatttcacttgctaaaggacaaatagtaaacactggggtcagaactagatcacagccttttccactatgtcatctagtctgttaaacattcgtaattactattctgggaaatagaatcattaggcttctaaagtaaattatggacaagcagcacggaacttacttgttttagaggtaggggttctgacagaaaacgaaaaaaaaaaaaaccagtggcatcactttgaaaatctcttactgtgaactgccatagaaaagttaaaatttacatgaatcccactgataaactgtaacattaaaaaaatggaagaataaagaaatggtgtttttcagttatgataataaaggaagcaattttcttttgtgcctggcaattacactgaaaacataactgcaagtcaaatttagctgaatctttgaagaagtagagcagggtaagagactcatttgtgggttctgagaatcagcttgatctttccttccatcacaaaaatcaaaaaggttattgtaacttgagaaggaaaagcaagattcaacaatggctgagatgaaagacaccgggagcagatttgctgccttttcagtattttctaactgggcatcctgtctccaactggatactcttctaattgattcttcaaaatcttaacttccaataattaaacttccatggggtcgcaaagagttggacacgactgagccactgaactgatacagaggtgagagtccagaaggaaattagcattcattggataccagtcagcttctttcatgttgccttgttttatttacttcagagctttacctactgcctgaaacgacctcagttgtttgtggttggtctacccttactagaatcaagttccctgaaagcagagctctgctctgtcatgtcttccagacgctgaggcaccaaaagaccatagttgacacgtagtaggagttcacgttttgtcaataaactctaggcctggtgggctgccatctgtgtggtcgcacggagtcggacacgactgaagtgacttagcagcagcagcagcaggcacaagactagacacattgtgaatcttacatcatatgctctcaagtgatcttgaaatgcaaatactatcattcctgtcttcagtaagaaatcaaggtttagaggaactaagtaacttgtcaaaaatcaggcaattaaggagaggggatttgagctaaggtatgatgcacattgcttgtggtccatgtcataaggcatgtttcccaaaataaaccgtggttggaaataagatgttcgtgggcatttttggacatggtggtgggggagggtgaattgagagagtagcactgaaacatatacattaccatatgtaaaattagatagccagtggaaatttactgcatgatgcagggagttcaaatccagtgttctgtgacaacctggaagggagggctgggatgggaggtgggagggaagttcaagagggagaagacatatgcatacctatggctgattcatgttgatatgtggcagaaagcaacactatatggtaaagcaattatcctccaaataaaaataaataaaaaatttaaaaactggcatgaagtaacatagcattagatcataagacacccactcctttataaacttcctttggttaacttgattgcatcaatggtaaagactgagattagtgccagtgtgtatttaatgcttctctaataactgctactctctctcgccctcattcagttgagagctggtaagaaaataaagccaaagctttgtttccaggcttttattttaatctatataattattctataggtgattatacctataaattatatgcttgtgcatgcctggtcgctcagtcttgtccgattcttttgtgaaccaatggactgtagcccgctaggctccttagtccatggcgttacccaggcaagaatattggagagggttgtcatttcctcctcccgggggtcttcctgaaccagagatggaacctacatctcctgcgctgtaggcagattctttggagtctgccgagtcattggagaagcccattatataaacatagtctatttataaaggatctacacaactattgcaaatcacttgccttattctgtttttccatttgcaatagttagatagttccttcacaagtaaattttagataaaagtctcaaatttacttgaaaatattaattaggtaacagtgcagatgatctatttggcaaaaactgtggaggttggtatacactgtctagtttgaaaaaccctactgtgaagcaatttataggtcctagaatagaaataagcaatagaacgaatcgctgtgataaggaaactcagacatggaaaataattctccccaaagtactgtaaaacttgtgtgcttgaggtacaaaagttaaagaatcctaattcttgacataactggggaaaatgctgagagtataattcaattatagtccctggctagttgtgcctaaaatatagagggggagatattcaaataatcagaatacaagttaggagacaaaaaaatgcccaaaggaaaaaaatacatatgatatgagaattcatagttctacaaagtatgaactacccttgttatcattaaatttgtaactaataattcattatattgactacacattttatttgttataatatataaattacagaaataccataagttcattcacttggttataaacttctaattaacaattttatcatgcatgctcagaataataatgaatatccttgctgactctgcatgcatgcatgctaagtcacttcagt

SEQ ID NO: 33349 - DNA, 1099 bp, Bovine  19866880421497
  misc_feature (1)..(1): n is a, c, g, or t
natgtgcatttctctaaaaacactccacttatgttcaggtctacagattcgtgaggctttgaaataagaattaagaatacaaagtaaattctcatttacactatttctctctattcctttaagacagtggatcaaatattaaaatatattcttccccattaaaggaattttacagttattattattttcttatcccattttgagtacagattgcatctggaaaattcaacaggttaaaaaaaaatgtatgtatgaaatgatatatggatccaacatgcattcatgaaataaatattccagaacttatcatctccaaagccaaattgctatgaatcaaaaactcatatatgatggcaaagtattgcagcaacacattttccctaaaaaggaaaagaatagaaaagagaagagtttcattctttgaacacctagatgtgctaaatatcatgttagagacatttatatgtctgtgtaatggaaatgcctgtgactgttttgtgatgtagttatttttatcctcgtttttatagagaagtcatttgaagttcggagagattgaacacatgctcagcaacacactgttagtgagatctagagtctgaatccctgtctgatgagcccatgtctatcagaacctgtgtcttttccaatcattcttaccatgtgctggcatgggctgcactgggcgtgggcagtggagagtgtgcacagctgtgaggacagggtggctgttcactgttgacgggataaactccgtttctactcccagcatctatgctttgtttttttcctcatggagcatctattcagtaataagcctcacatcctcaggaagcaattgtcccatcattcttagaagactgttatgtccttaaatgttagatggaatgaggtcatacatcaggcccatggtgactggtctttgtttaatgatgataatgcatttgtcctaaggtcaaatgggattattaccagaactctactgaaacataaaaggcaaatggaaaagagacaaaaaaaacaggatcggtttcagatctcaaaagaaaaccacaaaatggatgtgatgttgaaaagcaaaacctggggacaaaaagca

SEQ ID NO: 33350 - DNA, 1159 bp, Bovine  19866880470153
  misc_feature (1)..(1): n is a, c, g, or t
natgaaaatatctctggtcttgaggttcttttttttttttctgtggcattataattatatcacacttcccttacatatttggaaaaaggcaggcttcataattggagaaggaaatggcaacccactccaatgttcttgcctggagaatcccagggacgggggagcccggtgggctgccgtctatggggtcgcacagagtcggacacgactgaagcgacttagcagcagcagcagcaggcttcataatgatgtctatgcagtcatctgagatattttaaatgagactgagcatcacctaaaaaaattttagtctgtaacttacaaaggaaagacaaatgattctccaggctagaatcaagatcaacaaaactatatctcttgatttacatttaaacatacacatttgtgttcctttaacctttaaagagtctatttttaaatgacctacttttaaactggtttttagttaagtgtgtcacacccagatgcagttgacttttaaaagtgtttcactccttgctatttctttctaaactaattattttatttttagccattctgactagcacaagatattttctctagagaatgaaatcttttctttaacaggaaagtagatgaaaggaggataggtttgttctggatataggtgttttaggttatttcatgtttctgtgaatggtgcatattatactgatcaattaaaacaacaccattcttctgtttaatatcttctgcagatgcaggtgaaagggcagtgagaagcctcaggagttcctgaggttgatcttccctgagacaggacttcaaagcgttaccaacagatggttgtccacctcatttgtaaaagttgctagggggaaattccacagttgtttttcatcctgaatccatctgtgctgcatccctttgtcaggaacgtgtgtctagtatctgtccaaaatctctcctgtttgaatgtaagtccatttcctcttcgttgtgaccttccttgatgggaagaacagctgctcgccatccactgtgtaatgtctctcccatggatcagcctttatatatcaaatagaattcttggctgcttcaagagaccttaggtaaaaaaccctatgtttgatttggagggaaaatgctgtgtactgattgaaatcattgcactgca

SEQ ID NO: 33351 - DNA, 1079 bp, Bovine  19866880490743
  misc_feature (1)..(1): n is a, c, g, or t
nattcagaatcaatctgaattgtgttttagagtgtgaaccccattaatgataaaactttgttaaaatatattgtatagtgaaattgtggtaaagtatcaaatgataaaaaaaattcagctaagggtccaagataaagttatgagtgttaataaattgcaggtcaagaataaaaagatcttcattttgaaagataacataatgattaagaattttattttctctataggttattgcagtaggaagctttttttttttttttaaggaagactgcaaaaatctatgaagtgacctaccttttcacaaacttctttccaagaatgtctataaatatctccacaaagaaatatttctgaattccatagttttgataaaaataattacttctttttctggtttgtagaaaatagtcacagattaagaaattaggatattacatggaacaacagaatggttcaaaattgggaaaggagtatgtcaacactatatattgtcaccctgcttatttaacctatatgcggactacattgtgcaaaatgctgggctggatgactcacaagctggaatcaagattaccaggagaaatatcaacaacctcagatatatagatgataccactcaaatggtagaaagcaaagaggaactaaagcctcgtgatgagggtgaaagaggagagtggaaaaagctggcttgaaacccaacattcaaaaaactaagatcatggcatccagtcccatcacttcatggcaaatagatggggaaacaatggaaacagtgacagactttatttccttgggctccagaatcactgtggatggtgactgcagccatgaaattaaaagatgcttgctccttgaaaggaaaactatgacaaacctagacagtgtattaaaaagcagagatatcattttgctgacaaaggtccgtatagtcaaagctgtggtttttccagatgtcatgtatggatgtgaaagttggaccattaagaaggctgagggccaaagaactgatgctttccaattgtagtgctggagaagactatcgagagtccccctggactgcaaggaaatcaaactagtca

SEQ ID NO: 33352 - DNA, 1765 bp, Bovine  19866880512263
  misc_feature (1)..(1): n is a, c, g, or t
nattttccaaaaaaaaaataaagcaaaaaaaataaataaataaaaaaattaagattttccaaaatgttaaattgagtgccacatatgttgtcagcttttcagctttcctcttatccaagccttccaatgctgctcaattattctccttctgtagtgtcagctttaaaaaaaaaatttataaaagaaacattataacgtaacataattttaataaagagtttttaaaaatcaattcatggtggctgacatctagaatttaatatcagaaacccagacttcctatgttctcaatgttttctcattgagaaaaagcaattaattaaaaaaaacaccctgcttggatcattggatagtctatacaacttaaattaaaacatcaatgataaaggcttacaatacctgaactaacactctaacgcaaggaatctactgttcaacaaacttctaataaaaggttggatttggaaaatagatcaataagagttattaatttctttaacaaattattcttttcacaaagcttaaccaatggattcttttaattagttaatgtcccttcttttgcctcaggacatttataacaattcatttaattaagtctgcatttctagatatcctgtgaattatcataccatggattagtatatttcatttaagtgaaagtaaaactataaagttcagtattgtgcaaaacatatctatctatattttaaacaatggacaattataaacatgagaagtatgaaaagcatatttcatgactgtgtgtgctgtttttgtcccactttagtcaacatggctttccgtttatctgagaaaacattcaagatgttcatttaaaaacataaatgccaaatgaattccagagaataataaattctttggaaatttggagaatgtactggggtgctttgatgatacattatctagcaggcctgacaggctgaactgtaacaaataacagattaggaaagtttggaatatttcaagaacttgagcaaagtctctagaacaggaattttaaagacatgtttaaggaacagagtgaaactatctcactaagggaaaattcagaaagaaaacaaagagataagctgtagtataaatgtaaaaagccttaaatgtcaggagagagtcagatttgaattacagaaatatttgacgtgtaagcatttatctgaaaaaaattatattaatatgatggctgttaaaaacaaacttgaaggacagaggtaaaaaggacactagcagtcagggatcccctggtgactccatggtaaagaatctgccagtgagggagatgcaggagatgtggattcaatccctggatcagaaggattccctggaggaaatggcaacccactccagtattgcctggagaatctcctggttaaagaagcctggcgggctacagtccacagtatcgcacagtcagacatgactgaccgattgagcacatgcacatcttaaatataggtgatatctatgttactgaaacaattaatcatcaaatgcatatttcagaaagtacacaatgtatgtgcttcggcaaaggaacgctctatttatcagtagagtggtaaaagagtctcaaaacatcaacctcagtcagtgattctcaacctggagtaagccgggtaagagaactgctgcccctgacagctgcacgtcaagatcctcttcttttccagagagaatcactgcatgaaatgagaaatgctactgggagagcgtgttgtgtgtgtaatcccctgcggaaacagaa

SEQ ID NO: 33353 - DNA, 760 bp, Bovine  19866880526772
  misc_feature (1)..(1): n is a, c, g, or t
ncacctggaaactaatagattttttaaggtaaatttatacagctaagttttgcaccattagggtttttatttaaaagttttaacctttatttcaatttctagggggaatatttaacagttcacgctatttttacagcatcaatcacacatgtgttagtcactcagttgtgtccaactctttgtaaccctacggactggagcccgccaggctcctctgtccatggcattctccaagcaagaatactggaatgggttgccattcccttttccaggggatcttcttgacccaaggattgaacctgggtctcctgcattgcaggtggattcttcaccatctgaaccaccaaggaagccataatgggcatataaattttcttttcgactcttaatataacctgcagtgccaagaaacaaatatgtcagtaacgggaaacatcatctcatttttctgagaatgccttcttccaccattcctgcagtagacatgttttactaaactttatgtaagcatgtaaactccctgaggcagggattttgacttattcactgatttatcccgggtgccgaaaacatggagtattcaatgaatacaatctacaatctaaaccacatattcaaaaaaagaaaaatcataaactaagatgtgaggctttaaaacaatatacattatcaatttgatatccctcagtctattaactttcaacatgtcatttttaaacaaaacctctgttgaaacaggattataattacaaaagtatat

SEQ ID NO: 33354 - DNA, 715 bp, Bovine  19866880567748
  misc_feature (1)..(1): n is a, c, g, or t
nttttaataatggttgggagaaagttctttcctacttaacatggctggggaaaactgcttggtgtttattagtttgtcccccaaatatttttcaaactaacagtttggtaaacctgtaactgttgtattgagttgttttctttccttgttttcagggctaagtgtaggataaaggctcttcttaggataaaagcctttggtaaggactgcggagaaggcaatggcaccccactccagtactcttgcctggaaaatcccatggatggaggggcctggtgggctgcagtccatggggtcgataagagtcagacaggactgagcgacttcactttcacttttcactttcatgcattggaggaggaaatggcaacccactccagtgttcttgcctggagaatcccagggacgggggagcctggtgggctgccgtctatggggtcgcacagggtcggacacgactgaagcgacttagcagcagcagcagcagcagagtaattaaataaatcactgagttgattgatagtgaagggttgaaaaatgattgaattttgaatgcagagtagctactgactatgcaggacttcctatgagattagtttagctggacagatacagatttagttgaccaattgatgtggctgattgacgtggccttggaaatatctgttaaatcaggttcagttaaaaaaaaaaaaaagtacctgtgaattacaac

SEQ ID NO: 33355 - DNA, 4452 bp, Bovine  19866880597964
  misc_feature (1)..(1): n is a, c, g, or t
ntgacgtactccttttaaatttggacccagtccattgttccatgtctggcccaaactgttccttcttgacctgcatacaaatttctcaggaggcaggcaaggtggtctggtattcccttctgttttaagcattttctgaagtttgttgtgatccacgcagccaaaagctttaacacagtcaatgaatcagaagtagatgtttttctagaattcatgtttttctatgaccccaacagatgttggcaatttgatctctggttcctctgtcatttctatatccagcttgaacctctggaagttcacagttcatgtactgttgaagcctggcttggagaattttgagcattactttgctcatgtgtgagatgagtacaatgctgcagtagtttgaacagtctttgccattgcctttcttagggattgcaatgaaaactgaccttttccagtcctgtggccagtgctcagttttcaaatttgatggcatactgagtgcagcactttcacagcatcatcttttagggtttgaaatagctcaactggaattccatcatctccactagctttatgcatagtgatgcttcctaaggcccacttgacttcacattccaggatgtctggctctaggttagtgatcacaccattgtggttatctgggtcatgaagatcttttttgtatacttcttctgtgtattcttcccaccttttcttaatatcttctgcttctattaggttcataccgtttgtgtcctttattgtgcccatctttgcacgaaatgttcccttggtatctgtaattttctggaagaaatctctagtctttcccattcaattgttttcctctatttatttgcattgatcactgatgaagtatttcttatctttccttgctattctttggaactctgcattcagataggtatatttttcctcttctcctttgcctttcgcttctcttcttttctcatatttgtaaggcctcctcaacaatcattttgactttctgcatttccttttcttgggtatggtcttgatcactgcctcctgtacaatgtcatgaacttccatccatagttcttcaggcactctctctctctcagatataatcccttgaatctatttgtcacttccactgtataatcaaaagagatttgacttaggtcatacctgaatgatctagtggttttccctactttcttcaatttaagtctgaatttggcaataaggagttcatgatctgagccacagtcagctcccagtcttgtttttgttaactgtatagagcttctccatctgtggctacaaagaatataatcaatctgatttcagtgttgaccatctagtgatgtccatgtgtagaatcttctcttgtgttgttggaagagggtgtttgctatgaccagtgcgttctcttggcagaactctattaacctttcccctgcttcgttttgtactccaagaccacacttgcccattgctccaggtatttcttgacttcctacttttgcatcccagtcccctaccatgaaaagggcatcattttttggtgttatttgtagaaggtcttgtaggtcatcatagaaccattcaacttcagtctctttggcattagtggttggggcatagacttggattgctgtgatattctgtaacttgttaagaacacttaaatgtcaatattgatgaatttctggaggtcaagtgtggacttagacactcccaaggcccaatcttagaagagccaccacattttcatacgttttacctccaattacttgaaaaggttcttatattgaaaatcaaagaaaaatcccctaatgttttgggcaaagagaggaaaatgtagccatcatgaaatacacccagagtgttctttatccatgacaaagttctgccatgcagggaaaacttcagagccctaggtgatgtgaggaaaaagcaaatactcaactccactcctcttggcctccctgtctcacagaaaaggagcgaagaaaaaaaagctaagaaatgcttctaaggaaagagtcaagggactcaagtccacatagatgtaatcaaattaatatagagcactgcccctctccaaaaacttgtcattgcatcaacccgtgaaagtgaaagttgcacagtcatctctgactctttggaaaaggtcagttttcattccaatccctaagaaaggctgtgccaaagaatgctcaaactaccacacaactgcacccatctcacacactagtaaaggaatgctcaaaattctccaagctaggcttcaacagtacgtgaactgtgaacttccagaggttcaagctggatttagaaaggcagaagaaccagagatcaaattgccaacatctgctagatcatcacaaaagcaagggagttccagaaaaacatctatttctgctttattgactacatcaaagcctttgatgtgtggatcacaataaactgtgggaaattctgaaagagatgggaataccagaccacctgatctgcctcctgagaaatctgtatgcaggtcaggaagcaacagttagaactggacatggaacaacagactggtttcaaataggaaaaggagtacgtcaaggccgtatattgtcaccctgcttatttaacttatatgaagagtacatcgtgagaaatgctgggctagatgaagcacaagctggaatccagactgtggggagaaatatcaataacctcagataccatagggtcgcacagagtcggatacaactgaagcgacttagcatgcatgaatgcattggagaaggaaatggcaacccactccaatattcttgcctggagaatcccagggacagaggagcctggtgggctgccatctgtggggtcgcatagagtcagactgaagcgacgcagcagcagcactagcaacagatacgcatatgacaccacccttatggcagaaagtgaagaagaactaaagagcctcttgatgaaagtgaaagaggagagtgaaaaggctgacttaaaactcaacatgcagaaaacttagatcatggcatctggtcccatcattttatggaaaatagatggagaaacagtggaaacagtggcagactttaatttggggggctccaaaatcactgcagatggtgattgcagccatgaaattaaaagacacttgctccttgaaataaaagctatgacaaacctagatagcatattaaaaagcagagacattactttgctgacaaaggtacgtctagtcaaagttatggttgttccagtagtcatgtatggatgtgaaagctggacaatgaagaaggctgagcacccaagaattgatgcttttgacctgtggtgtagaagaagactcttgacagtcccttggacaacaaggagatcaaaccagtcaatcctaaaggaaatcaaccctgaatatttactggaagtactcatgctgaagctaatgctccaatattttggccacccgatatgaagagccaactcattggaaaagacgctgatggtggacaagattgaaggtcggagaaggggatatcagaggatgagatgattggatggcatcactgactctgcacaggagtttaagcaaactacgggggatggtgaaagacacggaagcttggagtgctgcagtcaatggggtcacaaagagttggacacaactgagcgactgaaaaagaacaacaaaagaacgtctttgctcattagtagaactgtgatagaaccagtcacctaaaagacatgctaacagaagcttcccaagcagaaatacaaacataaaaatgaatgggaaaagaaatagagtagtatatccaggaactatgtgataattaacaaaagatgtaaattgtacatgatatgcaggctagaaaaagaaacaagaaatatttgaagtaataatgactgagaatgttcccaaactaatggcatgcactaaagaccacacacatgaagctcagagaacaccaagtagaataaatgctcaaaaaaaaaaaaaaaaaaaaaacaactcctgtcaggcataacatagtcaaagtatagaaagtcaaagacaaaaaaagaaattttgaaagaagccagagaacaaatatattttccctacagaagccaaagtactagttattctgatagatttcctttcttcaataaattcacctatgaatttctacatttagcttatgtggactggatgctgagagggaggtccacagactagtggaatatgctattacatcatagtttattatcctaatctttctcgatatactgagaaagcatcaggaaaattcttgttgaagggtcactgaacatatttacagttactaggtaatattttttttcttatacttgttttttactatctgacatttatccccatttaggcagcagctgcagtgttctatgtctccagaagaggataatgcagaaaaatccacaagattaaaaaaatgtcaattt

SEQ ID NO: 33356 - DNA, 1254 bp, Bovine  19866880659914
  misc_feature (1)..(1): n is a, c, g, or t
nctagctgattttaaattaggttactgctactgacaaatggaagatgaaagtttaacatggccatttgttagcaggtctgcatgagtcccagtgctatttgccctcatctaatcttattgtgctcttcctgggaagctcaaggtagccatgagataaaggccagtgttaggtgaacaaggtaagaagccattctagtttcttcctccccaccttccggagtcaggcacttttatttcagtcgctgcgaaatcacagagaggcaagctgtatttccaaagggagctaaagcattatgctgatcttaacaggcaaatccaagtcctatctggtcccaagttaatcactagtacgtgttaaaaactacctaaataaacacacttttggtgactttctaatagacagtagaaaatcaaagattttcttaaccaaatttcaaggattttcttaaccaaatatagtggtttgagtatggggaaagtaaatacaggaatggttttagttaatggcatagctgacatctggcttgttttttctgcacatggcagatgtctcaagattctttcacttatgggagttttcatgacatccatccatgtttctacctcttgaaatttttctcagtggcctacctgcatttaagaccaaaacaaaaatgtaatgggtccctactgtgtgtcatgcactgtaccaggtgccacgatgtttacccaaagtcctggaaacccaaaaacacaatgcaaaaggacatattagaaaaataaataaaactccagtctcaatatcttattaacatcaacttttcagctgtatttgatcatgaagtcttacattacttacaaggtaattgctattataaaaaagggataggtcgttaatagtctcattttccaaaacccattttatatatgctctaaattatgctacatccaacaaagtgtgcactttgaacttacaaacaaaaaaactatcttcatacagtatgcattctaactcttgaaataattgtaccttgtaagtcatagtttaagatagaatacatatgcttatcatgtttattgcagttgcatttcagaaggggagctaagaaatttatagaaactagaaggtttggcattaatgaagtcaagtggcctcttgaactttaaacttccatatcacaatatgaatctggttcaaagataagaaatagaataaattctctcctaaggacggacctgaatctctgattgctcagaggctgaattaaccagaga

SEQ ID NO: 33357 - DNA, 3389 bp, Bovine  19866880685432
  misc_feature (1)..(1): n is a, c, g, or t
ntaatagtaaaaatgtctgtctatatcacatagaatttacctgtagattaaaataaaatgaataggaaatgtagaaggatgaaatttataatgggtgatttgactatatttatgggcatggggaaaaaatggagagagacattagtatctgcagctgaggaactcttaatccagtccataaggaaggcatttgttacagaaaggatgactgttgggaggtgctggagacgctgctgggaaggcttctgcacagcagtaaacagccagcttgccgagaagggagggcagaaggtggtgccggggcctcacacgcgttctttcatcctgttttcttctgctgtctctcctatccctccctcctttttcctcatcagccacagcttctttcttcaattcatctgatggctagaaccctgggcccaggctgagaactgaactctaaacacagttctcccactacctacctagttgggacaagcattccatctccctggaagatggacgttttacagattcaatgactgaatctgtgaaatgtctggattaaaaaatttctagcctttcttctggtcttggcagtctatgattcctcctatgataaatgtttttttccccaaatacttaaagaccgtttcctatttaaatgtataaagacaaggacagcatctactttctgtatttggggcatagcatctaaactagtcagttggatatgttagggagaataatttaaaaaacccaaactaacaagtatatgaaaatgggaacctgcaatattttcctagctgccttcctgtaatcctcataaaaattttcttaacagtagtaaagtcatcctatgagaagaagttagataactgtttttccttatttaggccaaaatttagtcttaaaaagaatatgctaacatagagtatgcagaatatacttcctttgagtgtagcactggcacatactttttctcagcattcgctacatgaatttgctggagcctagcatgcagtaggtactcattagatatacatcaatgaattgacatttttgagaaatagtaaatataaaatgtgttccttgttcagtacaaacagcatgttcattagtaaaagaaatgtcctgattattttacttctagtttcttgattaagaaggaaaaaaaaatgtgcctgatgttcattgcttcaatttacttcataacactgtcaaaagtctagtagttttcatagtaaatacctcatacagttgcaagcagatggcatctatgaatccaacttgcatacttgggattttgtttttcttctcccggttcattagatcctgaaaacacagaaacacacatacacagatctgatttccttaatgcaatacaagttggctcttaaacgatgattccctgggttagctgaggaaggccagacacctgcctaccgcctcttcaccttctggaggctcctacccccctgcaccaaaccatgctcaagaaggccctggtcctctctctctcgttcactggggctgtgactgtccctgcgtgacccccagaaccagaactgatcactgacctcagatcaactggtgacctagagttaggcactgacctagagtccactgctgacatgtatctggaaaacagacacgctttctaattgtctactgatgtggaatcaaacactctcagctttgtgaaagacgccactgaggccacagtcgattacaactcagttcacacagagagctctctgagtgaaaagaacgcagatatcactgttgcttattctcaggagctcatgacgacataagacaaagccagcacctctgaggacagcaaagagtctgtctcagtgctcgtttaaaatgaagcagattctctgttagctgtgaccatcactctgctacccaccattttctgagaggattccgagcttctaacaagcctattactgtgtgtgtgtttagttactaagtcacgtctgactctttgtgaccccatggactattgcccaccatgctcctctgtccatggggttgtccaagcaagaatattggagcaggttgtcatttccttttccaggggatcttgacacagggatcaaacccgtgtctcctgcactgcaggagaattctttaccactgagccaccagggaagctccaactactatgtctaggagatcaaataattgcaaaagacgaatgagacatagggtgtgcccagatgaggctaaagagtaaagcagaggcaatggtaccagaggaggggcatcttgtaaccatggcccatttaatgtgggctcaataaatgttcatttgagtaaaagaatgaccctatgcaccacttccaggaaaaactcatccatttcaggaaaaacttcattggttgagaagaatcttcttgtattcgagattctctacctaccctgagcaaaaaatgcagtatacaaatatttaacaacaacagctgtttatcaaagtgctgtttgtaatagtaaactctacaaaattataccaaacagtaaataatagctgcatctgtttcatgtggggcttaccacttctcagtgataaagaatccacctgccaatgcaggagactcaggagacgtgggtttgatacctgggtcgggaagatcccctggaggaggaaatggcaacccactccagtattcttgggcaaatcccatggacaggggagcctggcagtctacaaagcatggggtcacaaggagttggacatgcctgagcatgcatgcactatttcatgtaaccattataaatggcatataggacagagcatctgttagaatgcaaagtggcttatgatatataaatggaaaaaattacaaaaagcaggtatgatttgataactcagagtcttttctgtcctttgttatttgcatgttttctgtaacaaacatgtttaattcttcaggtaagaaaaaggactttataaaaagatgagaaattgtcttcctaaaatctcatagaagcacaaaaaggaatctacaacaaaaacatgtatatgaataattcctcccaacaaggtctcatacttacagcgggctctatgttgagttctttcctctctctatctccttggtcaaaaaattcagtggcaacaagttctgctatctgaaatcaataacagactaagtgtgggtaattaaaggcatatcactcagtaaaacagactttaaatgaagataataaaacccatcaaatctgtggcttttaaccacatcagtaaaattagaataaagcagtaacagtaaatactttattgtaatgtgtacctaatcacaaaggctagagtctgtaatctataactcagagaaaagagcaacatgttatttccgcctccgcagtagtgggaagaaagcactgtgtgcccatccata

SEQ ID NO: 33358 - DNA, 1736 bp, Bovine  19866880692184
  misc_feature (1)..(1): n is a, c, g, or t
ncagcctctctaacacagtctggccagtttatgaactctgtgcagaaggaaccacagcaaacagaacctagaatgaatttcagagatacacagtaattggtagaaggaaaaaggtttcaagaggacaaagagggcagacagtaagtaaaaaccacgagtacgagaagctgtgagcaagcaagacccgcagggtaaactgcagaatacccggagcagttgtcacaggagcagctgggtggtaaaagctgaaaatttacacatggaatatggcatttggggttcccttcaaactgcttcctccccaatctaggataggggaggtagtggagagaagtatagaagaaatgaggttggtctcaagttgacaactgttgcagctgtttaaaatgatccccttattatctacctatctgacatgctgacacctgacaggtccactgggtacctagtaggaacattaaacttatctccctacttctgtatgtatttgacattctccataacaaaacattaaaaactttaacacatacatatataaatccagaagccaaccacttcccatcactttcattgctatcatcttggtcaccactaatctttctcctgattactataataatcactaaaaagcctttttcaacacagcagtcagaataatcctttataaattaaaatcagatgtggtcattcctctacaaaaatactgcaatgtctcccatttcttttacagaaaaagccaatgtcctaaaatggcctataagaccctaggtgatcagatccccttattacctatctgacatgtgttccttttcttggactatctgggggaagaatgtttcaagtggaggaaataccctagaacaaaggccttaggcaggagcagacctgtaaatctgagtaacacagattaccttgtaagagtctccaaggtcatctagagattataaaaaatgtgaccaatgttcaggaaatagaggctgactcagctttcctagaactcaggaataatgtggcaaaaagggaacgggttttagaatcacatagacttacccaaactcttatctttcccattactgactaaaattcaagttctgagccttaatttttcttacttgaaaaacagggaaaagtagcaatgattttctgatgtgctatcaactgaggtattatatacaaaacatctagcagagtgctcagcacatagctcatacacaataaatgttaccaaataatacgcccctgtgcccttctcttgcagagaaaacagagcaaagtctggctggagaaaacaagagaattctcttcttaacatagccatcacgaggcctgtgtggtagatggaccctagctggtagatgagaactcttagttctggttcaagctgtgacaactagatggggacttgaggccagtcatttcatcactttggaatttagttcaatcatctttaaaatgagctaactagacctctattgctaagatacagtcctgagatcctgtctccgaaaaacagtcagggactctaccctaaatagccccccctggtgtgcagcacagggacgtgttgcaaggacagagggtggggtggtgagaggaagacatcttccaaattcttaagcctggctggcttcatggctgtgtgacctgtgcaggcccaggaatgggcttcagtgaatgctctgctgtgagagtctcaaaattctcaataaagtttaacaacgagatcgcattttcat

SEQ ID NO: 33359 - DNA, 2263 bp, Bovine  19866880702917
  misc_feature (1)..(1): n is a, c, g, or t
nttactgctgtgcagaagcctttcccagcaggggtctccagcacctccccaacagtcatcctttctgtaacaaatgccttccttatggactggattaagagttcctcagctgcagatactaatgtctctctccattttttccccatgcccataaatatagtcaaatcacccattataatggtgattataatttcatccttctacatttcctattcattttattttaatctacagttaaattctatgtgatatagacagacatttttactattattacagaagttataggttcttatagaaaaatcagaataatagagaagcgaaaagataaaatcacttataattctactactgttattttagtgcatattctttatgacattttcatatatttttcatttaacaaaaattgctctttgcaatccataatagaatgtacatctttctgtttcaaatgtgttttctatgacagctttaatggctgcagaatagtaacacaatatttctaaccctgctgttgggtatttaaggcaatgtttgtctatgacacagacatctacagtgaatgttcttataagctaaatatttatggaactatagttggtaaataataatgccatatagagtttaatctttattataatcttggataaaaatttaatgtatattggataaaattattttatagaaaatcacaaaaactaagcatccccccatgaagtcaacacttagagagaaccatctgtagtacataaaagcaaatggattctttctctacagagccaattccacacagatctgtcttcactgcttaataatgttatgttgaaatgtgtgcatttcctctctgtctcagcatgtgttgcccgtctgtatagcttaagaggagtcattcataaatgatctgtgatcacagctctgtgagaaccccagcagtgggtctgcttgggaagtgagtgtgtgatgtgaccctctgggacaagcctggggagagggcttatttcccggtaccatctagtcaccggctttcttcctctctctttaggccttgacccatgtgtcggaggactgtttccctttgctggacggctgcagaaagaacaggcagaaatggcaggctcttgcagaacagcaggagaagacactgatcaatggtgaaagcagccagaccaagcggaactgagagacctattcatgcagagctgaagttgacagatggtgtcttctgcagtatgcctagttttgctatatactgtacagatttggttgtatactttgccactgctgtatttttatttttgcacaatttttgacagcgtagcatgaaatgtttttagaggactattgcatattttctgtacatttgttttatgccactgaactgagattatcaacgacacccactcttagcacgtgaataagagcactgtttgtaatactttgtgtactgcaaggtacaagttgcattcttgcacagaggctaatttggggtttgtttttttttttttttctggggattttaaataattggttttgtgttttctgaattatcaatctttcaagaatgtttagaatcttttctttcttaaaaatagtctaggagcaaactgaatatattctgtgacatttaaaaccttcatagaatagaaaaaagtgttgacttttaaagcttgttggattttaaaaggaattggctatatttttcaacactgtattaccttaacgaaagaaagttaaaactctaaacaaatggaaagtactataaggcagtattgtaaagaaaaggcattacttaattaatttggtttttttgttgttagagaacaggcaagagagaggtttcttatttcagtgcaatacatctcccccaaaggctacccataaatgctcacttcgacctaacagacctggtagagagcaggaggagcctgggaagaagacccagcccctgagtctcgagggatgagcctgctgcagaaatggagcagccaggacagccgtcagggaagagaacactccaccggaggacaccctgacagtcagagggtcacacactgagcttccttttcgttcacctcacgagtcattgttgtaagtcaacactttaaaacacaagcgatcatgggcgcacaggcctgaaatgagctgtgaccactcaggataagagggtatgcaccctaaactggcccctgagctcgtacttggtgggatttacttctcataacttttagtccatttagaaaatgctaatgttttcttagaa

SEQ ID NO: 33360 - DNA, 831 bp, Bovine  19866880732468
  misc_feature (1)..(1): n is a, c, g, or t
naattaagacttagagtcactgaattttttatcttaacatattctttaaactgcaagttttatttaagaatttccttgatgaagcagaaacatcactgattttattaaatctcatcctcagggacacatatttttaatattatgtgacaaaatcgtgaaacatattgcaaagggagcttaaagtttctgtcagcttcccatagcagatgctgtttttctctttgtggtagcagaggtcagttgctcagtttaccagagggctaaagaaagacagcatgtgagattagatgctctaaaagaagagatataaagacaatgcaggcatatataaatgtatctatgggcatttatgagtcactctgcaaagctatttaacctcccggttttgcctgttatgtagtcacagataggctctcagggtgaccccagaaaggcattgttgagtattaacaatgatgtactagagtgggctcatcacagatcaggaaaatggattgtgtttgtcttttcccaactccacattcaatgatgtcaggttggtagaccgagatcagacatgatgctgttctttatgtgcatgctaagttgcttcagtcgtgtccgactctttgtgacccatggactgtagcccatcatgctcctctgtccatggattctccaggcaagaatactggagtgggttcccttctccaggagatcccttctccaggggatcttcctaacccagggatcagacccatgtctcttatgtctccggcactgtcaggcaggttctttactactgggaagccaggtgttatttaccaccacattaattaacaaacaaatggg

SEQ ID NO: 33361 - DNA, 1960 bp, Bovine  19866880737011
  misc_feature (1)..(1): n is a, c, g, or t
nctgatgtgaagagctgactcatttgaaaagacccctgagctgggaaagattgaaggcaggaggagaaggggacgacagaggatgagatgattggatggcatcaccaactagtgacatggggtttgggtagattgtgggagttggtgatggacagggatgcctggtgtgctgcagttcatggcgtcgcaaagagtcagatatgactgagcgactaaactgaactgaactttaactgtataaattctatggttctgaaaactgagatgatccaaaatcaagactttatggattagaagtgataaacatagtataaactagagtgcagctaaaggtcacctatggggaaaactataatccagaaatcaccccttcagcagatcatgcaggcactactctgtgtagccccccgccatatgaaaattccaagtaccatttgacaatacttgtactaaatgcatagtgcaaatataacagcacattcaaatttttattacttcagctgtaatttgtattctctatctgctcataaaatttaacatgctaaagacaggaatttccatttgttcttgattttcatttgaaactaaatatgatgacatttccatttcctctctattattacacaaacctgaagcaaagaaacggaattaccaagccttgttttacaggaaaaattatctccacgttaattaaattagttgagcataatatggcatcttctaatatttgaaggaaatggaacagtcaaatgacaaataaatgcattaaagtattttaatcaattaagattcagtataaaatcatttggtgtaattgagcacactacagaacagtctgtataaattatgcttttaaaggaaagaaaaaacatgttaatttattcaaatcagggcttgactaattttacaaattgtaaaagaaaatttaagtgatactgagtctcctcctcttctcatgaaacaatctgaatttgaatgaaaatatcaaatcaatacctttttttgaagtgaaatggtttggcatccatctttcatagtaacacatctcttttactgtttgatcacatttatatttgctaagacttgctttcattaagagtttgcttcaccaagtactgagttgtctccaggagcagggactgttctgggcttgccttccccaggctggctccagagaacaggaagaacttagcaattgaacctcaatcttaaaaggctggttatatgacatgccttgataactatagagaatcatcggagtcagaggggcactgaacccatgaggattgttttaatccaacaacaaattgtgtattaagcacacagtatgtgcaaagtactatactctgaaacatatgaagatgtttatggtagagttcctgaacaaagctctctgaagtggaaagctgttacattatctgctgcaaaatttagtctcccatttctgtctttcatttgtctatccttccttgcccccaccctttcatctttctatccttttatccttctatccttttatccactcctcccctcctcctgcctcctctgtctctcataatgatgtttcttgcagattctccatagacaacaattacagttgatggacccaatctacttgttattcacaatgatgtgaaaagagatttcttgtgattgagtgtacatttaagatgcactttcacagattcctttcagttcaattgagttcagtcactcggttgggtccgattccttgcaaccccatggactgtagtacaccagccttccctgtccaccaccaactctcagagcttgctcaaactcatgtccattgagtcagtgatgccatccaaccatttcatcctgtgttatccccttttcctcctgccttcaatctttctcagcatcagggccttttccaatgagtcagttctttgcatcaaggggcaaaagtattgcagtttcagcttcaacatcagtc

SEQ ID NO: 33362 - DNA, 751 bp, Bovine  19866880747482
  misc_feature (1)..(1): n is a, c, g, or t
ncctctaaaaaccttcccccaaagcccgctcctgctctatcctattagagaagaagctctcaaacctaagtgtctgtacatgaggatcaccctgggatacttgtttttatcagatttcccagtcctacccctagagattctaaaccatcacatttcaactggaccccagaaatctgcattttagcaaggactccaggtattcctgtagcaggtggtctagagccataattagagaaggactgacttaaagggaacccacccagctgtgtacttcttaatgacagtgccagcacccatgatgacacgaagatgccattgggtctcatatccaaacatgctaattttggatttcttggtgtaccaaggaccaatatcattcagaaaacattctctgagaacccatcgtgtgaaaagcattgaacagcataagaacaatcatgtgcacaggtaatttcaaaaccaggctgactttgatagaatcagcaagtccttaataggaaacctgaagacaagaaggagtccttctaaatgctgggatctaagaaagcaccttggaaatggtgccatctaaggtgaagctggaaggaagatagggctgcatctggtatgaagaaaggcacctcaggcagaggggagaggtttaaacaaaggcagggatgcctcagaattcagagtgttggcatgtgcctggcctgtgggagtgtgagatggagacagaaagcagattaggaaaaaggctacaagggtgggg

SEQ ID NO: 33363 - DNA, 1392 bp, Bovine  19866880790198
  misc_feature (1)..(1): n is a, c, g, or t
ntttataattattataactaatataattttccattaatctaattagatcatttttttccaaatgcctataatctagaagtattaaataggatatgcaaaacactgcatagtgaaatacaagctctcacatggcattgcaaatatgattagcaaaagggacacacacacacaaagtagctccatccaataataactttactttctaccaaagttgaactgctcactcaggttacaaaacgaatctgaaaaagacaggaataccttcaaatacatattcagtattccagatgctttgaaagggaaaaataattaaaataccttgcctaggttttaaagaaaatttcttggcatcaagaaaaggaaacaatttacaaagcagtgtaaaattctaatgtaaacataataattctcatgagctaaaaatataattagatgaaacctacttgtagagcaactagcttaatgtgttttgtactcttgcctaaaataatgtaccagaggataaaaattctttgaaaatatactgcacgtagggtatccatagcctaatactaagaatataattgttaacagtctaatacctacattttcagccattctattttatcactagagagttcccactttttatgctttaaaatcatatatggaaacaaaaccgacttgggcaaggtctctaggcagctcatttagtgacgtgcttgcacattagaggcaccagcaggaacctcagcctcttcctgagttaaatttctcatgatattaaatctctgagtctttcctttgtttccattaatactgaccctgaacttcagtagagaatgaagggccccaggtgggacagacttaggcttcaaccggagtcgcttctaagatttatgcggtctataaaatgaagataagggtattaatcctcataggcttcttaagaaaattaagaaaaatgacacctataaagtgattgcacagagtctggtactaaaggtttaaaatattacagttactgtttttaagttaatcaaacattaactggaggatattttcaaaggcaattaaattttttataaaaataaaaagaatgtattcatggatttttacagaataactagatgttagccatttgttttccaagctcctagtttaaaagcactaatttctctacaaaaacacttgtgcaaaacaaaaaaggtgttctaatgtctgtagtttctcaaattagaattgaaaaaacatggactccttagaccaataactacttatgtatgacataattttctaaataatacataaagaataagagctgatcatttagctgagaaaaatcactgtgagagcataatttttttttctattactactcagaacttaatcgctaaaaaataagttatagaa

SEQ ID NO: 33364 - DNA, 1904 bp, Bovine  19866880805831
  misc_feature (1)..(1): n is a, c, g, or t
ntgttttatgactgataaaattagacatgtgtttttacctgccagtgtgtgtgtcgtagctgtggagcatcatcagatcctctaccctttacagaatttgtacggtacatttctacaacagccctgggtaagagcttattaaagcatatttaccaaagatgttagtagtaatgcatgtgatcacattgagcctctactttatgaaaccatagcatatatgaatatctactctgtgagaggcacaaatgtgctaagggtactaagtgatgtctatctcagttttggttgtttctgatttaccaaatatagatgtcactcagtaatgacaaatgtacaaaatgttagtcaaaatgtttacttatttatatttatggcaaggttttggaactatggacgagagctaagttgaatggtaaatggaactgtacgtgatttcttcatttttgctaaggtgttacctttgcagtgaccatgtctctgcgtggtgatggaagctagggtaagcagacaagaaagaaaaaaataaaaataatcctctgttagatttattggatttaaagcttcaccatttacctgaaataaacatttgtaggcttctctgtcccctcgctcccttcctggtattgaaataacttagggatccaaaggtgatccctaggctttacataataagaattgtttgaacactgcaacaggtatttgagagtataaatatttgatgtatgaaagcattgaataagaccataaatgtttgcagatactttaatactttagtacaaaagataaaacatgaaatggtcattatcaatcagaatacatcagtatagcagttagctgctgctgctaagtcgcttcagtcgtgtccgactctgtgcgaccccatagacggcagcccaccaggctccgccatccctgggattctccaggcaggatcactggagtgggttgccatttccttctccaaagttagctgctaaatgctaccaatgtttttatcattgcacaaagtgagtgttaggtgctcatcaatttcatcatgttattaaacttccttgattttttggatatagcacattagttcttaaagatcatccagtgtagtaagttggtaatttatatacacacagagttgggaaacattgttttaaaggaatagtctttaaagtttagtcagttgtagtcaatttcattcatctgatatgaaaagtagaatggtgtttgaataaggatagaccgcaaattaaaaactgtaaaacttgaagtctactttgaaagtgtaaaatgacagtgctctgagacagtatcttaggtaaaaagaataggagctccatctgttttttcccggtccacaacatgaattgcaaaagcctagattttgacttctaattatctttctttttattggttataagtattgaatacaattgttcaattgcaagagcccagactttgaattctagttatctttctttttattggtaataaatattgaatacaattgtccaatgtactatgttccagactttacataaattcttgcttttaatcttaacaaaaacttttgttcaagaaataggcttaataagattaatctggtaaatgggtgaattaagattgaaacccaggtctaggttcatttcaaattcaaaatgtgtctggttaaagcaccaccctgatgctgtcagttttgtaaaaaaaactgttacgtgcaacttgaatgagcctgtcagatttattgatttctagtctgcttgtgaggtgctttagaggaactggtacatttagttgttattgaatattccctattattgtaactattgaactgtaaaataaatccagctctaagaaggttaaattactataaagtaaaaccagagcacctagaacagaaagtagtaggagta

SEQ ID NO: 33365 - DNA, 790 bp, Bovine  19866880819696
  misc_feature (1)..(1): n is a, c, g, or t
nttatgtaagtgagagaatgcagaaacaaaggaaaagcagacaagaaaaaatagttcagcgataaaacacaatcttaaaccttatgatggtggaaacttgaaagtgtcttttaccactctggatctagttgctcatatataaagttggtgtgtcatggtcctctaatgtctagtttctcctcaagggatacccataacaatccagcacacatctttgagttattctgcaggaactaagacccccacccagaaggagggtgatgacttcatgctgcatgcaagctagtagactccagactggtcagtgccaggctgatgactgtgattcctgaaacaccaccctgttacctcaccaccaaccaaatcagaagaaagtcatgcacgctgcacccctcaccccagacattgcctttaaaattcttccctgaaagccatcagagttccagtcttctgagtaggagctgcttcttctccttgcttggccatggcagtaaacctttctccactctaaactcaaatgtttctatttgtttggcctctgtgtgtgacaggcacagaaacttaggttcagcaccactctttctcccttttgtcaattagagctattatgtcagggcctggctggattctgaaggaaatgctgaaggaggggtggggtacagagaaggaatgtggatgatagattcccagcccgtcattcctttccttttgcacagggaggccacacatgacacaaggaagaactggactcattaatcgggttctttggcatatgtccttcttttctttt

SEQ ID NO: 33366 - DNA, 2204 bp, Bovine  19866880822779
  misc_feature (1)..(1): n is a, c, g, or t
naaataacatcgtattgggagttagggtttaacatatgaattttgtgggtatatgttaggctgtcccctgcaggcctgcaagccctgcctgttcttgccccacttaaagactgaagaaagagcttggagtcagcgacagagatatcaatagtttcataggtgggtgaatcttacacccacctatgacagcagatggctactggaggaaggggaggtgggtgattcacatcatgttggctcattggttaccggggaaaccaacagaggggcatatgcctttgataagctatcacagtggagataagtctgatttaaagattgaaacaatcactagctggtgtggagcaggtgattgattagattctatgattaacacaaaatcagtcatgtgaataaggtgcaggtgaagcagggactggatggcccggtcatacacaatacacacagtcagcctgtagcggactttttgagaatattggctgacttaattaggtagatcttccacatgttttcacatttaattctgcaatattaagtaatcatcttaataccactgttgacctcggtagaaaagttttaaagtattgggaagctttcaagtttttcagaagttgtaatattcttttgaaagctcaattttgttataatggctgcaaatactatccatagttttctgtaaagtgagagcctttatttttaagaaaaatgtctgctaaatacccttaataattatagtttgttagccatttttaaagttaaaaatagaattctgtggagacaatagcttgcaagtcagtcacttaagtgtttttcttcaacataactgtcatattacgttgtgcagaactgctttatatgtatttttcattttgtcacacagaatattaaaaagacattaaggtcaaggtttataaaattttaggtatgtatattttaataataaaataaatatagcgatgtaataaaatattttactactttatgtaggacacttttgagtccaactgacttttttgtaaaactcagatgtgtaatataataaagaattgagtgactagactgataaaatagtacagtttgattccactgcttttatttatcttttatccagtatacttatacactctcagtgaaccataactaagtaaaaaaggaaatactaatatgaaaatagttttgatttttatgttccccgaaaaaagtctcaggggctcttgggggtttgtggaacacactttgaaaactgttgcactgtcatcaggagaagagtgctttttctatgtcaggacgattttagtgggaatcaccttagccatttatttggtcctgtgtaggaaaacaaaaggaaaagattatgattgtgcaggtaaaaaaattgttctaatatatacaaaatataagatttataattttaactattttaagtatgcagttcagtggcattaagtaaattcatgatgttgtgcaaccaataccactatccatttccagaatttgtcatcatccctaacagaaactcagtaccttttagacagtaattcctccattctccctatcccacaggtcctggtaacctctattctactttttgtctcttattaatttgcctctgctgggaacatcatttaagctgagttaacagtgtttatctttttttgtctggtttatttcacttcgcattatgtgtttaggatttgttcatgttgtcgcttgtgtcagaattgcattcttttttaaggctgaataatattccctttatttgtatatcacatgttgttggtctgttctgttgatggagtcagcttgtttctgtctttggctattgcgaataatgctgctatgagcattggtgtacaagtatctgtttgagcccttgctttgaattcttttgggtatatacctagaagtgaaattgctggataatccggtaattttatatgtttaactttttaaggaaccacagcatctgtaccatttttacattcccaccagcagtgtaccagagttccaatttcttcagatttttgccatcacttgctgttttgttattttgataatagccatcctaatggatatgaagcaataattcattgtggttttgattggcagttccctaataaccaatgataatcttttaatgtgtttattggtcttttgtgtatcttctttggagaaatatctattcatgtcctttgcgtattttt

SEQ ID NO: 33367 - DNA, 1300 bp, Bovine  19866880828164
  misc_feature (1)..(1): n is a, c, g, or t
ntgattaaagtgtttaaatgtgatcagagatctagaaataaaataacatactccataaaaaaattgtgcgaaatcacaacacaggtatattgtaaatgagcaactcagaaatgcagtataagagaataggaacataagagatgctattaaagtaagctttagaataagcaaaaccatataaattttattgtttttttacaaagaataaaggaaaaacaagattaaaatgtcgatatttaattttgccactctttgaacttaagggtgaattgtagcttgagaattttctaaaggtttgatgaataataatttccctttaaatccaaagtttttccctaatagctttttggagaacagtctgatccttgactgtacacagtcttggcttatgaataaggcaaaacagtttatgagggatacggtgtatcccaaagactgtatcccataacagtctttgatgtatagacgtgtgtgtgtacatgcttaaactgtttataatggaaatgtaaccagaataaagataaaattacataatggattcttaaatgatgtaaccactgcctcagagtcttgggaaaactgttgttcagagacttccaggattccaagaaatcaacaaggaagtcgaagaaaaaatgtaggaaaaaaattttttttaagttcactgtccaaatgggacctacttaaactcaaaagctttcgcacagcaaaggaaacaataaacaaacaaaaagacaattctcagattgagagaaaatatttgcaaatgatgtgactgataagggagtaatctccaaaatttacaaacagcctatgacacttaatagtatccaaacaaacaacccaaagaatgggcagaagacctgaatagacatttctcaagaggacatatgatggccaataggcacatgaaaaaatgttcaacattgctagttattagagaaatgcaaatcaaaactataatgagataccacctcacaccagtcagaatggctattataaaattaaaaaaaaatccacaaacaacaaatgctggagacagtgtggagagacgggaaccctcctgcactgttggtggcaatgtaaattgatacagccactatggagaactagtatggaagctccttaaaaaactaaaaatagagctaccatatgaccctgcaatcccacctctgggcatatatccatggaaaaacatggcccaaaaagacagatgcaccccaatgttcattgcagcactgtttacaatagccaagatagggaaacatggtaaatgtccatcaacagaggaatggataag

SEQ ID NO: 33368 - DNA, 1713 bp, Bovine  19866880831638
  misc_feature (1)..(1): n is a, c, g, or t
nattccatactagcatccgaaattattttttttttttcacacacacacacacaatttccagagcacatcactacattgctacctcatgtttcatctggaagttctgcacaaggttgaggtcagtgaacatccggattgtgcacagtgctgtttccaggtcagacagctcaaagtcgctgaagctgaagtcagtgattttaagggtctgggcagatggtaccacagcagccttgggtaaagggagaagaggaaactaagtgaagctgtttcacaaatgcaacacaaacgcagtttccttgctttgctttcagaaatggcacgttggacttaattttttatttttaatgtcatacactagaaatattttactacagaagttattcctttttttttttttttttttaaaactgagccccttgtgggtaactgctatgcttctaagtaaggccaggtggagagagggtaactgtacctggaccactaggcagatctaaggagtccagtgatccaaccgctttatatttcctcagcgtcaattcactcaacagatatttactgagtagttattcaggacccgtcccagtactatggactgagaataagtagtgagcaggataaagataatgttctaagcattttatgtttaattctcaagacaaccttttgaaatggatactctagctccacccttggtttgatttttaatcatcttctggtagtaaacacttgcaatttcttcagatacaccttgctctttttaaaaaatcaatattccttttacctcctgcttctcctactttctttaactaaaggatttctttaagacacagttcccatccatgcccttcacagccaagcccactgtgggaatacctgtttaatcacacaagtcactacagtctactttcctgtttatctgctcctaaccacactggactgacaggtcgggctgaatctcacacatctttgcatccattgtgtctactgatggatagagttctgatatttgttaatatgaatacttattaaatgaatgggagggggaaaaatggcattctcttcacttaatttgagttacaagttataaggtctggttttaaggtcccaaatcctcctagaaaggtgaggtccattaattttgagttggaaaactagcagatgcattcattccaatctgttttgtttggcactgaatattttaaaaaatcaccattatttgttacactattttaaaattgggagattttaacaataaagccgtatttctgatctttcccgaaaaatcaggccacattgagcttcaattcccataaagcgactagccacagccagctctcctccccaaaacctccaccccatacccccgggcccctcagactgagcaggtttcacacccagattctctgccaggccccccaccagcatgaaaacttacaagaacctcactcctcaaccctcttgactatttattctgccagcactttagcagccttagccacatctggctgaaatttatctaagaggctttaacttggttggggggcagagggaagaaaatatagaaatctcaaccaggttccttctaatgttttttccttgattttctctaaacccctcaagtttcctctgagtatctgccatatcacttccttgctctcaatccatctttttggtgaagtgaaaaggtcaaacacagaattataaaaccgtatg

SEQ ID NO: 33369 - DNA, 1842 bp, Bovine  19866880851387
  misc_feature (1)..(1): n is a, c, g, or t
nggaagaaaagaaagaaaaagaaagaagggaaggagatggaggatggaagaaaaaagataagcagaatatgcaagaaggtaatagagaattgccagaaaatgaggctggagaaatagattggaactaatttaggaagggctttgctgagattgacctacctcttctaagcatcaggggagttactgaaggacctcatctggggaatgacatggtcagactgaaatgtggaaaagtcactctgatagcaatatggaaaaacaactgcaggggcaagtctgaaatcaggaggatcaaataacaacctactgttataggttgttatttgttacaaacaacaacctgctggagatgactagagttgaactaacataataccaccggagacacactagagaaaggagacttgagatacaatatgtgtgaccacttaggtactgaaagtaagagaacagaggaagcaccaaataatttagataaataaagtgtaaagtagataatttatagtttagatagtggtggtgacatttcactagtgtagacagagaaaagaaaagtgcaacagtttcaaggtggacacactgctcaattctgggtatgttgactaaaggaaattattagacctctggctgaagactcatgtttagagttattcacttttaagtaataattgaatacagagatagacaacattatccagggagagacaataatgagaagaggactaaagagtaaaccaaacgtaatcatacgtcaagtaagtgtggctctaaagaaaatgtcacagaaatagtaggaaatccagaaaagcatgatgtcacaggaggacgacatcatcatctcatgggaggaaatacttttaaagaggaaataatcaacactgttaaatgccagaggaaaacagcataaaacagagactgaaaaatgctcactggacttgacaataatgaggtgaaaagtaatacagtggtaaattcagcagaataaggaagtaggaattcagatggtaaattaagggcaaagaaacaaaggtagtttcttctcatctctcggatcaaattttactctttattttataaaggtattattccagtcagatggtgaagaaggacagaaataaaagaggcactaaccatggaaagaacagtttcaaagtgttttaggcttctttttaatgtgttcaatgtcagttcagtccttttttaagaagatagaatcactggcaggtggttgacctttaaaattctcctcctaacaggacaatcattgctgaaaatttttaaatgttttgaaatagaaactttaaaattttaggaaatcctttgcagcagagaaacaggcatttgtgagcaaggcaccctaataacttcacttattggagtgtgcgtgcacgctaagtcgcttcagttgagtcacatactagaatgaatagcaaatgaatgccttcagatgtgctgcaaatcaagaagctgttgacaccacggaggtaacgtggtggttaagaacagcgctgaaatccatctgtccaggttcaaggcctggttctactttctctctctgggacattgtccaagttaattacgttgtcttcagtctcagttttctcacctgtaaaatggaggtaataatgtaatctacatattataattaagttctgcaggagtaaatgatataaaatttctctggtattaaatgataagaatgatgatggttgatctggtatatttttcctagatggttacgatgctgattatacatagtttgcaaaatcttatttaaagctgtgaacctggataagactgggaaggcatgagggttgacagaaaagagaataggtataaaga

SEQ ID NO: 33370 - DNA, 1351 bp, Bovine  19866880878077
  misc_feature (1)..(1): n is a, c, g, or t
nttgtcaagtaaaaataggatacaaaagcattaaggttctgaaaactcaacaagaaagctattttaaacaaggccttaaagatttaaaaatctttgtgctaaattttgtaagaggacaatttaagatgaaaaagattaaaagagtttttaaaaactgttaaaaataacctcgatggggaaatcatattctttaaagcacaagtcatttgtcttgatggtttcaaaaacagatgatacaaaaagatgtagagttagcatttggtataattcctttggtcatttgttttccttatgtttttttaacaagaaagaagactcttttccaggtgaagttattaaaggtgactccatatttcataccaatgtgacctcaaagcatatctacaagaaaagaaaagaaatgtttaaataaaaggctaatcaagaatattccttttttactttatgaacacaaatatttaatacattagtaaaatagtatatgtacactcataaaaggatcagaataaagttcttttcaaattaagaaaatgtaaacatagttcatcatttacattttcaaaaaatatcaaggtgatattaatcactatctacttcaagatttcaatggttgcacgatggtttcaaaaagactactagaattaacttagatttcaggtagtcctttgaataatactaactttactgtcaatactattatatacttctgtttattaaaacaaattcatctacagagactctgtatcatctcttacttctacacagaatcatatttctctaagaatgtcaatagattttatgtaaactgacctgcattaaaactcaggagaaacattaaattgataaatcttagggaattaaatttccacactgttcatgaacacatgctcctggctaaaaggatttcaaaatgttcaacttcttaattaaaaacaatcaagtattactaacaaagtttaatcaactgaatttttttctgcattctttcattcaacaaacattagactgagacaggttctgtgccaagcactggaactgacattttgatgaggaaagagagaccttaattcagtgaataataaattgtagagtgtactagaagaactgtgcactgagcgctaacataaaaacaatgtaagcaaaggggatgagaagtgtatataatgggagatggtttgaacttttaaacaggaaagtcacagaagatataactgagaaggttacctttacacaaagatttgaaggaggtgaagatgctatcttggaaaagactttcctagcagactgaacagcatgcctggcataccagaagactgtaaaaagcccagcgtggcagaagaaacatgaacaa

SEQ ID NO: 33371 - DNA, 1293 bp, Bovine  19866880921931
  misc_feature (1)..(1): n is a, c, g, or t
ncatgagttaaaactctgtccctttctctcttcaacttctgtgtaaggaatagtgtggcacactggaatgaatgaacatgttttcagagtagtgctttagaaggtaatgatatttagcactgagataaatttttctgcctacttatctcatgaaaaacaaagaaaacattgaaatgaaatacacaatgatactgtatttatattttttgattctgcacaatcattaaattcttttccaggaaaagctattattaacagtcttaattgtagttctgcaacagctctcaatggcttgtcatgttcagaagggtgtttttctgtaagcttctgaaagccctaattaatggaaaagaccagcctctaattgcttctcctataaatgcttaaagtacaaaacatgcttgatgaaatcatactatcatatgatcaaaatggatcttttttccaatcacagaaatgtcatttatacaaccacaaatcctaagacattaaaaagactaaaatattttcctgtatctaagaatgttattaatgcattcatcagagtatctaaagacctttttcttttctcattgaaaagtaattagttttgaatattatactatttaaatttattgttcatccaatttttcaaaattttaatgtgaaaattttcaaatatttgtaagttcaaagaatcttagagtgaaaatatataaactaacaacctggattctaccattaatatcttactatcttgttttattacataaaaaaagaaattgccaagaaaaagaaatgcaaaaaggcaaaatggttgtttgaggaggccctaaaaatagttgagaaaagaagagaagcaaaaggcaaagcagaaaaagaaagatacacccatctgaaggcagagttccaaataacagcaaggagagataagaaagccctcctaagtgaacaatgcaaagaaataagaggaaaatgatagaacagtaaagagtagagatctcttcgagaaaattagagataccaagacaacatttcatgcaaagatgggcacaataaaggacagaaacggtatggacctaacagaagcagcaaatattaagaagaggtggcaagaatacacagacgaccatacagttcaggtgagttgctcagtcatgtccgactctttgcaaccccatgaatcgcagcacaccaggcctccctgtccatcaccaactcccagagttcattaagactcacgtccatcgagtcagtgatgccatccagccatctcatcctactgtcgtccccttctcctcctgcccccaatcc

SEQ ID NO: 33372 - DNA, 2619 bp, Bovine  19866880962968
  misc_feature (1)..(1): n is a, c, g, or t
ntggatgtagctgcaaataattttgaagatgtgcagatataaagtggaggtcacctattgagagggaggtggcagtggtgtcctaggaggtttaaaaataaaggtaccttaaaacataagacaaagcccaatcttggtgatagagaaaggaattctttcccttatctaaaaccaatgaataagctctactgatttatggatttaggtaaagcccataaaaaaataataattgaagttgaaatagccactgtagagaatggacagtggctgtgcttgaaattaaatgggcaaaggcatcactattcaggtaatcatcaagttagtgctaaatatagcctccaggagatggagattatggagggataaggaagggctcatttcttaccaagtagactagggtgcaggacagagtcctagcatagcaagggacttggggaactagtagaagagagaagcctagtggttattagggtggataatcactgggtggataaaaactatggtggttaagggaaatgattgtaacttgatgggcatggaagagcccaagcttatactgcatgattgattcttaatcccacctgcagatgggaatggaagccttattcacttctgttttaagcattagctctaacagctattgaaataaagtctggcatattgtggaggctcaataaatatttgttgaacgtgtaaatgctgcatactgttacagtactagaaatgcgtactttgctgaggaaaatgtttttttttttccttccataaactggctgatttgtttttttctggcattttggcaccaaaagagacatagatgatacaagggagaagcacacggtactctgagacccaaaggggagtcatctaagagtcttgaggtttcagaaaggggcttcccagagggggtgagctttgagtttgtatagagcaatccgaggatgaagcaagatcactttatttttgcaaggatgtgtccaggtgggctatgggaggcaaagttgacactgagaaatttgcctcttgccttaaatccctttgctctcctgccagagaaaaattctgtagaacagaaatctccaataaaagctataagtctaatgggaccttatacacattcattgtaagctgcctgttttacatactttaccaaggatcatatgcatgaattccaaagtcaaattacagcaaattaaggacagtcaattgaagaaatggtgaaagtccttacttaatgtggggatggacagcaaggattttgcattggtatcatcaattgagtaatgtcactgaccactgcaggtgagctgctaaatattcctgcctcagtttccttttcaatagcatggaatctgtgttatctattgacattaattagtatattaaaaaaaaaggattcagaatgcttggaggagaaagtaaaatttatttttctattcaagataaatatccagccatattcaccagaaaacacatttgtattaatctgtaatttagattttaggttatacagcataaatagctttttttttctttttttgtgctgaaataattttttgctcctttatgcttgatgttttaaattactggacctaattcttgctaatgtgtctttttgcattcgatccaatgtacttgcaacaacttgcagcaactaacccgataattatcaaaacacttcccaagcaatctaatgcacaaaatggggctgaggaagagtgctttgctggcttatacttgtctgatgaaaaaaacctgaaaatatgtttatttgtgaagcatttcatgtttttcaagatactttaccatatattttaaaatttatttttaaattggaagatatcatatattaatgtaatattgccacactaattctgtgaattaagtattataattttactcatttgatagtttaggaaggttaggaggttaaagaagttggctgactgatcatttcagactgtctctgcaatatgtctctggtaagaaaattaagcatccaggtgaactggataagctaagttctggactgaaggttaagttgttcagctcctacacatttagaactagctggaaatctttgctgttaggtcatagatcctgtttttttctctttgaggaatcaaagccaaagaagtagaaacattaaggatatttttcaaatgtggattttaatggtctcccataagaattaattttggaacgaatgccagctgatttggtttaactatatctatactttgtcatcttattcagtagaataagatggaccattcttcctgaatgatagaaagtggttgtttgctcttctgaattcatattatattatgaatatatggactatatgaatataattatggaaccattgcatggtccaacagctttaaaaatcttttctctagtagatttccactgaaaaggtatttgtgtattcatacacatataatccagggggcttccgcagtggctcggcagtaaagaattcacctgctgtgcaggagaccagggttcgatccctgggttaggaaaatcccctggagaaggaaatggcaacccactctagtaatcttgccggaagaccctagaacagaggagccggcagactacaatccacagcat

SEQ ID NO: 33373 - DNA, 795 bp, Bovine  19866881008925
  misc_feature (1)..(1): n is a, c, g, or t
nttgccttctctgcctgcactggcaggcagagtctctactattgatccccagggaagcccattctagcatatagcaggtagtaaattatgaaatttaacagagcatttaaaaatgcttatcttagagtttttcacacacatgaatattgttttacagatgtagatgtcatgcacctgggcaaaaaagtcagcatccccagagacatcatgttggaagaattatcccatctcagtaaccgtggtgccagactgtttaagatgcgacaaagaagatctgacaaatatacatttgaaaatttccagtatgaaactaaagcacaaataaatgtaggtataacttgataatatggttatctaaataaatgggcagcatttctaaatttatatgtattattaaattcccaaacaagtattttacaaattttcttttcattgattctgttatacttttttccatgatgaataatttaggtggataaatgaatattatgcctgatatgagtatctttttggttcagtagagacactgcatgtttgtagatttggcactgaagaactggtctgttctgctaagaggagggagagggagtggagactggtggaactaaaagtttccatatcttatcaccactggttaaatgtttgggatggaaacaattccaaagcacacagtgctccataaagcaagtagaagcattttattgggctgaaaacatcctggcattgaaacatgcctgggaacgagacacagctgatctcctttcaaagtattcattccacgttgtatagagaagt

SEQ ID NO: 33374 - DNA, 1524 bp, Bovine  19866881033634
  misc_feature (1)..(1): n is a, c, g, or t
nctctgcaggaaggcttaggagaatcccggcttgaagttgtggtctgtgttgggtgttcctctcttgtctaacatgcattccttctgttctcgccccataggttctgtcttatcatgcttcagctgcagaggaagaaaccagagagctgcagtccttagcggtaatcctcctcctcctcctcttttgtagaaatgactaaccagaggcacctaattaagacgtagatatgcttctctcagggcagctgctgctgtgggtagtggtccccagacctttaattaaatgtggtaaatatttatatggacatttataaaaaaatctaatcctattttcttgcaaggctagaaattcactgataacacagagcagatgataacattgtattgattttgtaacacattaaatgattctgatattttcccaataattgttataatctttacatctttcttaagtcaaaattaaatttagtttttggttcctggggaagtgtggacaggggactgcaaggtggtgggtgtggttcgagtactaacaacaaagattttatagcttgttactgataacgtactctgcgttattagaaatggagaatggttttaatttcaaaccatatggcttgcagaatgttatttgaaattgggtttaaataaggtcaattcctgaatttttgcaaagttttttttatttatttattatggatgcttttatataacaagcatctatcttatttaggatgctaggagagaaaagcacattgatgtgtgtcttgatgtgtgccccaacttgattgagattgccttggttgaggttaatggaaattcaaagcacttaggcactgataaccaagcctgccttgtgagtttacattcatgtgagacaatgtaaagtgtatgtgagatgtcgtgggagtgagggaccaatgagagggtcgctgaggctactgagattccttctctttgtcatcatcattatggcttgccagatggtcatgctccatgccctcatgtacgttttctcatgtaaactgcacaagctgcctggatgccacactgaagcccacggacttgctctgggtctcaccagcaggaagtgaagagtcaggatagacatttgcactgtctgtctccagagtgctgcacgttagcgctgtcctgtctgtgatgagcctttagggagggaaggaggttaaagatgattcagacgtcctggccttggtagttcaaagaatgatcatccccttcattaaccaaagtggaaatattaagaaggaaaagatggatttgatgcagaacacggtaagtttgagatgcgggtggaacaaccagatagacatcttgcacactgggaagggcaggaaactagaggtggcaatttggaggttaaacaatagggtttgggggtggaatcccttgatagtgagatgataggaatggagcaagtgtggaagaatgcgggaagaatgcaaggctgagggcagaactgttgtaggtatacgtttagatggaagctgtaggaaaaga

SEQ ID NO: 33375 - DNA, 1228 bp, Bovine  19866881041342
  misc_feature (1)..(1): n is a, c, g, or t
nttctttgtgtatgttaagtgtattaagtctgcagcccccctataaggtcagtattagcattttgaaaatggaatctgaggttgagtttagattgccctgctcagaatctcccaggttgtgagtaggtaccaggacagacagtccagacccagagcacacacatcattgcacagccctggagaaagtgactaggaaaggaaggagggtccagacttgtagattcttgattaaatcactgagtatgaagctgagtcatctgccaagaacaatcgaaggaactcgagatgatttcatctgaaaggttaagctctctgggggttagcctcattcgaattggctatatttcttttgctcatgatgatgtttgaaggaatgagctgtttttcaattatttacaaaggtttaaaagtttaaagtatctctcacatcaggcttaattgcccatttgtctaatcctcctagagtgctagagttttgcactaactgcatgctgtgagcaggaaatgatcacatggagagaagcattttgaagcgcttgcaagctctgtgggattaatatcactgcaaaacgaggctaggttatactcttccatgtgttgtttcagataaataaaaactagcaaagataatgctaaaaaaattcattaggatattaaattttgctttttactctgaaaatagcatagtctttcagaaaaatctgaaaattattttctcaatcatgtttataattttggcaagaggaaaacactttggaaaaactgagcattgctgtcttgcagtattgttcaaaaccatctgttgttccatttggaaaagagatttctggcagctgcattgagaaatttaggataacgtaggtcagataattcatttaaattggttgaaattcagaaaatgatttcaactgttttctgtcaacctaataaaaattcctttgcagccccagctacacaggtgcctgcatcatccagcaattaccagaattgctatcttagtcacgtgcctgatggttcatctcaatttaaaacctaaaataattgaaaagctgtcaaaggcttaatttttatttttagaaatgcgttcttgaaatactatgcttaagtacactaaatatttctgtgctcagaaaagttctcgttacagcagaaagtataacaaagttgataggaaattcagaatcccttttttccccttgctttacttgacatttttgtcctagttttt

SEQ ID NO: 33376 - DNA, 3961 bp, Bovine  19866881043035
  misc_feature (1)..(1): n is a, c, g, or t
nattcctgactgatagtctttttatattcgttacaagcccctgccaagcatacctgagctcacggtaaggcagtctcatgggggagaaggcctcaaatagcttcaggactggggctggctgccaggaaaaccaactgagcgattagaggatcagaacgttcagccctgccactggataaggaagaggggcctggagactgagtccaatcaccaatggtcagtgatttaatcaatcatccctacatactgaaaaaaaaatcagattgagggaacttttgggtaaaggtcacctactgtgtgctgggatggtgttgccacagaaggtggacaaggaagttttgtgttccccgcccctcactccttgccctttgtatctctattaggctatttctgaatgttatcctttataaacatacagctacaatcttaagtactttcttaagtacaatcttaagaactttcctgagttctgagtcattccagcaaatcattaaacccgagtggggaacccctgcatttgcagtcagcccgaagcaagtgtggctagcctgggggtccttcctatggctggcatcttaagtggggacaaagctgtacaacagggtccctaaccttggggtctgcactcactccaggcaactagtgtcaggactgaattggaccatgggacaccccagctggtgcagaggtgaagaactgatcgtcgtctgtaaagccaaatgaggttgaaagaacgtttgtggtattcctgccaaaagcgcctaacgtgaatctattcaagaaaaacattctacgagataactggcctgtctccttccaaaatacatgtcaagaaagatagagaagcactgagaagctactgcagatttaatggaaaataacaagataggacaaatacatgcaatacgtaaccctgagtgacagccttgaacaaaggggggaaaaaaatcactgcaaaggacattcatggggcaactgaccaaatttgtccatggaatgttagctaagagctttgtatcaaaaaatttccagattttgataaaagtatgacaattgttggaagacaatattcttgttagaaaatacgtatagtaattgcttctcagccttttagctaagatcaagtgcagtatctgttcttatctgaaaatacatatagaaaaatgtctccgaatggctcagaaaaaaataatatgcatgcgttacttacatgcattacacacagaaaaagaagataataaagcaaacaggccaaaatataaacaattagagaatctgggtagagggtatacccaagtttctgatactggtcttgcaacttttctataagcttgaaatcatataaagataaaaataccagaaaccaaaaaaggaaataaccaactagatttgccaaattatatgctggtcttcttccacaaagtggaatatctaaagattattagagcatttaacaaagatacagcagttcccaaactctgttccctgggacacaattacaacatgacaaatgtatcagaattggtaatttattaagaatgggacagcagctattgctacttctttcttctgaaattcattttggaaataattttattcatcagaaattcacttgagtagcacctgagacccgcaggatgagagatagtgaagactatttatctgaagaaggactgaaaaggggggaatgaggttggggcgggaagagctgcagctcgagggtaaaggccacgtgagtggtgatgtgacccttccctaagaaccctccaatttttctccctaaaaatcatggtgtccatggagaggctgccccatggaaacaagagatgggtctaagttttgcattcctgttgccttaggaaataagacggttatttagacaatatacatccttagacataggaaatcttgggaggcgtaaggcttccatcagacatagaccagggcttcagggcaatctgtgatagttaattttatgtgtcaacttgtcagctaagggatgcccaaacggctgataacacgttatttctaggtgtgtctgtgaggatgtctccagaggagatgaacatctgaatcacgagaatgagtagagaagatctttatcaatgccagtgggcatcatcccatcccttgagtaggcagaggaaagaaggacgaattcgctctgtttgaaataagatatccatattcttcttgccctcctgcagtccaccagagctcccggctctaaagcttttgattcaaacacagaccagagttacaccactggcccccctgattcttaggcctgcagaatgagttataccatcaactacaccaatcttggttctccagcctgcagatggaaggcagactgtggaacttctaagcctccattcccaagtgagcttattcctacaataaaccacttcttatttatctctatatatcctactagttctgtttctctgaagaacactgagcgataaacaatctgatctaaatactggatgatgtctagtttccaagtattaggaaaattccaacacattcatataagttgttctgattattgtgtcaataccttattattaataaatgctgtgccacattcaagaaagttgcatgagtgatggcctgatagaggaggagatgatgtgttgactgaacatcactgacatttgtggtgtaactgaaactcactggtctaagctgtggatcatgtcatgttttaaatatgtgaatgtattattttatcagtaataaaacagttgaattccaaatgtataccattctgttacaaagttttaaaatgggaatcaaatgttgaccatttcttaaaattaatttatctaagagacttttttattcttagcttcaatctgaacactactttattttatggccactgcttggctctctactgctgcactacaacttctaagcattctgtggtcatgtaagctcaagaaatgctgctatacagtgtctacagattacatatctaaggagtgtgtaggactaagaaaagagaacgtgccatttccttctccaggggatcttcccgacccagggatcgaacccaggtctcccgcattccaggcagatgctttaacctctgagccaccagggaagcccggggatatgcatagtgatgaagaaaaaacaatgaaagaacacaactgtgagatgagctatgtcaagttatcattaaggagaacaagacaacctttctctaaggccgctgtgttggactcagccaccagtgaagaaactgactttcaaagatggggagcttcttaaccatagattcccactttaaataagtttgtaaatgatgaaatctcagtttcaaatatccctacgattgacagtagttgcccatgccccatccatattccacgccccaccctgcctctgttccaagagttcatttacctcataggcgtctttgatgttcaagggctcgccaaaagcggccacgtgtcccacgatgcctttgttccactctaagcggatgcagttgtttgaagcttcttccagtgttgaaccttctgcaacatcaaagaggcggctgataagaaacttgtcgttggagctgtcctcacagacgaggaataaggagtagcggtcggcggagatgagtccatggatgtgcaagaaaattttgtgacataaggctgtgacatccaagtgactagaaatatctttcactaattccaagagtctcgagcactggtccccttcatcattatcaaaccgtggggaggttagaggcatctgttccttcttgtctgagtcagagaggaagctcacagttccctcagaatccttgataacgatgggtctaagcggccgatcgaattcagaggcagagatcttcctggttggtgttccagggacactgctctctgcacggggacttggctgcaaggggcaagagcaggattccgtgtggcccttgattccttccttgcacaca

SEQ ID NO: 33377 - DNA, 1116 bp, Bovine  19866881043449
  misc_feature (1)..(1): n is a, c, g, or t
nctaaactctgggttgctaagtgctaaatattattcttaaagcatgactcagaatcatgctagaaacagaagcagagcatgttgggatccatgctttcatgtataagcaaaatcaatcattgattttaataggctttagcagggtgtgagtccttggtaaatgaaatccagactcttatttcaaactgttcaaaataccagagaaaagagggattgaaaacaaagtgaagcaaaggcatacaactattaatattaaaaaaaaaaagaaagaaaaaggaaaggacatgaagccacacaaaagtgaggagatgaagaagcacaatgaaactagttataagaaaatatggtccaaggagccataaaaggccttggctcattcaaatcctagaatggcattactggctctaacaggtcacttagcacaaagttcttgagattttcctcattcacaaagacacgcagctccttttgaagatttcagttcaaaacaactctacgtaaaaactgcctgccttctctcttggatacaatatacttattcactaagcaagtaccagagacgaaaagtagctttaaagatagaagggctgttagaagatctagatcacacttcttaacctttttcacaacacactgcacatggaaaattattgtctggcacactgagataaaaagaagagtctgtctactaggaactcaagtgtttggcaaggaggtcacgctgctgcaggcaacacttggtcacagagatcaagatctcccacgtgacctatctctctgtaactcatttgggaatatatactagataaaccagtggatcatagaaatgaggaaaaaaatcaagtctcaaagggtggcttaacaccagagaagttcacaaagttacctagtgggagagtgaggactggattttcacaggcctcatatgaacagtaattctaatcggtatgccattcagaattcaccaattctgagcactgatggtgttattttaaatgatataccaattcactgaggcctctggcattagcaagagaaaagaaaatgacaagacaaccatgtctctcacaaatatctgtaccatttttatactgtatttaaatgctatttaaaaaa

SEQ ID NO: 33378 - DNA, 1319 bp, Bovine  19866881081965
  misc_feature (1)..(1): n is a, c, g, or t
naggagtgaaagcttatcagaaaagcaggtgaaagaagcaaaatctaaatgcaaaagcattgccctccttctgacagatgcccccaaccccaactccaagggggtgttgatgtttaagaagcgtcgtcggagggccaggaaatacacactagtcagctacgggactggggaacttgagcgagaggcagaggaggaggaggaagagggcgacaaagaggatccatgtgaagtagcatttctgggtgcaagcgaatcggaggtggatgaagagctgttgtctgacactgaggacaacccacaagttgcaaactttgactgggattctggtctagtggacattgaaaagaaactgagcagaggggacaagatggagatgttgccagacaccacaggcaagggggccctcatgtttgccaagaggagggagagaatggatcagatcacagcccaaaaagaggaggagagagcggttggagtgccaagcagagaaccagatgctgcccagacagatggcctgagaaccgtgacgtcttaccaaaggaaggaagaggagtcagtgagagtgcagagctctgtgagcaaaagctacattgaggtgagccatggtcttggccatgtgccccaacagaatggcttcactggggtgtctgagacagcagaagctcagaggatgatccctgtgaatagaacagccaagcccttcccggggtctgggaaccagccggcaacccccttctctccaagccgaaacgtgacaagtcctatcgctgactttcctgcgcctccaccttactctgcagtcacacccccacctgaaaccttctccagagcagtgtcgagtccaacagctggcccagcaccgccccctccgtggccccagcctgccccatggtcccagccggccttttacgattcatctgaacgaatagcttccagggatgaaaggattgcggtgccagcaaaaagaacggggatattgcaagaggccaaaaggagaagcacgacaaaacccatgttcacttttaaagagcccaaagtcagccccaatcctgaactcttgtcacttcttcaaaattctgagggcaaaaagggccctggagcgggagcagattctggacctgaagaagactacctcagtttaggagcagaggcttgtaacttcatgcaaggctcctctgcaaaacagaagaccccgcctcctgtcgctccaaagcctgctgtcaagtcctcatcctcccaaccagtcactccggtttctccactctggtcgccaggagtggctccagcgcaacctcctgccttccccacatccaacccgt

SEQ ID NO: 33379 - DNA, 617 bp, Bovine  19866881145737
  misc_feature (1)..(1): n is a, c, g, or t
ntaaaagaggctagtctgagttagaaaagaaaaaggaaaaaaattacagaccatcctgtgggacatcgggccaataacagccagaagcccccaaatcagattatcttttccttgatgttatcaggtacagccagtttcttaaattaaaaaaaaaaaaaaagaacgtttcccatggtatgtatatttttatactgaattaccatttggcacttggaaatcatagaccttactactcagaagcaactgaatgaagagaaatttaatttataaatatcaaatcctgtcagatatttctcagattcctgattttatcagagctatgccagctaataaagtatttcttaagcataaaaagttagacttctacacgatcctatagtttaaatagttgttactgatacacagaatttcataagttttcctttttttggttctaaatgtaaagttcctcatgtttacctctgtttatacctcattcttttgtttatctaaatcatgtgtgcttcatgacttatgaaatacattcagggcccctaataaaagtaatcacaaagacctactttccagccaacacttcttcctctgtgctgtgctcagtcgctcaactgtgtccagct

SEQ ID NO: 33380 - DNA, 1007 bp, Bovine  19866881163177
  misc_feature (1)..(1): n is a, c, g, or t
ntctaccctctctggctctgctttctggcctctagagactgcagtggccaagttcccttgcatgctgactcctggttggctttggtcaacaggaagctccaacaagagataaagagcaagggaaatgagagggcagggaaatgctgtccctgctggacctgctgggccacggtttggcaatggctttgctcctcgatgtagacagtcagagctcctgtctgtctgtcgctctaccatgccttaactcttgttgtgttccaataacacacaccacctccttgcatcttcagacccaagggtaataatagcttcctgctcttcacctctgggtgcttcatttccattcgttggtttccacgagcctgtactatattatctttaattactcctttgaatatgccacctattttctgctgggaccctaaatgatactaatatgtttagatttcattttacaatatgaatttaatggtttttaaagaatcatgtatcatgatcacacaatctcaaagttaagaatactttaagatcatcttctatatattttccaccaaagggatccctatttgactattaaactcaagattatgagtccaaagagctcagaaccaggtgagcagcatttcttagagtgttttcatagccaggctcacttttgattgggcacgaaatgtatttcagtttatctctaacagttgcccactaattcttgctaaggtcttaaatgataattaatttgctgactgatatagctctaaagtttatatctccatgtgcatttacattttacatgatactcctggaggcagaagcatatctttaagtgccagaacaatgatgctaatgaaatttgaagtgtttcagttagttttcttctgggagggtctattcttttattgtcataaattataagaaggccttccccttttctgaaaaaaatcaatctcattccttcttttttgaaagcacacaacaatttattgcaaaattaaatgaattcaatattt

SEQ ID NO: 33381 - DNA, 1075 bp, Bovine  19866881164168
  misc_feature (1)..(1): n is a, c, g, or t
nacagtgggagaagcagtggtcagaaagaaaaaataaacagaagaaaaaaatccgtgaggtcactcagaaatgatgctaataactgtgtgttctcaccctacggcctccacatacatggggttccttgtgcttcacagtcagcccccagagtcagtaacccttcagtaacccagagtcagtaatctcccaatcacatgatttccaaaaggaaaacaatggtcacacatgtgcctttatctgaagcctactcacctttttttcattcctcctttataatgtactctaccgcttgcctcagctgaggaaaacaaacttatgctttcatgggcaattggagatgtactcactgagtttcttaagtaattggggagggaggatgggaatcaacctctaagaataattatccctcttgcccatccagttcactttaaagaagtctttgaaataagctaatatatatataacatctggcaaggagcctggtagataacaagtactctgtaattattaatcccctctttcttatccaccttactaaactatgtacattccaacaatccccaagttctctgtgacatcaaacaggtggctgaggttgacagaccagagctgatccctgtcctcaataaatttcttatcccttaatactagtaatagagataaagcactacttagaaaggaaacatcagtcaatacatgttatattttcactacaatcgaaccttttcactgtaggaacacagctgttctgtcacataaagactgtgtcctaatgttgataacactgatcactgtcttgtggctaaatgcataaaccctaagtatcctgcttacttaatacaatggcccatgtttatttgggggtgctcccagattttttttaagtgtgcaacgaagataaatatgttttaagtcaatctgagttagatttctgactcattaaaaatattctgcttggacccagattgggaggtgacatctgaaattaagtaagttgaggacttgctaggcattctctgggactcaagttaacaccgcaaacaattcgtttcaagcaaagtggacactcagctt

SEQ ID NO: 33382 - DNA, 2400 bp, Bovine  19866881170299
  misc_feature (1)..(1): n is a, c, g, or t
nactctgtgaacatgtccctttatgtggctttgcagaagtggttgttaagcatttgaaaaaggaagttcatcctggattatttggatgggccacatgatcatacagatccttaagagggtgacaggagtgttagagaagaaaccgtgaggatggaagcagggataggtagggggaagtgtgtggtgtgtgactgagtggggagctttgcagatgttatgctgttggctctgaagatggagaaagaggccatgaactcatcagtgctgggagcctctgagagctcaggaaggccaggaagtggcctctggatggaatgtagccttgctgacacattttagactttagatcacctgaacagtaagctaataaatttgtgttaagtcagtccatttgtggtagtaatttgctgcaccagcaataggaagctaacagattttttttttcaatgaaaatttaggaaattgagaagagatatttacctagtttattaccatgtaaaaatcaatccatagtggtagtgttcaagttcaggaaccgcttgtttgggtgaatgctgcaacaggaggctacgggtgtcacctgaggggtgttccttgcatttggaagcacaagagcgaggagccagtgatgcctccctgcagcctctgtttaggggttctgttgcctgaattttttgaggatctgatcctacagtcttatggcttctgactttgtatggtgtgaattactgtttcctcgtgtatattgcaattatgagtttgtctttaggggtataaattgtgtggaaatttcatgggcctgtttgaggatgtgttcatccaaagacattttgcctttgctttcaacagttgttcacggatattacctgcctgagacttcttgcttgctatttgacttggagagtcccgcatcagcttcaaatcccaaatctgggttaatgtgaagatggactctatgttattattttttaaccagagctcagattacgacaggcaggcttcctttagttgtcctgtgtctctgaatttccccccactttctacatgttgagagcacagctcttcagagtgctcagtctttcttggagggccatttcccaggtgctcccctgactctcaagaccatgtttccaggtctgatttaaaaccccctcatgatacagatctgcaggtattcctgggcctgacatagtatcagctcacacacttacactggatttttgattagcctttctttggcctctagagatttctctgatattttcttaaaaactcaagtatacacttaaagaacattttgctggaatatataatctataaaaatattgaatcatcatattgtatacctgacactgacataatattgtaaatcagctacgtgtgtatgttagtctgactctttgtgaccccatagactgtagcccaccaggctcctctgtccatgagattctccaggcaagaatcctggagtgtgttgccattcccttctccaggggatcttctcaacccagggatcaaaccctggtctcctgcatttcaggcagactctttgccggggaccagccccggctgatccagggtattcgaagcggggacggcgtcggcgacctatttatttaaatattttatcagagatataaagagtaataggatgaggatagctcagtaggaaaattcagtggagaaaagaggctgagtagcttggtttacgcaggagaccagtaaaacttcgacaagaagtttgcaccacttacgtaggccgcaggcatccttccgttctcccgaaggagaggagacactgaggcctccccggttggatcttagaagcccaggcataattagtaagcatggcgggttctgcactccagatggagactcagccagaatttgggcgagagagcgacatggggagaccaagtttcagtgaacaaggcccaataagtgaaaaacccttcaccaatacaatttctaatcaatcttttaactgctcaaaagaatctgtgtttagacagtttagaacatctcatgcctctcacagttgggaggctctgagcaatcacatgtggccggaaaaacctattcaggcaggctagaggatttccaaaggagtttgtaggttaaacactgtcacacccaggaattattaactggagctgtaagctaactcttttttcagagagaggtagtgggggacagccccctgtaaagtcagaggtgtaggtgaaagcacaaagtataaagtaggcagactctggtttttggggtagatgctcgagaatttccagggagactcctgaggcttgatcccgcctttgcgtatgccgagcatttcttcctcatgacctttgccatgggcggagctcattccccgcaattctttaccgcctgagccaccagggg

SEQ ID NO: 33383 - DNA, 958 bp, Bovine  19866881174000
  misc_feature (1)..(1): n is a, c, g, or t
ntcagtatttaatcaggatttgtcagcacattaacaaaactgaaaagcaaggtaagcatatttgaaagtgatgttcattcttataactcgttttgatgctattcatatagggtacttataaaattctttcctaaatgatatattcataaatgaaacttcatgcagtgaaaaagctaccttctaaagaaatccaactcaattagatttagtgataagctgagatactggcttatctgaaacttaggtgtgtgcaatgataatataatcataagcacctgtagaacactctgaagtgcctttacatatattatcatttatcatttcatcacaaatagttacagaaaaattttggggggggggtggtgttcaaaatgtagaaaaaaaaaactaaacctgaacttatatctcaaacatcttttattagtattttactgataaggaaatagagcatttaaccagaagaaataaatacaggctttgaacaaatagttcagaaaaatggtttttcatttaaatataaaaatgcatgtaccatgactactgtcaatcctattaaatttacttttgaatatataactattaatacattataacttaaatgggttcaataagggtactgaccagacacagcaaaacttagggactagagcctgacatgttaaagctcggttaggaatttaacaaagaaggagctaaaatccagaaaagaaataaatggtgcaaatagtcattgttcttaagaattacaaaggagttatagttggggaaaccaaatatgtataatagaaccacagtctagctggtaacaagaggctgatccaagggggcaacaaacagatccaactggaatggaaagtcctgggattactgggtgtggagttgtagtgtgaaccgtatgccctcatgggtcagctggtccttaggcacagaagatgggcctttcttaaaggtgtgtgtt

SEQ ID NO: 33384 - DNA, 910 bp, Bovine  19866881376991
  misc_feature (1)..(1): n is a, c, g, or t
naatagaaagcccagagataaatccacgcacctatggacaccttatctttgacaaaggaggcaagaatatacaatggattaaagacaacctctttaacaagtggtgctgggaaaactggtgaaccacttgtaaaagaatgaaactagaacactttctaacaccatacacaaaaataaacttaaaatggattaaagatctaaacgtaagaccagaatctataaagctcctagaggagaacataggtgagtttttttcttatgtccacctgcagtgtattgttctgtaaagtatcaggttgtcagctttggttgaatgacccagctccataagtatagcctgtagtgcatttggcttaataaactaaagaaactaaactaaaggaacatgctggccacagccaggaggattttatagaaccattcctgcttgggagagcataattgggatttgaattaattataatccagaaagttgtcttagcccaaggcatatgacctctgagaccccaaatgccaaaatcataactatgtaaaaatgatccatataataacagaacacataagctgaattgaatttcatgccatgatgtttcctaaaatgcactgtcaaaagaattgttgtgtaccagttcctgctgatatataaatgaccatatttaaatctaattacagtaaccctccggaagtgaaaggctaacttgttcagaaactgatttagggctcagtgacaccagggagtctgtagccctgttgctgcaagtgagcagaaggtttgtgaacattaacacacattacaaagtccatatttccaacaaaacattttgcagagaataaaatggaaattcaagaaacatgtacacatttactgaatatttttattatattagcattatagaaagaatacatttca

SEQ ID NO: 33385 - DNA, 1064 bp, Bovine  19866881480136
  misc_feature (1)..(1): n is a, c, g, or t
nattaaaatgaaattaactatgttcttgtatgtgccttagtccagggtggaattaatgaaaccatggtatgctaactgatattagcagtaacagcaaggactataacattggagaagtttccaatggtagtataagcaataattatataaaaagaatttccttggtgttattttaaacatttctttgaaatatattttaaaatctgataacattcatatttggtttttggaaatgagacaaagacattctcagaaagaaataaatatttgagagtaagacaattatacatttcagttggacttctgaggtaagtggtgtaatatgtggggaatagaagatgtaggtataggatttatttttaatctatttaaaggcaggggcctgagacaggaatagactctgggttcaggtgtcctcacttgtgagatgagaaggtcagattatttaatctcctcgatgcttaacagctctgatattctgaactgagtttctctcatttgtaaaatgatctttgatgcattattcatttttgttgctcatcatataaatatcaaactaagtttaagagtggattaagtcattggtgtcacaacacgtatcattaaaggttcaagaggaattgttgggcagcagggtttgagctatgtgttacatgagtgagggctgatgagaagaaaaaaagctattaatggattaaaggaagtggtagatggatgtgtctgttattatacaactgtaggtcatgaacatttatttaattacagaaagcatgccacagaagcctatgcaacaagtggtgcttctttagaaaagcatcattaggatgttcaaaggaagttaaacagttgcttggacaactccatgacccatgcctggttagcatgaccatgagacaatcagttaaacatctgctcctcactgtcacacccacaaaggattaaacacaaggaaattcaaagtactttacatcataaacaagtatgagaatatttaaaaaataaaaacatcttgagtgttcaaaacattcttaggtttctaaatatgattattttgctttgtttta

SEQ ID NO: 33386 - DNA, 1260 bp, Bovine  19866881577519
  misc_feature (1)..(1): n is a, c, g, or t
nctttgataaaagtggatcgtagaaatggaaataaatgccatatctggcatgcattttaggctcagttctttgaatagttgaatgtaaaccgttgtcttttatggggttgtatcgtctagcaggtattttaacagctttatgttttatctaatattgttatataaattaagccattttcagttcaggtcagttcatttgttcagtcgtgtccgactctttgcaaccgcatggactgctgcatgccaggctttcctgtctctcaccaactcctggagcttgctcaactcatgtccatcgagtcagggatgccatccaaccatctcatcctctattgtccctttctcctcccaccttcaatctttcccagcatcagggtcttttccaatgagtcagttcttcacatcaggtggccaaaatattggagcttcagcttcagcatcagtacttccaatgaatattcaggactgatttccagtcaatattcaggattgactggtttgatctccttgcagtccaaggggctctcaagagtcttctccaactccacagttcaaaagcatcaattcttcagtactcagctttcttcgagacttccctggtggctcagatggtagattcccctggagaagaaaatggcaacccactccagtactctatgcctggaaaatcccatagacacagtccacagggtcgcaaagagtcggacacaactgagcgacttcacttcagccttctttatggtccaactctctcatccatacataactactggaaaagccatagctttaacttgatggactaaaatgactttgactaaaatgacctggaataggccattttggggtaaaacaaatcatatctgaatatcagtatttaagtgtttctaacataaaatcatctggaataatttgccttgttcttagagcctaaattttcctgctatgaacatagcaatagtgaaagtcatctttctatttcttgtgttgccaggaaagctattgtacagatagtgtaaaataaccctctgaatttagccttgaatgaatgatatgggcctgaactaaaagaatatacgaccttatagggtgccttcttgggagccaaatttaaaaggctaatttgttttcctacccttgtttatcttttgctttgattttattacttagttctttagcttgttatgttccgtatgtattttgtaagagcctggacaaaccctcttagaataaagtgagggtataaataataaaattttaatt

SEQ ID NO: 33387 - DNA, 1575 bp, Bovine  19866881632003
  misc_feature (1)..(1): n is a, c, g, or t
nttaatttcattttaattgagaagagtttagttgcctaaattctcccatattaatgaaataaatggaatttctgtgtcatcagcacaggaaaatgagttctttaaagaaattctctatgcatctgcagaggaaggaagtgatttacactccaatgtgcatacacacacagataaatgacctatgagaacaagccaagatcaaaagtgattctaaactattagaaaagtggaaaacactgcaaagaaacattaaaaaaaaaatctaggtggcatatgaccagttctgctaacttcatgtttgacgtctccatcccctcgggtgtgggttatagttgcagttggttatggagagacaataatcagacctggtctccatggacattatttcagaatcgtttctggaaggctgcctgtaatatgcatgtggtgcctgtgaaccatactgggagttgggcatactataattgggtagggatgcaacattatactcttgctttgcaaatgagcccacactggtcttctgggtttgagggacataggacagtcttgcattccattcctcagactgccctggaagcacctttctacgagctgctgagaccacatttgccacaatggattcctgaatgtttctgggtctgaaggcctcatccactaagccaagaggagacttggctgctgcttcccaaggagtcagtctcttctttgcttcctcgagcccatccgttggcttgctagtgtagctgtaagcaggctggtataaccaaggagatgttgcagagatggcaggtgggactggtcttccaggaagagaaagagagcgtccagtctgctagaaataatgaaaatgttaatatatctcattcattttggtttatgctgattggctactactccaaagcattctccacacccattactaagcactataaaaatcaacaaatccctacaatgcttataattaaagccaaaataggctgcctctgcctggtgtattattagtgctggtctgggacttgaccttcctttaggacctccttgctctgcttttctgaacccatagctccaattgctaccgtctttcttaggcaccaccaccactgcaagcactctgttatcactggggccactcttactcctgtctaccctcttcatattcgtacctacatctacagcccaccctcattctagtcctgtttttctaataccgaataagcataaatatataaataactctagaaacagaccatgttctactgggctttgtactttttccaagtgacttttaatattttgtcttatttttgtcttatttaatatttcccgtttgatggagcagatgacatttttccagccaagttctatgtatatactggtgaagatcatgtggatctttatttcctgagtgtagtatattgcctgtgtctctgaaggaaagagttcagccacttgtttcatttgtgctttggttccttttatgcatattatattccttatttctttgaaagtgtgtgtccctgaaacattcctttgtgtatgctaaatgttcagtttgtctaatatcatgaaatacaa

SEQ ID NO: 33388 - DNA, 861 bp, Bovine  19866881830927
  misc_feature (1)..(1): n is a, c, g, or t
nagagtcccttggactgcaaggagatccaccgtcctcctaaaggagatcagtcctgggtgttcattggaaggactgatgttgaagctgaagctacaatactttggccacctgatgtgaacaactgactccctggaaaagaccctgatgctgggaaggactgaaggcaggaggaggggatgacagagcatgagatggttggatggcatcactgacttgatagagtttgagcaagctctgggagttggtgatggacagggaagcctggtgatggatagggaagcaagctcagggagttgcagtccatggagtcacacaactgagcagccaactgaactgaaggtctgactgctgctctgccatcatgtaagagaagtaaacacttcacagtcgtgttcttgctccagcagtcttcaggatgccattttcaggtcttccagtcaaaagaactgtgagtgtgaacaagggaactctacagccttgtatgacactctaccacatttaaaggtccttctaggacaaaaagagtaatttactcttttgaatttgcaaatgcatttattttcaaataaatactcctatttagccctttgtataacatctgtaagaattctgacagcctctaagattatcacattgtaacaaataatcgcaataaaattaattggatagcaaagccagctttaaggatagtaatcctacttacaaaaacaattccttttgatgaggatcttccaaattgaattgatttttcattataagttcaaaaaattctcctcgtctcctttaaaataaagaaaaatatttggtagttatgatgagtcccctaagctcttatctttttggtcaacaaaggctcatca

SEQ ID NO: 33389 - DNA, 1614 bp, Bovine  19866880392085
  misc_feature (1)..(1): n is a, c, g, or t
ntataagctcatagtattatcaaattcaaatctgaaaaatgttctcaaattatcctaaacaggaatattttcacatataatgtatgttattaaattaatccttagtgtgttcacttttatcttaagatagtctatatagttttaactagctttaaaaaattgtttttgtatagctgtgttctcttgccctttctcacctagcttccttgattcagcattgtgattttgaaattaatccatatttttgcatgcatctataattctttttattgctaagtgttctgttgtactgttggttaacttattggttaacatttgagattttttctaggtttagactcttagaaataaaactgctatgaatagttttttataggtcattgtgtgaacatagattttaatttttcttggggaaacacttaggaaatggttcattcatatggtagatatgtcttttttggaaactgacaaactgtattctaaattttgttttttctcagagtaaatgagagttttagtttttaaaaacttttaaactttaaaaactacctaaatttggctattacactccttcctaagaatgaaagaaaatttttgaaagtatataaatgtgtcaaatattattttgcataaaacttttcatatgaaccttataaagctgtagttaatttacatataaaagacttaataaatatgtgaatttaaatagtctgtcaaagatatatatgaaagataacttataatattgaaaataggaagctaatgctctaagtcttaattttaagttttcaaattttattctgatgctcaaaataagcttcttaagttgtccaaacatgaccacagctttctaaacaattaatattcgaagaatgaagatccaactagaggagaatgagcaagagcttgtgtgtgtgtgtgtgtgtgtgtgtgtgtgtgcttaaaagaactgacttatggaggaaaagcagaagatacatggtgtgctgagctttagctgtgcagggcccacccggggggaggtaccatagtccatgttcttcattccctccttggactttaatttcataaactgattccctttcccctcaccaaatagtgggggaaagtattgctttatgtgattgtggaggctagctagacaagtctgaaagccatagcacagacattgggaatggaagatgaggagcaagatgggacttgctatttgatttgatgggacaaatcaaagctatttccatatatagaatttctcattttactaagatcaggaaagacagggatacctgctgttcatcactgttttgaaggttcttatattacaagaggaaaataatcattacaaatacgaggagaaaggagataattaatttcaataattaattatatgcctaggaaacccaaaattaggaacaagaattcctagaataagaccattggatggctcaatatgagataaatatttaaaatccaataccttttctctataatatttatataacagtttgttagcaatagaaatgataaaaattattcattatagtgacaagttacacagaattaaatttaacatgaaaggtatatgccatacagaaaaacatctttaaaaggttt

SEQ ID NO: 33390 - DNA, 1907 bp, Bovine  19866880449954
  misc_feature (1)..(1): n is a, c, g, or t
ntggacaagatcttggcattgccttcaaaatcagtaaggaagttcttgctggacgaccactcttcccacatgttctgtgccacaactgtgcagttgaatttaattttggtcagaaggaaaagccatattttccaatacctgaagactatacttttatccagaatgtccccttggaggatcgagttagaggaccaaaggggcctgaagagaagaaagattgtgaagtaagtcactggaaagaaattttttttgaagcttggctaaagttctgtttaatttactgctgtacttgttcccattaaaaggctgtggaagttcaaatgtgtaatctgggcttttgtgtatttaaaaaaaattatttaaagaattctttccattgtaggtggttatgatgattggcttgccaggagctggaaaaactacctgggttactaaacatgcagcagaaaatcctggtaaatacaacattcttggaacaaacaccataatggataaaatgatggtaagtaaaatgggcttgatttcagctagaaggtattctaggtaatatttttgttttttatccattttgtttagtattttagagagaggagtttgggcagttaaatgtttatgtaagtaggtgctttacctgtaaggtaaattgctttccttccagtgactagagtccattttctgtagaagttttttaactcaattatccagtagataacgacgagctgattggcattgggtggtgttacaggataaaatgtcctttcttgtagcattgaggaaaggcaatgtttaaattttttttcaatttaaaaaaaggtggcaggttttaagaagcaaatggcagatactggaaaactgaacacgctgttgcagagagctccacagtgtcttggaaagtttattgagattgctgcccgtaagaagcgaaatttcattttggatcaggtaagctgtaagtttgaagttgaaaaaactgataatagtagaattaatgtttggggttttaaactttttttttttttctttttctgaaagacaaatgtgtctgctgctgcccagagaagaaaaatgtgcctctttgcaggcttccaacgaaaagctgttgtagtttgcccaaaagatgaagactataagcaaagaacacagaagaaagcagaagtagagggaaaagacctaccagaacatgcagttctcaaaatgaaaggcatgaagttctattatgttaaatatcctgtgatttgtatctgttaactttatgtcagtaataactgtttcaagagttaaattaactgtaaatgaacatatatatttaacttgtgtttgtaagaaaatgtaattaaaatatgactaggtgttgtgtgttttgcaaaaattaacagctgattgagagttacaggctttagggttgtgaacgtgtatgtagtgggtttgtaggttaatatgattttatgttttgcaggaaactttactctgccagaagtagctgagtgctttgatgaaataacctatgttgaacttcagaaggaagaagcccagaaacttttggagcaatataaggaagaaagcaaaaaggctcttccaccggaaaagaaacagaacacaggctcaaagaagagcaataaaaataagagtggcaagaaccagtttaacagaggtggtggccatagaggacgtggtggattcaatatgcgtggtggaaatttcagaggaggaggcaagttaattttgagtattatttggtccaaggttgaaacaaatgtacccttctagtttgggtctgtatattacttagctgaatttaacatgggaagcttttgatgtgcattatcttagctgtcttggtaagcatatctaggttatgttgaatggttaaacatttttctcctaaatgaaggaatggtccaaaagaa

SEQ ID NO: 33391 - DNA, 1660 bp, Bovine  19866880561894
  misc_feature (1)..(1): n is a, c, g, or t
ntgtacagttggaggtgtgtgtactggcttgggtatgccccctcaaaacgttggagaagtgtatggagttgtgaaagcttatacaactagagttggtattggtgcctttcctacagaacaagacaatgtaagcctgtttctcagtaaatctgattcaaaagtttgaaaatgaaaaatcatgcttttttcttaaagaattattgtcttttatgcatttcacttaatttgcaagattaatcagcacaactctaaaagaaaattacatatacctttattgttagtggcaacagattggcaacaaaagggggaaattagtgggcacttaaaggtaactgtaattgcaggcaagtgaaggtgggttatgaaggggattaagatagtagaggagggagaatttaaaaataacaggtatctttcaccaagagcttattaggagtcaaggttgaggaaagtgatctccagacgttgtctaatcatagcccactgtttacttggtggtgacctcaggccagcccctgtgtaatcgctgtaaacttaaaaagctctttgtatcctcacagcaactctgggagctgggtgctgttaccatccccattctacatatggggaaactgaggcctggagaactgaagtaactaccccaggccacacagataaacaaggctgaaattcaaacctgacaaagcagtatttaagttgtaattccgtcagagtatgtgtgataatgaaatgatggctttaatcagaaaggtgtaaattaaggaatagatagatgatagatggaaaaattaggttgtagggagtggctgtagcttagaactttgagcattgttttcagccttaattttcttcgaaggacattgtggtacgcaactactagatgggaatttgccttatggttttcaggaaaaccatcaaactatagttcttagaacaaattggccaaacttatctattttagtaaatatttattagcagcttagtttttaatatgcaatatttatatatgttaatctaaatttttagaagttatctgtataatgtaaaaaaatgttggtcttaaaatagtgtttaaaaaataaagtcaaaagtggatgtatttcaaataatgcctccttcacataaaatctatctctgtgaaattataccttccaacttattttttctgaaagatgtttatctctaagaaactttatgccttgttatatcatctgtaacatgttatatcatctactagatttagactattggtattctaatcctaaagttttattttctgttctttaggaaattggagaattattacaaacaaggggtagagagttcggtgtaacgacaggaaggaaaagaagatgtggctggttggaccttgttttgctcaaatatgctcatatgattaatggatttactgcgtgagtattcttagaaacccttacttcataaatgacagttcttgactacaggttaaattttgtggagtgcaaacttgaggtagtgcactaatacaaaaatttcactctttagactccaaatgaaattgcagttcagaagtggaccagaatacaggggaggggtgcgtaaggagagagaccctagtttttctccctagatatccaaggttgggagagaaaatcttgatactcttacatgcatataagtt

SEQ ID NO: 33392 - DNA, 2581 bp, Bovine  19866880578474
  misc_feature (1)..(1): n is a, c, g, or t
naagacagaagaacagaccagtgtaaattcaaatttaatctggatttggttagtatcacaagttgatgttccatccatccatccaaccaacaaaagtttattcaaccaatatttcattcagaatactttttcgcacatgttctaagtgctagttgagtatacagagtcacatgaaacagtctagttagggagaaagaaaagtataagtcgtgattacactatggtataatagatatacaatgtacacatagatttaacatcatgtactgttgacaaaggtttatgcaaggctgttttttaaatatttatttatttatttggctgcactgagtcttagctgcagcaagtggggtttttgttgcatcatacggggtcttttgttgttcctgggtttagttactctgcagcatgtgggatcttagttccctgatcagggatcaaaccaatgtcctctacgttggaaggcagattttttacccactgaacccatcaaggagagcttccctagtagctcagactaaagcatctgcctgcaatgcaggagacccgggtttgatccctacattgggaagatcccctggagaaggagatggcagcccacttaagtattctttcctgaagaattccaagaacagagaaagcctggtaggcatacaatccatagggtcacaaagagtcagacacgactgaaagactaacacacacatgcaacaaaggctcttggttgaatgctataaaagacacaataatcatagttcctgcccattaggaactttaattagatagaaaccataagacataaaaaattctaatgcaaagtagaatgtagtataatttactctaattattctataatttacagcattttaaaaattagggacagaagctccctataaatacaaaaaagatgtagagtggctattattattttggaatagaacagaaaatgatcttgagggtcagagtatctcctgggttaaagataatagtcagcaaagagcccagcagtttatatagagaacttgacttttggatgcccaaacaaaatgagttcagcaaatataaatcataagggaatcagtgctctctaaactaggattggtcttcatgacttaaggaaaaattggaagaaatagagacatttcatttcacaaaggaaaataaagagagggtttctaataaaggctaaagtaaacacactacttcacagactgaagaaaagacagatgcattctttttaaaatgcatctatttttactggactataattgctttacaatgttgtattagtttctgctgcacaacagtgtgtatcaactatatgtatacatatatcccttccctcttgagcctgtgtcccaccggccttatcccactcctctaggtcgtcacagcactgagctgagcttcctgtgttttacagcagctttccactctgtttcacgcatggtagtgtatataagtcaatgctactctcttaatttgtcccatcctctgctttcccccatgtctacaagtctgttctctacatctgcatctctattcctgtcctacaaatagattaatcagtaccattttcctagattccatatatatgccttgatatactatatttgattttttctttctgacttacttcactctatatgacagactctacatccatccacgttactacaaaaggctcagtttcttttttttttatggccaagtaatattccactgggcttcccaggtggcgctagtagtagagaatctgcctgccagtccaggagatgcaagagatgtggattcaatccctgggttgagaagaccctctggagtagaaaatggcaaccttctccagtattctttcctggagaatcccatgaacaaaagagcctggtgggctacagtgcatgaggctgcaggaagtcggacacacctgagtgagtgaacacacaatatgccattgtatatatgtactatattttctttatccattcatcaagacagctacattcttattactaagtcccagaggagatttcagtgaggaacttgagtcccttcctgatgccaactcttcttgtccttcttgtagactttttaaaggaggaaggcatcatcagctgagtgagctgagtttgggcgtggaccttcttggtcattaggagactgacttcttaggtgactttctccttccatttttatttcagtgttatcaaacactctaactgatccttctgtaattgttttttatttcagcatgtgaagaagaggagaaccattaccaccaggttttcccttgtccttctgttgaaatcagcctttccaatgcctacattgtagttccctgaaggagactcactactctgggcttacttaccaatgaaactgagtcactgggtatcagccttcctctctccccacgtactgtcttaaaaagagtcatcaagaattctcaattttcacctgaccatcagttaagagactgaatgctctctctaccaacttcttcaaactctttcccttttgaaataaaccaatgaaaataaaggcaacaataaagtgggaaacataggaacactttggttataat

SEQ ID NO: 33393 - DNA, 1582 bp, Bovine  19866880608218
  misc_feature (1)..(1): n is a, c, g, or t
nctgtaggctttcactccaaggatgaagacctagctgtgtgcagccccttagagtttacaaggtgctttcacctttgttacctcctgtgttctcataccagtctcaagaattccttcctcaaacttgacagtcggggaaacagtgaacagagacgactgacctgcccccggcaggcaggtgagaagggcgggcagaggctggaatccagatcttccggtccccagctcagccccatcgtccttgcccaggactgtcaggtggtgagcagtttaaggctcagcggctctccacctttcccactgcaaagcccctttctgacaggccgcctgagttcaggttttgcagcaaatgcattcttttgattcagttctttaatagtgaggcagagtgttagtggtataattaatactccgaatagtctgcctgacaggaatctgctggcaattcaggcttaatttgtggactgctcgactgagggagttctctagattttcggaagaactgggtaattaagcagagttgctggagggcactccccttggtctgggagaaggaatgcagagcagtgtctgcagactcaaacgcagaccggcatctttgcccagctctggaaggctcttcagatggaaagaggagcgagccctcctcgcatcttgccgcctgggctgccgtccctatgtctcaaagccggttctctggggccttctgggccttctgtcctttctccttccagcagcggcagaaggaggagggcccaggtcctttctattccatgctgagctgggtcgtgcggggagggaaggaatagaaaaagaagactctggctccgctttccagaattaatggttagcgtctgctgaggctatttgcactgtaaatgaaagcaaacagcaaaaagcagggatgaagcaaaacagcccaaatgatcaagaaacattgtggtgacaggtgtaaaactcactttctgtcagcagcagaggtccacgctgtgtgggcccactggccagatgaattgctgaagagaaaccccacgcagtcactttttgtaagggacacacaggcgaaggaggcgtttccaaaggtgcacgcggtctgctgccctcagaagtagcacgcgcctgcctcgtaagtcactggagactttgtgaaaattatcaaaaggggtgggtagaaattcagcggttttattttgtgaagtaaggaatcattctgtgtaagctaaccatccttctgtctcatcaagagatttcgtggaagactcgttctatggaaggttttgtctacagttttccatctgttgtgataatcgttattaatcaagctgctgtcataccatcttgggctgtgatttttgtcaactttctggtgtgaggtagggtcgctcccggggaagaaagatgtacctgaaagacgcagagggagcacgctcccgcatcatgcgagaaatctctgggccattacatgccattttctaaaagaaacgtaagacagagactgcaaacctgtctgtttcctaagactcacccagcagatttgcccaagatcctatttaaccgggaagtcagcttcctatcccacagg

SEQ ID NO: 33394 - DNA, 2110 bp, Bovine  19866880632169
  misc_feature (1)..(1): n is a, c, g, or t
ntgtctttgtgaccagaaaggtcacagataagtcctagaaaaaggtgcttctaaaacccaaaaaggatttcatggagtttaagaggctcccctgttgtggagaaacagatttagttgtgaagtcatcctaataaattcactggttgagcaaactcatagctgtgccaagttcctcttctgcagcctttgttcggccctttgaccctccccactactagactcttgccccttaagtgggttgatgccaacctactgaaaataccattcactgggtcagaaaagatggtctcacctgttcacaacttggttggaatctttactgtagccggaggtgtttcagcagctgttcagaccattaatgggaagtgggttcatacttctgtccctgcctttttttaacctgagaagaaacttagtgcttttcaacactatcacaaagcagaatgaagatggatgaaggcataaaactcgtaaaagcagcgtgaagtcacctcccattatcctggggtcacagaagggacccctggttccactgccacccgcaccagccaatcagctctagcgatctttgtaaaatatgaatgagataatgttcttcctcttcttggcttaataaccccacaatgacgttcctatacttaggatgaaatccaagacgcttaacctggttgagaaagactgagggatctggcctttgcacttgcttttctctctcttttcccgtcagtttattcacaaccctctgtctcagtatcaacgtcttttcctcagagatgccatctctttctcctttgaaagtgaaagttgctcagttgtgtctgactcttcacgaccccatggaccatacagtccatggaattctccaggccagaatattggagtgggtagccgttccttcctccaggggaccttcccaaccccagggatcgaacccaggtttcccacattgcaggcagattcttaaccagctgagccaccaagaaagcccagaagttaaagtgggttatatggcaatcacacatttcaaaattttaagaaactgtcaaactgattttttttttttttttagcttttaaaaatctggctgtgctgagcagcttgcaggatcttagttcccctaccagggattgaacttttacccttggcactgaaaacatggagttcctaaacactggaccaccaaggaatttccctgtaaaacttgtactgtttgacaaatataatatatttatataatatacttgtatatatttgacttatatattcatatcattttgtcttcccatcagcaatgaatgagtttctcttattttcttgacagaatttgatattcaaagtgtttttgatactaacgatactcataagtgtgtagtagtatcttactatagctttaatttgcctattcctaatatttaatgatgtagagcaattttacatacttattttccatttatatatcttcttggctgaaaaaactgttcagatcttttacctacttttaaaagtttaattgttttcttagttttgagttataagagctctgtatataggtccattatcagaaatgtgatttatattaaatgtgtgatatgtcttacaattttcttaagagagaaaacatctctttttatttctgtaaatttcagtgtacaatttttttttcttttataaatctcatttctgatgctatatgcatcataaccaaatctaagcttgcaaagattttctgctatacttattttaaattttttttatatttagaaatatgaactgttttaagttaattttgcataagttaaagcaggttccatctgctgggtggggaagatcccatggaagaggaaatggcaacccactctaataatcttgcctggaaaattccagggacagaggagcctggtgggttacagtccatgggggtcacaaagaattggatgagactgagcacacacactttaagacatgtgtttcaagactttttaaaaatttattttatttcttgacttgcaatggctaagacttccaataggatgtctaatatgagtcatgatatttttactctgttcctgtattaaggagaagttagctgtgggtatcttgttttttgtta

SEQ ID NO: 33395 - DNA, 1036 bp, Bovine  19866880635412
  misc_feature (1)..(1): n is a, c, g, or t
nacaaaaggtagcttcagcaagtgatgaggcttggggatgctgcctagcgacacagcattgtgggaattttctgactgcccaatcctgcctgcttctctgtttaggagaaaatctgtttaaaaagaatcagtgagattaagctttagggtcagggttttataaacctacttttagtgtaaaatgagcaaactttgtctaggtataaggaaaagaatttttaatcttttttcccagaccgaaatgaatttagatatattcaagcttcacgttttattttcctttattaattagcaaggacacctgcattaacacgggttcattaatttatgatctagtgagtcttttctacctctaacttccttgatgaaagagaatgaaacgaaaaggaactgtttgatcaagacttctcccacagatttaaaagataacccttgaataacatcaaagatattgattctgctgttgtcactttagtttgttgtgagataaacatattaacaaaaaatggaggcattaaaattcggattttgtattgctactggctaaatcattaacatgagagcatgttgtcattccttttaaattctaaataaaaccctatgtcagtaatgctaacccaaggtgtatcatttcttgaaactaaaatcacagcttcctctaaggggctgtcagaaaatataattgaaatgataaatagtttcattgcatttactctttgggggcaatctcatccttccacatccatttccttctctttctgggtttgtcttggtggcttgttctggtactacattctggagccagtcagtcgttaattccaaatagaaacaaacacacaaaaaagcatgtatcacaagtatattattgacagtttcttattgctgctggcgtaagttaccacaaactcagggctttaaaacaactatctcctcactgttctggagaattgaagtttcacccaggtcttcttgttgttgagttgctaagtcgtatccaactcttcagtgaccccattaactatagcttgccaggctc

SEQ ID NO: 33396 - DNA, 948 bp, Bovine  19866880667185
  misc_feature (1)..(1): n is a, c, g, or t
natggagagcatctgaattgggttcaggagaaaaagacccagagaaaagttgaggaatttagcaacctagggacgatggagtagaattgaaaagtgagcaagacttgagaatggaagccctgtgggtagcagaagagaagctcaaatcacctctatctgatataaatatattctctctaacagatacaaaatatttattctttatattcactgagagcccaatagagaactaaacagatacctttgggctatcctagggggttgggaatccagcatttttccatgtgtgcatttttcatccattaaacccttgaggagtgggggacagtgtgggagaataaaggagtctgaatggggtcagacaaaaagaaaaacatcaagagatgaatggagctgaaacataatggccggatgggacaagtgcaaagtgttttgtgcctggctcagcagtgaaccggtgatcagtttccttaaaaaaaaaaaaaaaaaaatgtgaggatttcccccctttgttttagaattatctcaattcagtttcctttattttaccaaaaatgcagctttaatctaagcctgaagaataagtctaggtattctatgtagtacaccaaaattccagataagccttttgagagatatttctttacctgtaacaggggctgaataggtattggtttattaacaatttaatagtttgttaatgaactgaagtcagtagcacctgtgtgaaccccagttgctggcatgtgcgtattcaggatgaatcctgcatttgttttcttccctaaatgcagtctgagtaaaagaaatctatcagatctaatatctaactgattttgtttttctttttttcactgatgttgagagaagagtcttttcagctagtttctctctgcaccacctgatcacaaaacaatgcaatgatgggaaagagcatatttgttcttg

SEQ ID NO: 33397 - DNA, 1029 bp, Bovine  19866880669152
  misc_feature (1)..(1): n is a, c, g, or t
ncacccatattaaaatgtaccaacatcccacattagaaagcacttctatgctataaaaataaattttcaaattataattttgcttttgaaattctatggctataagtaatttaaatcattaaattactttagtgatggtttctgggcagttcttgagtctacataggaattcttgtaaagagaaaatctgtacattgttttcaagtgcagtgtaatttttattaatactaaatttggtgattgaagaggtggtggtgatcaggtcatgtgaaaattaaggacttattaatttcagttttatagttttcctttgagacaatgcatttttcagttcgcaaatatttgcttggtctctaaatacctatttcagtggttaataactggaatgagctgtcccaagtcctgaagagtaaaaccatcgcatgaggggatcccatccgttaaactctgcagcccagtgtcctaagttcccccagagctctggtttctctgcaggtctctgacaacagagtacacaaaaccatcttaggtgcccaaagaaactgccctgtgagggaaggaataccacggcaggaggcagaccgctggagcagtctatcacaaggatggctccaaagactccaagaacaagatggtcccttttgtgatcttgattttttaatatccttttcaatagacctacaggtcactcaggagtaaagaatccacctgcaatgcaggagactcaggttcaatccctgggtcaggaagatcccctgcagaaggaaatggcaacccacttcaatattcttgccaggagaatttcatggacagaggagcctggtgggctacagtccatgaggttgcaaggagttgaacatgactgagcgactaaacaacaaaccttgagataacggcttcttctggcagaggcttcatcctttgtctttctaggcccaaggcatgcttctgaaattatattctgtctattggttctgcagtgagtttccttaggcttaaggctctaggcacaacatctccaacatttct

SEQ ID NO: 33398 - DNA, 1174 bp, Bovine  19866880697050
  misc_feature (1)..(1): n is a, c, g, or t
ntggagaggtcaatgttaagggtagattgctgacctgtggttgaagtgacaggagcttgtgagcttgttcagagaaagtatctagagtaagaagagaaacatgagaagagaaatctgggaaaactggcattaaaagatcagcagaacatctattaagagactcagtagagagtacttacagaggggtgatggaccagaaaggagaaaacagacagggatgatggtgtaatgagaagttgaaaacagtcaacagtaatgaatgcttctaaaattttaagcaagaagaggactgaaggtagcctattcattgcctgctggttcatgaaagtttactgtcagttaactgataggattagaaactgggcgtcactgatttagatttgaatatgaagtataggaggtacaccaagaaacatattattccctttttaaaaagttgggagttgaaaatgatgtagttaaagcattcagtattgtattcaatttatttgaatccaaggcattgggtgggcttcccaagtggcttagtgatatagaacccgcctgccaatgcagaagacatgagatatgtgggttcagtctctgggttgggaagatgccctggaggaaggtacggcaacccactccagtattcttgcctagagagccccatggacagaggagcctgggggctacagtccatagggtcacaaagagtcagacatgactgaagcaacttagcacacacgcaaggcattggttatttaaatgctgagagcagaaactgacttgttcatctttaaatgcctctcatggaaccaacaaagtgttaaatgcatgtttgtttatttaggacaatggtaatttttctgtaattagttcttctaaaaatatttgtagttgcttggaaatagtttctttcatcaaggatttcagacattgttcattgggggttttgggtgttgttctattagtttgcattctctgggaagaagagctagctaaatagacaaagataaactttcacaaatcacatttgagttatcaaaagttctgaacttataacaggccaaattaagatttatttttgtaattttggcagtcaaatgtaagtcaacaagaaaataagatttaccttgttgttcagttcagttcagtcgctcagtcatgtcgactctttgcaaccccataaccg

SEQ ID NO: 33399 - DNA, 1508 bp, Bovine  19866880703666
  misc_feature (1)..(1): n is a, c, g, or t
nttactcccttgatacggataccccagcagcctggagtgacaagagtacaccaagaattctgtggtatgccacagtttatgaccttttgatctctcttcagggaataaaccccagaaatgacaagagtaaacaaaggtgtacttcctatcccccgcaaccctgaccccaagatcctattcatacttgaactctctcctatgctaattagacactgctttcttccagattggataggcatattatggtatcaagaatatgtatctactgtacacaagtacactttaattggcttacttggaatcaaaagtcaatgaaatgttagtaacagctgagaacagtcttatagtgagagatcatgtttagcttgaaggtcaacaaaggcagtagtttgaagatgataagtatcaaatttttaaattcagaatctcacatccagggagttaattaaacagacttccatagcatcttaggatgtgcatgcttagtaacactgtatattattagctcttgacagtttttaaaaggttgaattataggttctttcacagaattcacctaatcatctttcagttccaaggaaatagtctggaattgctataaaccaaacaacaacaaaaatcccattgacccaaagagtgatttcatttttctaataactgcaaaacacaaaatattccctttttaaaaaaagggttaggataagatgacaaactttcatcattcctgaatatacaagcaaaaagccttattctaaaatactttaatgctaacattaattatgcatatcttaagcaatttaggactcagctatgctccccgtaaattgtatttcacttaccaaaatcaatatctagtagtgctgcatttgcaccttctaccaagattttctttggtggtccatggagagcttcatacaggaaataaactccatctctcaccattggcttaatcctttccatataaccctatatacaaagacaaaaaccaagctcgatgtatactaataaatttacaatgtaaactatctgagtaaaaatcacccaacttttgacaatgaaaactgacaactgtaaaggagaaggggattggtgacaatgctcaccctattgcaacatttggattggctttggtctctcatgctgattccccagaaccagaaaagagacactattttaagaaaagtagagatacaatgaaattcaaaggttctacttcaacctcactgcaaataatgataacaatcttctgaacagcccagtactcatacttcatataacagcttttaggaaaacaaaaagaactgaatattgtgcttttatattttgtaggtattaaaaaagcagcacttaagagtccatataaccataagtgcatcaaagtctttctcaaaatgttgtgaggaccacccagtgtcactgccaagcaagcatcaataattgattactaatattcttttcccactgtattccattacagtaaaataccttagcagtattactagtaatat

SEQ ID NO: 33400 - DNA, 1844 bp, Bovine  19866880708081
  misc_feature (1)..(1): n is a, c, g, or t
ntattatgagtatgggacttgatgcccacactcccccaaagtgaaaagactattagctaccttaaagcatttctaatgaaaaactcaaaagatggtccaattagttcttgaactcttgttgtctggtcattaagtcatgtccgattctttgcaatcccatggactgtagcctgccaggcccctttcctagtcaaaaacctttaaccaggttattcctcaaattacagattgccttcctaatttcagacagctgccttcaaaaacatgtgaaaaacagactatcaacaaaaaacatatcaagaacaggaaaaaactggcaagtccctggcagtctagtggttaggactttttgctttcactactgagggcacaggttcaatccctggtcagggaactgatatcccacaagctgcatggcatgcctcccaaaaacagaaaacaaaaaaataaaaccccaaactctaaatatatatatatgtattttggtcagtcacctctcatctatgaatagcagcacattactgaagaaattaattaagtaaattcgatctttctccttggtgtgatttaaaaaattttttttctgaatggactccaaagaaaaagagggtaaaaattccacagagagtccgtcagagtgagaaatgctctccaaatgttcctgtttctgttagggcttccttgctctattattagagaacacgcctggaaggcttattactctttaaaaactgggcaggctgcctgcaggagacgagcgtttaattcaaggtcagcaaaccttatcgagtccttctgcctcaaagtcctgccaaggctatgcagacaatatggaggatgcctattttaagtggagatgcatgatataactgtaaacaaacaaaacacacattagcggtctctcggtatctgcaagggactggttccagaaccgccccccgaccccccagactccccagtccgagatgctctagacccttatttgaaatggcatggtaaaggcatctgtggatacggagagctgactgtatatgaggacttagtcttttactgaatgattttagttgtgaaactccccctaaaatgactagctgtggcgacttactcatgttgagtaatattatcgtctcacagtttaagatttttaatagcagtgtttctcgatgctcctctaacttgatttccaccctttgtctttaaaaaattatttacgtaccactgctgaaacatttcacacggtatctgtggaataaacatcttctcacaaagctcaacagagcttctcaaattcactatgtggaaattcatgcttttgtagaaccataaaacattgatattttccaacagaagatgtattataaatatgcaacatgaaatcacagccaagaacatgtatccatgaaaaacaaacaaacaaaccaagctgctgaattagacatgactggatgttagcaagatttttgttaatttctgttggatatgtcttcattgattttgttgtctaagtagcagcagatgccaaaagttttaaacttacatacttggggaaagaggacaattttatttaaaggcttagctttttatttgaattgggaaaagaccacttgtatttctagagttgggtccaagcctaagagtataaccagtattcagagactagttgaatacgctgctctgagacaactgcagaagctgggatgaagaggtttacacatgacgacactgggccagccctgcagagaaagtttaccacgcagggcatgtgagggcggagcgacacgcaacactgggggtgagccaccaaaggaagctttatgttcaagtttacccaacgctgacaacca

SEQ ID NO: 33401 - DNA, 1409 bp, Bovine  19866880715803
  misc_feature (1)..(1): n is a, c, g, or t
ntttaatatgccttttaaggaaatcagacccagactctaagtgattatattaaatgttttaagttccagactagggagatagcatttatcatagttgttgctttcaagcaggaagcataacattttattaagttgataaaacaaatcactgactaaaatgaagtttaatgaaagttctctatcagaagaacttaccattttaacatatgactgtaatatagtacagtcagttcagttgtgtaaataatgctttagaaataataagtggaaatatttaggccaattttttgcattgaagcaagattgagttcaaaagtagctgcagttatttatgtattcattgctttcccatatatttcaagatgatgatttttctgtgaattgtttcctctttttatgttaatactctggaatattttgataagccttctaaccctcagtgacactggcaggcatcagagggggttaagcatgttctagtagtccttccttggccctcttctcttcgtttacttgccatctctgtggacttaagatgttcaaggctgtaaggtcctaacaccaaagtgagattagttctccagtcctctgctcatgtccttcttgaatatataagaaccccataaaaccactgccttacagagaccttttactcagatctgtacttctcaagaagataaatcattgcttataggcatcttaaagcagagtcgaattaactctgccattgtttgccatccagtttagtgagtcactgctcttggtaatgtggcataactcccaaatcttgaaggttctgagaattaacagatagccagaaccagtctgctatttacatgtgcatccagccctttatcagtctgtagaacagagtatgagggaagaatcctaccaatatgtgtttgctaagactaacgcttgatgtttgctgtaggtcaagcactctgctaagtactttatacatactaatgtatttcattctcatagtagtcctctgtggaagactctgttcattatccccattttgtaaataaggacagagaggataggtatctttccccaggtcacacaagtagtagatagtgaagtgagaatctgaaccaagggtgtgaattggaatcagtgtctcttttttgagtcattgggaacctttacaagttatcagatgtcagggtcagggagggatagattgggagtttgggattaacatatacactctatttaaaatagatagccaacacagacctactgtgtaccatagggaactcaatattgtgtaaaataacctaagtgggaaaataatttgaaaaagaataaatacttacatgggtataactgaatcacttttgcagtacacctgtaactaacccatcattgttaatcaactatactccaatataaaataaaaa

SEQ ID NO: 33402 - DNA, 1144 bp, Bovine  19866880730285
  misc_feature (1)..(1): n is a, c, g, or t
natcctctgtcgtccccttctcctcttgccctcaatctctcccagcatcaggatcttttcaaatgagtcagctcttcgcatcaggtggccaaagtattggagtttcagcttcaacatcagtccctccaatgaacacccaagactgatctcctttaggatggactggttggatctccttgcagtccaggggactctcaagagtcttctccaacgccacagttcagaagaatcaattcttcggcactcagtcttctttacagtccaactctcacatccatacatgaccactggaaaaaccatatccttgatagacggacctttgttggcaaagtaatgtctctgctttttattatgctgtctagattggtcataactttccttccaaggagcaagcatcttttaatttcatggctgcaatcaccatctgcagtgattttggagcccagaaaaataaagtcagccactgtgtccactgtttccccatctatttgccatgaagtgatgggaccaggtgccatgatcttagttttctgaatgttatatttagaatattttgttttcaagaatatttgatccatagggaagaaatatatgtcttaaatttgttacacatgaaagaaaatgggagggtggccaatatttctttccatttggcattattctagtctctctcccccagaggcaggcacatcacagatccacattctggtttatgttaaccattttcccccaatagtcattatttatggacttgaccaagaagtgcatttcttaaccatgccccttttctacaaatgcttgtaatgtgttttcagatgtgaattcataagtgttcttatttgcatgatatgtaattagtattttataaaattagagtggttgcataactctaacagtatggtctttgttcattaattatatatgtgctacgcttagtgcctcagtcatgtccaactctttgcaaccacagggactgtagcccaccaggctcccctgcccatggaattttccagagttttccaggcaagaatactggagtgggttgccattttctactctgggtgatcttcctgacccagggatcaaacccacatctcttgtgtgtcccacattagcagcagattctttaccaccatgccacaca

SEQ ID NO: 33403 - DNA, 1195 bp, Bovine  19866880732855
  misc_feature (1)..(1): n is a, c, g, or t
natgtgtatagactgagtacacatatttggatgtaatcatgagctgacatctccgttgtcaagaacatcatcattaatactttcaagcattagtgcatagatggaactttcatcattgcaaagtgtgagttaaataatccaggctgaaaaaagaggaggtagcattgtgttatttggacctcacatttctggtaaagcatcagttttcaaatgacaacatctaggctcatccttctcacttgaaaatgatttgagaggcacgcacgtgggttaacattcagagatggagtgtttgtgctccttaaaaaaggctttcctgaatgggaaaagagaaacacattactttttgatttgtggtggtacagaataatgattttgtgagtttgaagatacttctgttttcaaatttaaagctgaaagagcattcttattcattgaatggtttctgttggtactggtagaattggcctttgagagaggaaggagaaactagcttctggtcaggggacaagctcctgagcttgcttagttctaccaggaaggagtaaatgcagtggttctggccctatggcccatgtgtacccttggttagtactctgtagagcagaacccacaaactgggagtgtatgacatacacattgattcgcacgtgtaactcggtcaattacaacaccactaaaggcagcctgatagaacattatgccatagattactctaatcggcacaacatattggtttttgagcattctcagtttgtttatcagaacaaagttgattcttttttaatgactttgccaatttatcgttgtgttccatggcttttgcaatattttcttctacatggttttaccttgtgtgggaaaggccctaccacaattaatgttgaaatggttatcacaaactggtttaataggatcaagacggcatggaccgacttgaatgttgttagataaaagagtcgtggcagcaaaagatggatagatagatgtaaaaattgttgtaagggggatttttgcctggattaaatctaaatacatatcaaaaaattgtaaaatagaatctaccagctaaaactaatgagcacaaaactgcattgatttggcccagggtggacaaatagaacatctggcatatttggcaccaatgacacagctggcattgttggaaacgtttctgcagaaggtacagatgcag

SEQ ID NO: 33404 - DNA, 1405 bp, Bovine  19866880754807
  misc_feature (1)..(1): n is a, c, g, or t
nctgatcttcagaatggactggttggatctccttgcagtccaagggactctcaagagtcttctccaacaccacagttcaaaagcatcaattcttcggtgctcagctttcttcacagtccaactctcacgtccatacatgaccactggaaaaaccatagccttgactagatggacctttgttggcaaagtaatgtctctgcttttcaatctgctatctaatcttaatcacctccgaaagtccccacctccaaatgtggggattggggcttcaacaaatgaacttgggagagacacaaacattcagtctatagcaattttttttccttaaaggaattatagcaatgaagctcaagcatctgccttcctgtatatgccaagtgaacggtgaagtaggaaaaaaaaaaatcccctcttactgtggttcctctttcactggtcttcttatatcaccttcttcaccgtttcaatcctcattatgctccctgggctatttcgagttgcatgatacgcttcttttaaaattagcttagttatcaatccctggagagcttggtagattcaccaatggaagaaacacgtgtaagtgtactttagcgacacctcgtggtaagatatgcaataacatcgtgtgccgcctctaatggcggattcctgggtttagtcctcatgaaaattaaataaaaaggaaattttaagaaacagtccatagagttagcaacaaaaaagaagtgtacttgtagacatgcttgcgtgtgtgttattcctccttgtgcattaaagatagaaatgatctatcattctatgaaggtgaatctcaagcttgatcacaagcttgatcaagaatgtgtcttttattctgctgcttctattctgacctcatacaaaatactgaaccatttgggggctcactttctcatctataaaagaggaaattttaataacctctacagagttcacaaaactcttaagtgaactaagtggtaagtgaaaagtgttttgtgaattgtatgaatgttatgctatacaaatgttagctttcagccacaaaattttcccttcaaagaattttaatgttacttaaagacaagacagaattaatctggaccttgtaccttacaacaagtccctttcacgcaggggttaactgaaatggtaataagtccaatcatgaagatggaaacagccatttctagggcagtggttctcaatcaggggtgatcaccctccaggggacatttggcaatgtctgggactttcggttgtccctagggggcttggggggaggcttactggcatccagcaagtagaaaccagggatgatgctgaatgtcctgcaaggtgcaggacagcccccacaacaaagaatcaatggcctaaatgtcagcagagccaaagctagaaaccc

SEQ ID NO: 33405 - DNA, 1065 bp, Bovine  19866880758835
  misc_feature (1)..(1): n is a, c, g, or t
ntgaaactaaatgttggagttgaataaaagtgaatctggatttcctgaatagcaccgtggcaagagtgtgctgtcagtatgtaagccagtccaccaacttaagacagaagtgttgctattccataaatacagtagaactccatatgctgagtttttcaatttcttctgttagaaagtttggggggaaaaaagggagactttgaagtattttgtttatactaacagaagagaaaagttctcctaagaaaaagctggtggcaggagtgtagaggagtagcatatggcattaaaaggagcacagctggaggtagcatttccatctgaacatgatgtcagagcagctgacagcctgccatccctcagccttttattctaacacacagacagggagttagtgtgtgcggatctgtggtggagaaggtatctcattcctctctaacatcatctccactttgcatctgtctctcttagtctgctttttttccaccgatgtaacagacctggagccagcgagactcagaggaaaagacttaatcaggtttatgtgtcctaaaggtaggagtagcaagagattagattgagcatatttctgttttggtgttttgtttatttaatttaaaaaaaaatcacattacttttctaatccagtttaggggtaaaatgtggaattgaggataaaatgaacatcttattggcattgaaagtcttgggcttgtttagttttaatttttatccctttttgtttgagcggtaaagaactttacagaatatttcaagttttgagatgttaagaaaggctttgaaatacttctttttgagatcacttcggattaaaatgcttttttgtttgttgttcactgctatttagattccttttgcttttggagtggggggggggagaaaacagtaaactgtttggaatccagcattcaaacttatatgagaagattattctagttaagaagctagattgttgtgtaattaattccactgtgaaactttattctccaaaacattcagcagcactacttactgaaacatacagcctgtagtgcttttgaaccg

SEQ ID NO: 33406 - DNA, 2540 bp, Bovine  19866880761366
  misc_feature (1)..(1): n is a, c, g, or t
nggatgaggcatttatgtggaggaactaagagaacacaaggaaggtttcatgtcctggaacccttccacatcctctaaggagcaggtgacagagcactgagacctcccatccatcagttcaacagcaacacgtttctaatatctaccagctgtgcagcccttcctccccttttacagatgtggacaccagagcagaaggaatggcaagaggctgacctagggtcacaggcagcccagcagggattaaaacctgcaaactttgaatttctagcctatgacttcacctgtcaatctaccacacatgctaacacgcacggtcggcttcgtatctcgcttgatggagtgtgactgtactcaatctgcgctgagtcacccttcagagaggcaacagtggagagagcttgggctctgcctttacctccaaagcgcctggggaaagcctcgcagggggcagatgtaaccaaatgtaaattcaggagtcaccccgccctcaagacccagcaggctgtgtgggttttctgtgcttcgtttcgttatccaagtatctacagacacgctgatttcctccggagagccagagactcaggtggagagtctagctgaacacattcatctcagaacccgctctgcttctccaggctgtgctgaacaaatgggaaccacgcccactccactgaggccatgttctgacatttcaaaacccaactcctcttcagtatgactaaagaaagatacatgcatgacagtgactcgaacgccttatctttggaaagcccacacgtctaaggaaatggcaaataggtctcccttctccttaggctgtgaatgctgtgaatagggaacatcacgatttctgagctccgtctgcttttccacacggcaagtggggatggccacgggttttcgttcacatcttgggctgaattaataacgacctctgtagcgtacatgcaagccacaactttcacatttggaggtgcttctcccactgggcccctcacccagctggaaagggaataatgcacaacaagccccagactaaaggtgacactttctgtccctggcactacttggtcaccatcttacttcctgccactccagcgaggctctacaatactggggactcagtgtgtgatctgtggatggccacagattccaggttttgttttgctcagtgtttgtaaggacttccctggtggctcagatggtaaagtgtctgcctacaatgcaggagacccgggttcaatccctgggtcaggaagatcgcctggagaaggaaatggcaacccactccagtgttcttgcctggaaaacaccatggatggaggagcctggtaggctacagtccatgggatgacaaagagtcggacacgactgagcaacttcacagtcacagtcacagtgtttgtaataatgtaggaatatgatttatgggattagtcatttgcttatatctacttaattaaaagacatggcccctcattattgtcttatatgaagtaagagtactgtatcaataaattctgatgatatcatttgctttgaaaggtcagtgattattggtgaagcaggtgtcccatggattctttgctcatgggtcataaaattttcagaagcacagaaatactaagcacaatattaacgtgatcttaagtaaacatgatgattatgataaaaaccagaatgttgtatataacttccagttactataaatcagagcaccataaaaatcataaatctggcaataaacttcagaggacacgttcagactaaagttaagaattagaagtccctggtgatatcaaccatgtttatacgatttgtatttttttaagtgttactaaaaaccagaatataataacctggtaataaatttgagaagctacttttcatgtaagtcttggagtcagaattcctcagtgataaaaaaaatttttttcctacaatttgttttttttaaatgtaatgcccaaagtagttatgctgaatatgacaaatgtttacatgaaccattggggttaaattactcataggccctacattatactatgatttaaaatatttccaactagtattacttttaatcattttgataatataattcacaaaggaattactttttttctgattgttttgagagctgcacataatgttctaagagttgcctaggctctcaggtctaaaggctgccctccctagtctccttcttcatatttattttaactttaaaactgacgcctttgcctttattcaggaggttctatatacatttttgtgtataagacaaattaagataaaggagactactgaactgctgattttgaggtatatgcttagcctaaaattatttcatatacaatcctctactctttgagttaaaactgaatgcacacataccataccatgattattcccatttttacaaatgagaaagctaaagtgtaagattaaatgagttatttgagatctcccagtttatttagggtaaaatgggctaagtgcagatctgtctgatgcgaagtcaaggcttttaactactt

SEQ ID NO: 33407 - DNA, 1550 bp, Bovine  19866880762266
  misc_feature (1)..(1): n is a, c, g, or t
naaacaggctgatgaatgggtcccaaagccaaagagactgctctttgtaatagtgaataagtaagtatctgattacagacagactttagcttcacttatctctcagcaagcccaggtaagaatcttgcaatctgggctgctctcccaagggtactacaataacctcttctatacctgaaagtaggagcccaaacaaagctttccctctagaattttagtgtcttcaagtggacaagttctcatattcaatggtccttagttaaaatgaacatcacttaaaggaatgtttttatttgtgtgtagtaactgatgagagtaatttgcttcaaaatggaagttttgattgataggacaatatatgtgcttaaatcattctagaagtgtcataattatgctttaaaaatgtcttacatgggagattgtcttatatatgagaacacataacattagtcatgtacatacatttctttccaatgtctcaagtataagtaatagcatctaaaagtgatttatgcaataattcatgcatgcgtgctaagtcgcttcagtcatgtctgactctgtgtgaccctatggactgtaccctgccaggctcctctatccatgggagtctccagacaagaatactggagtgggttgctaagcccttctgcaggggatcttcccaacccagggatcaaacccaaatctcttatgtctcctgcattggcaggtgccactagtactacctgggaaacccttatgcaataatatcaatttcttttttttaattaatttatttattttaattggaggctaatgactttacaatattgtagtgggttttgtcatacgttgacatgaatcagccatgggtgtacatgtgttcctcatcctgaacctcctcccacctccctccccatcccagccctcagggtcattccagtgcaccagccctgagcaccctgtctcatgcactgaacctcgactggcgatctatttcacatatatatcagtttcttaaacaggatattctgattatccactgctacataacaaaccactcgttagtgacataaagcgtcaagaacaatcatcattttcattataagtattagatgatggtgatgatgattgtcactcatgggtttggtgaggctcagggagacagcgctcactcaagttctctcctgtgactgtgatcagacaacagtgactggagcatctcaaagtcttcctcactcacaggtctggtagttgatgttggctgtcagctgatgtgttaagcgtacctctttattctgatgctttgacatctggggcctcgctgaccctagaaggactgcccctcccagagttagctggttcctagagagtaaatgactttcatatgcaagccaaccacctcctttatgggttctcacaccctgggcccctagctacatgccttagtcacccaggggcaagtattggacaactagagacaaatcctacatctcagaacccatcaaagtccccacactagccagtttgccccactgagcctgtttgccctatctcatctgctcctt

SEQ ID NO: 33408 - DNA, 1527 bp, Bovine  19866880835316
  misc_feature (1)..(1): n is a, c, g, or t
nctggggaaaagaagaaagataggcacagcctgggtctcatagagtgggagagacattttgcaagcaatcacatgaatgtgtacaaatacacatgcatcatatttgtgattcatatgattcaaggaagacacgaagagagtgtgaaagtgtgtgaaagggaccctcactgagtgtgaaaaaaataagaaagcccttgttgaagaagtggcctttaagctaaaggagatgaccttcaggagtgagagtacaagcctgactcttgaatgtttgtaacaaaatgacagctcccatcctcctacccaccccaatacagctgtcattcagaaatttttgttctcacttcaaacaacaacatagaacatctacctgcagatacttgtaaaattcagcccaaagtcaactgtttttgaagcttgcttaaaagattggcaattgaataccttggattcctcttgtttaccatcaccatcttgtgaattttacttcttgaatctatgtgtttacctccctcatttgtgtataacttctcatagcctggtatcgtctctcaccaggagttttgcaatcacctccctgcctttagtccttgtcaaataaattgtccccactgctgccagagtgttctctctaaaacatgactttaccaaggatatttcattctgactgtgctagctcctgtttatcagactgagtcagtagacctcagccataattcaaccagtgcctttgttgtgtacctttgctgccattgcatggttgtggctgcacacacagagtccagcaggcaaagacttagaagattcaagatccgttaagatgatttccacatccctaaagagggtcaaagaaacacatacaatttaggtgtggaggaaatcagttatatcttggtggaaattgcagattttccaaagtagacagaaaactaagtagtggtagaatttgagtcttgggacatggacaggagaccaatccctttatcaagttttgaggtaccttttatagtgacaacaaagagatctcattgagttgcatcaggactggagcaagaatcaagcccatgatctaccaaagggcatctctaggtctttaagatacctgaatatatttgcttgggttgggaatgatacagctgttactttagttagttgttctgctttgtttttttaatcctgagaagatatagaattaaatatttaaatgttgaaataaataaaatataataaggttttagctaaatttggaaataattatgtatatttgctgtattgaatatttggaatgcttaagagcaataggcacatttcaatatgtaacagaatgtcattctaatttcacacttcattttaaaacatgaaattttgctaattaatttgaattatgatttttaagttgaaaagtataagagaatattaccaaggttctaaacaatatggttaatagtttataagaacttgagatttatcatgggatttatcatatgtataagctttctttttactagatttcaaagagcaatgtaggta

SEQ ID NO: 33409 - DNA, 1457 bp, Bovine  19866880888142
  misc_feature (1)..(1): n is a, c, g, or t
nctctgggggacttggccgtgagaaagtgaaaggagcccgcgggcggcggcgacagctgcgctgggaggggcttgtttccaggctaggaggcctcgcgcgctctgggcgagcggagcgagcttttcggtgtgcgccttgacaaccgtaaatacacttttaagcgaagtggggctgggctgcttgaagttacggaggtatccgcggaggcagggcgcccgggacacacatgacctaagtccggcattaggtggcttcctctactctggctgctgtgggtggcgacgcccaggccctcgtgtcccagagcgcagagggtaggactaagggacgttctcgctccgtctggcgctgccccgtcagcaggtgcaggtgcgcgccgggctcagcggacgccactggctccgacgggcagtttctgagcgtcattctcaaggcatcttgtcacaggcacggcagagcgcctgtatttctcgcagaaccctcatgtcacgtgtattgcactgttacaagtagccattcccaagtgaccaaattctagagaactacagtgaaagtaatacttgtagaagccataccctgatttcttaatttgtacgtcttcaagccacaaaatcaaagtacggagggaagatgtaagacttgcatcgtttctgctttccttcaaatacattttaattcgattcccattcttttgcaattaaactctgttctttacggccaccaagaaaagtagaaacttcaagaagttgaaaatcttcttgaggaggcaagacttacaagtaaaaagttgaataacagggcagaaaatggtttacgaatgtagaaaactgcggagtggaggaagttagtacccttgtaattgtcaaggaaatgtgtttattctttgctaactgaactgagactggcaagcctgttgctaaccaacttggcaggagacctttcaactgggcaaaatgtgctctcactttgttccaggtcagatgggtaaaccaagctgaaagtattgtttaggcagtcagacatactgaattactaatgaagtaaaaaacaggagcactcgggattcctgaagctgaaatactattggaatatcctattagaaacagtggtgatattctctactctttcctcaacctttcatgtgcccatgagattgataactgaggtcaaggccattctatgacaaccagagttttttattccatgaaatgtattctatttgtgcttttgctgacttctggatcttttagtctgttgacaaaaggccaaattttagttgacttgttaaaagatagggagtttataaatattcttgataaaggaaatacactctttaaaaaaaaacaaacaggtggaaagaagtacatgctttgccaacaaactcggggaaaaattggaaagaaatatttgcattctcagagttgtttttcacctactaaaagtttaaggaaagtaa

SEQ ID NO: 33410 - DNA, 1016 bp, Bovine  19866881107353
  misc_feature (1)..(1): n is a, c, g, or t
ntgggcttgtcagagggaacttttgttccatgtttgggctgggaggcttccagatagaaatcaggctggcatgtgaacttggggaggcagggagagaactgaacacagcagccactgacccgaaaggtctggccctcagctgcagtttgcatctgggtgttctttgactgctgtccatgtggcaccgtgctgccagctggggtcactggcctgcatgggtaccaggggggaggaatgtagggcaggcagtccaggaccaggcgctatccacaaaggggatgaacagactttggattctgagcttttggaaggtggtcctcactttggggctttgggaaaaactagtcctaattctgcaggatttatttgctgtcaggtcccagttatcccaagattgttggaagcatccttaggatccctttactacatggactaattgctctagagataaagccatccttcaccgtgtctgccggtgctagttttgggtaggtaaactcatgttgatgcccgtctagaaggcataattcagagggccaatgatgtgactgctgccacataattcaaggtggagggcctgtccaaagctgtccgggggctactgtctctctctacagatggactggacttacactagcatggtgtgtatttggaaagaggtaagctcgatgaattatgaccgtggtgaatgtcattaagacacggtagaactggaagcatcccatgcatgtaaattcactgcttctcacataaccgtccccaaggccacggtctcacaatgtcaagtctcactttacattaagctttaaagctggaaaagtatcttggagatgacacggccaaaatttccatatctgtgttggcaagttccctcccaggaagtagttcaaagatggtggatgacgagccccttattttgcaaataaagtaacggctcctggaaagggcagccatggccccaatcacactcctaattggggctggaacacagctgccaacatttcaggttactgctg

SEQ ID NO: 33411 - DNA, 1377 bp, Bovine  19866881198220
  misc_feature (1)..(1): n is a, c, g, or t
nttttggatttggattactccaaagtgtgtaatcctccattcttattaacaggcaaatctggggaaaggggacctaaaatgctgtagtaataacagcattgatgaccaggtttatattgtatagactgagattgccttcttaacaagttttagcaaagagtttaagatctagaacccctgtaaagtgagaatcaacagctcatactctttattttaaaatacttggtcatggcctcccttcagttttattgtggtactggtaaattctacctggtctggcatgcttcactttgatttcctgctatcctctactgcttgcctctaaatcaaggtaaagagcagagcaggtatgtataaatgtcacattgtcttgattattttatatacttaaaatacacatatactaaaccttgatatttgttagctgcataggtagtgtacacttcagttcataatttggcaagaatgacttggtgggagtggggtttaaactgaaaattagaacagcatctgcaaaaatgtagtaagcagcattcagaaatacgtgaaaatttaataacagctttgtctacatggcagatgtttatagtggatatcaaaagaaataataacagcatttgatataattgcagataattgtgatctacattttaaaatatcaagagatcgcctcagtgcttcttcccttaccatggagagttttgcttttctttgggctggaggaagggcatcttacggtgtgtcaaaaggcaaagtctgttttgagatgaaggtaaaagtagttttgtgatgttctttttttcttaagctttgtgaggtttttgcctgatgttattagatatcagtggaacttgtatttttttcaagtttttgtgggttacaagagggactaaccatatgttttatagtagttgaagatgtttgttatattagaagttgccatatagatagagccagcataatttttatttagggtgttcattttttatgaggcacttgaaaggcccaccaaacgtttgaaaaaatttggttaggctccagtttttgttctgagaaaaacatgttaaagagtaaagttcagttggttttgagtattgagaatatataatttcaacattttcttttaaatgtgaaacaaccaagtacattttcagcttcaagttataagcccttagtttttgaaattcttgtaaatgttgggggggagtgtaaaattggtgtggtctgtacttagtagctgaagaagaattagcccattgcccaaatgaaataaaccaggattgatgagggggtttattttccttggctcacagtttatctttgacttttcaggttacagaagaagatccccggtgaggcatttatatacgaaagata

SEQ ID NO: 33412 - DNA, 1920 bp, Bovine  19866881283200
  misc_feature (1)..(1): n is a, c, g, or t
ntatatgtacatatatatatgcatatgcattttatatacatatacattttatatacatatacacacagaagtacacaaggtcagttatgaggctgcaaggatgagctctgtgttgcacaaaatgaatcacatcataggggttggctgcttcttgcccatgaagctgatgtgaagaagtccacactctgctgactttcacttgggctctggcactttacattcttcccttaagattcttttcaagcactaccttacatttgccatctggtcaacctctgaggactaagcttgagtcagtctcccactcaggccaaattaggcaaaatatttgcctgaagtggccctcaacccacataatccaaagggagaacatcaaccctagcctaaaatgaaagccggaggtcagtacaaaaagagttgtaccaactaccaaggcaaagagacaaagggaagactacaaatgaaaaacgggagagaaatctgaaatcaaaaagattcagaatggttcaagagaatggtgtgttatggagaaactattttttacatgcaggggaattctggtcttattcttattgggtgctagcctagatctggacaagagagtagctattttaacatatgtcttctctacactgagctgtaagccttttgatagcatgatgtgatgtgcatcttgtcatttttgtatctcccatagagtctgacatatggcagacacttaccaagtatttgttgaatgaattaaggaatgatgaatagagttaatgatatactaccagcactactaccccaaccagtcataatacccatcacttttgggacatttgctatcagctcaaaattgtgctgtgtacttgacatatgtattttttaattcttacaaaactttataaggcagatgctgttcttaacccattctatacatgacaaaacaaaagcttagagaagttatcttttccaaaattgcatacctaacaagtggcagaaatagcatactaacccaagtctgtttgacacctcagtccatgaacttgatcactcaattatactgttatggaaacccagttttgtttgagcttgaattggattctaaaggttgtataatcccctgtttttcccttcaacttccactactcaaactgggctctgtattttgggggcaagtctccaccactatactcaaaacattgtcagatagttatgtgtagatgggcgtcttgatggaggaacacttatgttcccctacggtaaatagcataagccctggaatacagtaagtgttaaataaatgtttgtggagttaaatagctattgacttctgaattaatgatggtgattataagtctatgtttactagagaccattttgattttgatccatggatttcctcatggagggactgaaaggtcaagagataagatatacaagcctgtttcagcacctcccagcagctttctttggggctggatttattgccttcttggttgaaatgttagctctcaactttgctgagatgtcaagagcagtgattttaggtgtagggctgtcaattgcccccacaaacttactttttaactcaaaagtgccatctggcactggaatgggagacctgtcatgaggttcacaggccctctggacctccaagaaggaggggaagggaggccttcagaaacagggtaccctgttcccagctttaaacattaaagtagtaaaataaaggaagaaattttaagctataaaaaatctaaaactttcagtaaaaaatcaacaataataatgggcttcccttggtggctcaacggtgaagaatctgcctgccaattcaggagatgtggtttcgatccctgggtcaggaagatcccctggagagggaaatgggcaacccactccagtattcttgcctgggaaattccatggaca

SEQ ID NO: 33413 - DNA, 1182 bp, Bovine  19866881299951
  misc_feature (1)..(1): n is a, c, g, or t
naaaaaacaaaaatggagtttcttaaaagttaaaatcttttagatgaataatataaattagatattgaccaaagatttttgagaaagaattttggggaaaaatccaaaaactgtatttctgtgatgctaaaacatagctacatagaaaatgaattagacgtgcttgataaaggaggattttgtaaagcacacatttgcaaagtttaattcgggttcaagagtgtaacccactccagtattcttgcctggagaatcccatggacagaggagcctggtgggttacagtcccctgtggtcaggcatgactgagcaactgatcaacaacaggctcccatggacagaggagcctggtgggttacagtccccgtggtcaggcatgactgagcaactgatcagcaacaggagcaactgatcaacaacagcaactgatcaaaacaacaattccccctagtttgagatattatatatatatatataaacttttaaaactagccagaaatcagtttcctgtgctcagttcagcagtagattcaagccaactgggtagattttaatttctgaaaaaagaaagaatttacttgtgtatctcttcatccgaagtgggaggggggtaaaaattaaattccagtcctggatattagaattgtaaaagaaagaatgtaaaagaggtatctaagtaaaatagcccaatttgatttaaaaaattccacatattccccccaaactcttaatatttaggaataaaatcactgcaaatgaactggagccacatgtggccagagagactaacagtgaaatcagcaagaaactgcttattcagcctcttcaaacaaaaatgaattgttctaatgaatgaggagtctttaatgaattaccatatgacatgccagtgatttttttcaatatcaagcagagaaagttttcatttgtcttttgttcagctacagctacttaaaaataatggaaggtcatggcggctgagacaacacttgacattgcagccctccagcggcaggatgtgcttacactgagcccaggagaaggggcacgcggggtgaggctctcctcagatctccaagaccctgccttgctcttgttttctctccatggagatgaatggcggcatttaatgagtccactggatgacatttggataccagcagcgttcacacattctacaga

SEQ ID NO: 33414 - DNA, 635 bp, Bovine  19866881304493
  misc_feature (1)..(1): n is a, c, g, or t
nagagcccatgctcagcaacaagaggagccaccacaatgagaagcccgagcagcacgatgatgagtagcccctgctcaccacaactgaagaaggccacaaataaatagataaataaataatttttttaaagagtctatttccttccctaaatagtctagcagaagctatgaatgacccttctactttcaagacagactttgtagtactaggtaggcatgcctgggaaatgtgtataaacttgcaataagaaacttcacttaaatttttttttcagaatcttatccatcatgactgccatccggctacgagaatttattgaccgccgcccagcaatcccacccaggtaatggtcttccaaatgcagacacctccagagctgcagcacggaagacagactcctgggaggctagaattattcatcctgctgcttgctccctgatttagagataactgctgccagaggttctactgaagtttctttgggtttagaaaaagctgtttaagaaaaaaaaaatccaacatttatggcagcatctatgcaaacttggcaactccaaattttagtatttagttattttccacaatgtttagtcatcaaagatatgtccttttgcttccagaaatcactgaagga

SEQ ID NO: 33415 - DNA, 520 bp, Bovine  19866881522456
  misc_feature (1)..(1): n is a, c, g, or t
naaatgggctcagtgccttcctgaaactgccttaagctaattttggtttgtgcagaagaggatgctagcaaccacaagtgacaaaatgagcttgtttcccagagtcgtgccaccaacatatagtaattctagctacctaaagataaggtttgcagacaaccaatgtgtaaaaattcaggacttacacaatgaacttgctatgcttgttttttgtttagaacactgattataatgaataaaatataataaaaatttattcaaataaataaaaattatgacataaaaattatgtcccaataacctgtaattttaaagtagaagataaaaatgtgaagttttttctggaatgagagcccctttaaaactttacccttgccccccaccaaaaaaaacaaataactggttaccagataaagcagactcattctttcataccttttcctttttgaacatttttttctgcttcctcaaacaatccaggtagatgaatcaccacaccatttccttaaaaaataaaaca

SEQ ID NO: 33416 - DNA, 1599 bp, Bovine  19866880346221
  misc_feature (1)..(1): n is a, c, g, or t
naggagaggacacagaggcgaaggccatacgaagatggaagcagagataggagagatgtggccataagccaaggaatgctgggagcaccagaagtgaggagaggccctggattctccccaagggcctccagagggtgcggagctttgccaacacctttaggcttctcgcttccagaactgtgcaggaataaatttctattccttttaagccacccagtttatggagatttctgaggcaaccctaggaaactagtagaatcagtggcaacttatgagggccacagtgtcttcatgcataatatgggtcccacctcataaggctttggggttaggattaaaagggacagtgtgcctatgaagcacactcatgtgcccagcatattgaaaccagtcaatgaaggtgagatattagatgacgcgctatcacctgcttctagcagccctgtcctgaaccccctcagagctagtcgctcatcctaccactttcctgtgtctgactccttgtcactgggccccctgagcccagcctagcatgttcctggcttaggaatctcagaggactcgcatctgactcccagatgcaggctgcagaacccacttctccctctgagccattatcaccacagctgtcagagggagactgtgaacatccacgtgtggccttttaatatttcatccaagaagtcattttcctacatgattcagacatagaagtcttggggaattaaatcaagaaggtaactctgggccagagtgaaatctgccaacaggtgtgtaggattttcctgcgtccactctgctctttctttcttatctgcatcctgcagcagaaaggaagctggctgacaagattatatggtcataccaattattaaatatatatggcagccttctgaaaatgcatttgcataccaaggaaatggaatgcattcaccaacccaggctcctgcactgtgggctttggaggaataacaaggtagctttaaacactatgatccaaggttggatccatactctgccacctcctagctgtgtgaccttgtgtgagtgacacaccatctctgaacctcagtggccataaggaaatatatgctcctcccttacaggtttaccataagcactgactggagtcatgtgttcaagtgcctagcgctaagcctgacacccaggagacccatcactgtgacttttgttcccacccccggactcagaatttcctgcctttatagggaaagtaacatgatggctcggcctgcctcccagggaggtcttgagcagtgctgctgcctatggagtagatttatacctttaaatgcatggttctactgtgaatgcatttctggagacattactttactgacaaaggtctgtctagtcaaagctatggtttttccagtagtcacatatggatgtgagagttggaccataaagaaggctgagtgctgaagaattgatgcttttgaagtgtggtgttggagaagactcttgagagtcccttggactgcatggagatcaaatcagtccatcctaaaggaaatcagtcctgaatattcattggaaggactgatgctgaagctgaaactccaatactctggccac

SEQ ID NO: 33417 - DNA, 839 bp, Bovine  19866880362441
  misc_feature (1)..(1): n is a, c, g, or t
ntgcagggttagcaatcctgcctgggggccgcttcccacatcagtgatgaggaataaaggaaccgaggggaaaaagtcaaacagaagaaagcgcctggaaaagatgtttttatgttcacttatcacatggaaaaaaaagaaccaaagtatacagcatgaagatatatgtgtctcagaaaatttatcctcatgaacctgtttgttcaaatggagttataattcaagaattgccaaatggaagtcataaaatcagggtaggggtggggaaaagggccaccaagggaaaggaagtaattatgtggtatttcttctctagtttcagatcattgggaacttaaacttttccagcaagtcattcacataaacagatgccatactgaaatatgattgtgtaaaaatataaaactcctaaagtatgatggcaataatattttaggaagaaaacattaaagtctggtaatatcagaaaatacaaataggatcatttgggagcagttctgtctatataaacagcagttgcaaacaatggatgtatattaaagaacaaagtgtttggtctgcacataacttagaaaggggtaacatttctaaacactgactttgtaagaaaacatgaaggacatcttatactcaacaatggttaaaaggaggaaatcactttctgaaggatgcagtgggcagaatgccaaggcctttgtttttaacctgctcttttttttaacttgctcttaaccgtcttgggatgcgtttacactgcatggggtttcctgcagaatctagcaccaatagatggatcagattttgtctttgatctgagtcctttatgtcttcagttttga

SEQ ID NO: 33418 - DNA, 1227 bp, Bovine  19866880364852
  misc_feature (1)..(1): n is a, c, g, or t
nacttttctgctaaaaaacggttgcaagaccttttgtttccatgaatcatagccaaatggcttttaatcagttgaggatgcttctcaaacacagagaattttcgaaaaatatagcttcccctcagtaccattaacaaacagcaatcagaataaatgctttgaaaagttataagatgtgagatacaagaataatgactttaacatatgtttaaaatgatcccacttgaatccaagaataaacttttaattttagcccgattttacagatgaggaggttgaagaccaggaagcttgagagaagaaagaactagaagcataggctgacttcagacctaggacttttgctactacccaggtatcctaaagtgacatgttataaagagatacacaaattttcaaagaaaggggagctaattatctgggctgcctgctggctataatctccccctgaatcacacttgctgaggccagagccttctctgagcatttgctggagtttggccagctccagggcacctctgggctgcaaaacacttgagcttgctgtgaaattgcccactttcggtggtaactcctctctttctttctcctttatataagaagtacatgtaatgctatttcaaagtgtttctattagctacaccactgtacttgacttttcctctgagcaatcacacctcactctctgctctgtgtgacccaaactgccctgaaaatggagcttgcctttgcacatagccctgcctccaacacttcctgccaactgctagatattttccctgagacaaaagggcaaggatttgctgcgtgacagagtgtgggtcccccaccagccaacttctcttacctgcagctctcccggccttctccatgcagcttaagaaaacacacatcttgtaagaacagggctgagctcctctccccttgagcatggttaatttgtttgccaaatctgaaactaagtctaagtcaaaatcaagagtaaatcccaaattctgggtaaagaaagagatcatttctatacacacctggtactaaacaccaagagtacatctaagcaaagacgaagttgaggttgatgagtgaggcgattcatttgtgcttgatatttacacttttccaatgtgctccaaaattatgtgcacttttacttagagaaaatagagagtattcaagtttatgctattattttaataaagaatcataattttcacagaaaagtctaga

SEQ ID NO: 33419 - DNA, 911 bp, Bovine  19866880366439
  misc_feature (1)..(1): n is a, c, g, or t
nctggataaaatctctgtttctgagacagataaatcaggtccaaaatatcttctagcacttcctgaggcagggaaaaaaacaaaaacaaaaacttcttgcaaacttaagtaatcctttaatagtttttgacaaaataaactttatggaagaaggaaaattaaaagaataaacttcttacaaaattagactaatatcttcccagaacagatgtaccatactttttaggattatttatgctacttgggaaaattagttctattagatagttctaaaatttttgtggatttcttattatgcatggtaaaataatattcttcctagcacatattttttcaaggaagtagaaaaaagtaaatgtccttttttttaaatttcaaattcatttatatcttgagagaacaatttagaatttgttattagagcccctttctaagaatttaattcatttacctcttttttttttttttccccacaaaagtgttttccttgtaagataattttaaaatgaaactaagtatcagtcccaggaataagtattcaaaagtgatttctaagaatgacattttccaagttataaagtttaaacacaaatcatttatcaatagactaacaagttaactccaaaaactgttactaatttttagacaaaattatagtgagttaagtatttgtgttgtgaaaaagtaaagcctaacctttgaaactgctacaagacgtactcttgattggaaaggagtggggaaggcaattgaaaaaacacagtttttcactttacgcacataattttctttaacaggatcagttggcaacacagctgacaaaaaaaaaaaaaaagaccttcttaatgttctcatttgttgcatatacagcattaataatccttagaaaggctacagttcttcaagaaaat

SEQ ID NO: 33420 - DNA, 1574 bp, Bovine  19866880488170
  misc_feature (1)..(1): n is a, c, g, or t
natttctttttctgattactgaaatatcacatttccattacagaaaatgtaaacagcacaagacaagcaccaaagagaaaattgaagtcaccataacttcatcaatcagacagacctgcggggtcctgtaagcacttacacttcacactcagatatctttttcttttatttaattctttccaaccatttgttttgatccttcacattataaagcttcttctatggcaatggttctcaatctttttacctcatctctccttttttaaaaattataatcaaatgtatgtaacataaaatttaccattttaaccatttgtaagtatacaattcagtgaccctgaacatattcacactgttgtgaaaccatcaccacgtccatctccaaaatgctttactctttccaaacagaaattctgtccttattgaacaataacttcccattaggagtgatcgttttaagctatgatttattttggggatatttattagttattttcaagtgtttgtcaagatatcataagtgatttgctaactcattttaaagggaaattgtagtatttgcaagctgtgtccaaccaaacagttattagcccagcaaaagtttggttgcctttccaatacagaaacctaagaatgtacattttaaaatgttgagaatataaatagtgagcaaacattttcaagtaagtaatatagttagacattagtggtatccccactattaaggaaaatctttagataaagatacacccagatcctgtatgggaaacaaatctgaagaggtctgtaatactaatacaccccatgcatttctctctgcatcagatcagaatgccccccagtgtgtgtcaaggtgtgttagcctgtgagcttgctaagcaggagggaagtcgtctatgatcaggggaggacagctgacataaatttcagctgacaagctttgaatgctaatggatgccagctcagcctgtgtgtatttgagcaggggttactcacacacacttggatgtaagcctctgtgcctgccaagctaatggccagccctgtgggaagggggtgaaagaagctggaaagattccttttctcatgggattgcaataccatttcaccccctttcttctttttcagtggaattcaagctttctagaattcttgcttaaaccagtgtttggtagtgttatcctaaaacaataaagaagcctgttaccagcaagagggtttatataggagcaacaaagaactgcaattcaggacatgaaaccatggcaaactacatggaagtccagttcagcatgggagacgaaactcttttatagagaaggggaagttggaggggctattataaacaaaagtccgttgaaggaaatggggagttcgaattatagtggctttttattggctgagttgtgacagtctctcgttggcagacctgttgccaggcaaggagaagtctttcctgctggtgatagtaagctagggtcgcttcctgccagagatacaaggtatgtctctctctgttgggatgtatgttgagaaagtgagtaatattagtgatttgtgtgtgagagctcccc

SEQ ID NO: 33421 - DNA, 1729 bp, Bovine  19866880501933
  misc_feature (1)..(1): n is a, c, g, or t
nttaagatcctgttaaaatgcggattctaatacattgggtctgtgagcgggaccggagagtctgcagctcaaaaagtcaccaggtgataccgatactgctggttggtgggtcacacctaagtggaaagaagccagaagactcctaaggctgcaatacagagggggaggtggagagaacggaggccaggagacacacttgcttgcttgcctgaaacaaagacaggacaagctagcactaagactgtacagctggaaggggagaagcagctggctgacccaacagtgtgtggcgctgttgaaacttcatggatttaggttgaatttgtcacctttttttggactctgttctacagaatgcaatggttataactttttaagactggaaaagcgtcccttcaattttctttcatggaatgtgctccatccctgacgtatctgttgtacacagcccctgctcccaccctgctttggcccctccaccaccaccaccatcagcagcagcagcaccctcatacagtggatggctgtgggtggtcttccagcagagctggaggttcacacagactccgctatggtccagggttcctaatgctgcgttttcactcagatctccacagtcccaggctttgaatgattctttcataaatgtgttcaaatgctcattgtgtccattcagtgccatgtcagacgctgaggaaacatggataaataacgtagggttcatgccctccagggactcacagagatgtggaagcaggaaggaaagaggtactgaactgtaccagttacaggccccatgcttccctcattattcctcatagtaggaattattgtcccaattgacagacaaggaaaataaggataagagagggcactcaacagggagtagagtgctgagatctgaacccagggtgtgggctcccagagctcctctggggtccagtggcagctctgcctctcatttgcgttacaatcacaggtaagaccttccctttctaggactcaggactgtcacctttgaaacgaagtcactggactgcactgcttgttctcaactctggcctcactttagaatcacaccaagaccttttaaaacctgcagaaaaccagaccccagacaaatgaagaaccctggacgtggggaggactgggcatcagggtctaaggtacagccagggttgagaaccaccaaagtccttgtgacctgagctcctgcattctaatttcctgaataaccctcttctcctctagccctgccacaaggcccatgccaaactgatgaacaaatggtagggaggaggaggaaatccccagcaccattcagctaaggacaatttggagcagtaatgctgggcactgtcctttgccctgttgtcattttctcctttcagtgagaaaaacagcagcagtggacaacagtggagcaagctaggcgggtattctcttacacggttgcagggaatataaattactacaccttccaaaaaaaagagaacacaatgaaagaccttgaaaaaattgggcaagcaccagacccaacagttttaggagtttgtgctaagaaataattacggaaaagatcaaatacagagatacaagaatagggtcatcactgggcttccctgggggctcagtggtaaagaatctgcctgccaatacaggagacacaggttcaatctctggtccaggaaaatcccacatgctgtggaacaactaattccgtctgcca

SEQ ID NO: 33422 - DNA, 1628 bp, Bovine  19866880585091
  misc_feature (1)..(1): n is a, c, g, or t
ncaaagggaggacagttgggcacaggtgtgcatctgagcacgcagaggttggcacttggggaaagctgaggtctagtccctgctctgccaccagcccgttgggtgtccctgggtggaacacctccccttccctcagtttctccatttataccatgaagtagtggggtgaaatcatttctaaggccctgcacttgtgacactgtacatgtcattaagggttgggaacatctcttaagaggtaggcgggcttcccacatggtgcttgtggtaaagaacctgcctgccaatgcaggagacataaggagacatgggtttgatcgctggctcgtgaagagtcccctggaggagggcacgacaacccactccagtattcttgcctgaagaatcccatggacagaggagcctggtgggctacagtccataggatcacaaagagtcagacacgactgaagtgactgagcacacacgcatgctcagggtaggcagagaaagtggcacccagaaggtttcaacacaccaagaaaatgtggatttgccccaggcaagtatcataatttttgagtaaaagctaatcatgatagctactacttgctgagcaggaaagatatgcacgtgtttctctgtgccgtgtcatgtagctcttcccacatcccaagatggtagataggatcacattcctattttatagatgaggacactggcatgtgactcaaaagtggtgagtcacatgcttatacactggacttgtgctcagatagttttcaactcacctctgaactgctctttgctacaatgctttctttacaaatgcctaaaaccagtcattggagttggtgtctaatcctaacattcagggggaaaaaggcaataaaattggcattcacttgtagctgtgattggccaatcaatattttacaaaatattctcccagaacgatataatttgagaactggaaatgtgacaagagaatttagctgcaatcactcactcaaaaaaaaaagtaagtatatctttgccaagatgcttacattgttcagccaatgaagaagtaagacttaacaaatggaaaaataattatgtttgcctaaaattacatcttttgtgcacaccagaaagctgacatgcgtttcaattatccgccacgggaagacaaatgggtagatctacaaagtcgcattatggaacggtggtaccagagaacacctgattgatctgaatctggttgagatttgcctgaatggatctgaataacttgatttcatttcttgcttttccctggatgattctgggatctgctcaaaatgagtggacacagaaggcactgctcatttctggattttccagaaacattcagatactgaaaaacattgcattaatgaatggtctgtctcatggttctgcctaacaaccctactaatgaccatcaaaggctgaatcgaggttcctccaggcagaacacctggcccagctcctcacagatgccctatgggcctccatctccccttcgtcacacgaggagcattgtctgaatggctgcggaggtcccttctgattctgacaccaggaaaatcgaacaaatgattcgttttcttaaaacaaaataaaacaaaaaggcctgaaaatagtgt

SEQ ID NO: 33423 - DNA, 1829 bp, Bovine  19866880684911
  misc_feature (1)..(1): n is a, c, g, or t
ntctgaaagagatgggaataccagaccacctgacctgcctcttgagaaacctgtatgcaggtcaggaagaaacagttagaactggacatggaacaacagactggttccaaataggaaaaggagtacatcaaggctgtatattgtcaccctgcttatttaacttatatgcagagtacatcatgagaaacgctgggttgaaagaagcacaagctggaatcaagatcgccgggagaaatatcaataacctcagatatgcagggaagagttagggacctgcaaataccctaaagaaacctatgtttccctctttctttctttctttcatttctctctcctccatcccgttcgccagaatgtattgggttctttttctgtatcaggccctcttcttggcactgtggatgagggatgattaaggcacagtgcctgccaaaggctagccagggagagagatataataactaattatcttcaagtcacaagatcactgtggaggtgtgtacaggatgacggatgaacccaaccacaactttggcttgggcaggcaggaagcaggggcctgagttggtccatgagagttgagtaaatgttctttggaagaaggacttgctttgctgtgattgctttgtgagagatcaacttccttctgacaagccctgagcaaggaagagacaactgctttgcaaacaaacacctcatgtattatttcctccattctcctcacatatctcatctcctcccctgaataatatgcctccctgtgtcacttaatttccacaggaagctggaaagagcaacatctgtctaaatttcccctaactcattccagatttccagggtcagaatgtggaccctgggagatggagacacagtctctgtgggatcataggtgacagccccaggactggtggactcccacagagcccttgtggcagccgggccgccctggcgccagttctctgcacaatacagatgttctgctcaacaagactttcactgggagcataatcagcggctgaggcagcccctggagaggcgagtgcaggcctcgttcccacgggctcctgcccaacgtggttcctgagtctgctgttcctaggagagagggcggccagcaatgctccagctcccacaccagctgctccaggaaagcaacttcctcatatggcttggggccgctcccagccacggggacattgtttcattcacagcccagtgctaatggcatttatttaggagacactttcccttctgctacccataagaaagcagcttggagcagagtaaggaggagagatccacctttagggatcgggttctagcccttggaaagctgccttctctccctgagtctcagtctcctcacctataaaagaaaatgggttagtccaggtggcatccaggggcaatgcatgctcaaggtgtgatttttagagaccagcagacgaggtctgcatcccccctgtgctgacctcatggtcctacctcggaggccctgcacctcaccaaccatggtttcctcatctgtgaattgagagaggtgggacccagtcacccccaaggtccctgagggctttataatgatgggagcgtctgccttccataaagcaactgaggaaaagcattttattctttcctcatggtaaatctttctaattctgtgcctggtgagtataagcagggtcagcacgaaagaactggcctccaccagttacccttctgccttctgccccacatgactgagtctctgcagatcaaaacaccatttttctaaagcaagaatcttagattccttagggtatcttcccaggtcctttaggatccagccc

SEQ ID NO: 33424 - DNA, 1247 bp, Bovine  19866880703823
  misc_feature (1)..(1): n is a, c, g, or t
ntgggaagtattccatctggtaaacgaatccaagttgtaatccttgtctgttttctaatctgaccacagatcttaaatgtgttgagtgtttggacagaggccaaaagacacagctccaagcctttcctatcacacctgccttccaaccagcagactctattgtgggtggagtcatctcccactagtctgataccagcagcagttctgggtcgaagctgcgttccctggttcactccaaaccccattcccctctggagccctgggggacatgactcatggaagagccataccctccagggagcccagttactagagactgtaaattgaagcagatggcaagttagatcctactctgcctgagccatcaacttgttggacaccatctcccctctgtgtctcaggctccccatgtgtaaaatgagagaatcagaccagacttctgcttcttaactttttggctgtgatccctttgaaaatagtgaatatctgataaaaacctttggactagtttaccaatttacacactctaactttctataggagatacaagactatcaatttccctgagttgggcaccagcagaaggagttccagattaaccaatatatgatttcaaatctctgatatcactttaacattcaggtaacttcttcacagctgctgctgctgctaagtcgcttcagtcgtgtccaactctgtgcgaccccatagatggcagcccaccaggctcccccatccctgaagccttcctaaacccttaaaccagattctactagtataagtccttttagcaccctgtaatttttcttcaaaatacttatcacaatcctaataagttatcttttttattatctatccatttcaacacactctcaacaccatgatgtcaaaagtatctgtcttatgacaaagattttctccatgaccaaactctagacaggttcctccaaaccctcttcttgactagggctcaaccatgggctgtaaaagctatagactcaacacaaatgattttatccacccatttcccctcacattaaaaagacttaaacactaacatagtttcaaagactatgaccctgggacttccctggcagtccagtggttaagactccaggttcccactgcagggggagcaggtttgattccctaggagggaatgaaactaagatcctgcatgccatgcagatcaggcaaaaaaaaaaagaaagaaagactatgatcccttaagtgcctgcctaagaaag

SEQ ID NO: 33425 - DNA, 1839 bp, Bovine  19866880749448
  misc_feature (1)..(1): n is a, c, g, or t
nagcatgtagtgggcacagtagccttgccggatgatgaatgagtggacctctgacccctgacctccagtccactcttctgtaagctgcacccactgccccaggacctttgcacttgctgttctcgctgcctggatgctgctggtgctcttcgccttggtatctgcacagctcgctccttcgtttactgctaaaacatcagctcctgagagaccttccctgaccaccgtctataaaacagcattcttcgcctcccctgtcagcccctcccaccctgctctgtttttccttaccgccttgtcagcttgcctgtgttctgttttggtccctgttgagtccccagtgcctagtctggtaaaccccttttgaatgtgtgaatggatgtttctccaaaccccccagatgctggtcttgtctccttccctgtctctctccctgttctgataacttgataccccagatcttctgttttcccctggtctgtgtccatctggctctcctgttccactcagacccgccttttcttcaggaagcccacagtctccaaatgcttataccaaaccttgactctgaagcccgcctgcctattctctccaggtctttctctgtctagctgaggggtgctagtcttagtgtttattccaagggtagctaacagcagttgagaaatcataatttaaaattgttctgggatagagtgcagggttttaggcccagaagctagaactctaagaacatggtggttgcagccattggagagtcagcctagccatgaggacccccatcttctgtcttcacagcccgatctggggtttggggaatgctgggagcctgccctgaggggggagtgtgaccagcacgtggcttgagacccacctgcagctgcaccccaggagtgcagtgtagatctgctttctgtgtcggggcttcttgtagaatttcatttgaattaagattaccacgactttatgaaagtttgaagatcactcttgaggcaattttaccaaattctaaaatgtcttattttacattctttccctcttgaagatgaactgactggaatccttaagaaattatcacttgagaaatatcagcccatttttgaggagcaagaggtaagaatactctttttgagtgtccatttaaatcgtagcataaaacagttgtctaaataggtaggttgtcattctttaagcctggattgatctttttcgttgagatggctgaagaaatagaatttgtgttcagcacatttggttcattcataacagtgaaatcctggggactttctggcttgtgttataataaaattttgtaattttgagctctgctctctgtagtaaagtttgtgtctgttctgatctcttttagttgaaggggattacctagccagtttttaggtttaaagtaagtaaaaagcaaattctaatgagtctgtgttacgtatctggacataaagagtctgtatcagtctaaaagagttcctatttgctctcactcaaaatcctaaaagcacttacaatcacattttaaaaaattactgttctgcagtttggcagtttctcaaaatgttgaagagaattaccatatgacccagtaatgccactcctaggtaggtatatgcccacaataatcgaaagcatacatttgcacagtgttcacagcaacactattcataatagccaaaaggcagaaatagcccaaatgcccatcaattgatgaatgagtaaataaaatgtgttatcactctaccttggaatgtagcttggccattaaaaagaaagaagtactgatacactctacaaaacagatgagccttgaagacactgtgctgagagaaa

SEQ ID NO: 33426 - DNA, 947 bp, Bovine  19866880798744
  misc_feature (1)..(1): n is a, c, g, or t
ntttatctcttccactgtgtctcttccttccctccattcatcctccctgcctttcccaataaaacaacctaccccagtggattttttttcctagtgggttttcaaatgaagtttttgcctgaaattttcaaagagacacatgctggagagaaaaaaaaaaaagcaacagtcaagagaaaagcatattcatagttcatagtatttttttctcaattctgcttgttgcttttttaatagcctagttgagttaataataacaactaatgctacttaattttcttaagcacttgccatatgttaggaattccctcaggtccttcagacacctttatgtggtgggtactgtcaccccttgattgacctgcagttacacagcctggggagaacagaggcagaattccaacttcagtcatctggctgtagagcctctactttttaaacacttcacccctctgccctcctggtaggacagggcatctgctttttatttctgtttaagtggattaaaccctgctgccatgtgcgccccttctgaagagccagtggagaggcaggggcacctggatcctggagtaacacaggcgctggcactgcgggactgagttctcaggctgctgagggtcgtcttgagacccctgcccccatggcccaacagacatatttgcaggtaaaaggctgccttttgtgtccatagacacggaacttgttcgactgctggcatctgtctgcatgcaggtgaataaagacaaaggccggcccagccacccaccacctctgccccactcgaaggtccgacagccctggagtgtcccggtgctgcctgatgacaaaggcgggctcaaggtttgccttttcctgtcttgaagagcatcagagagccatgcctggataggtgaagcgggaagatgcttgccacttcctcattacccagagcgctttaggacagg

SEQ ID NO: 33427 - DNA, 1507 bp, Bovine  19866880805081
  misc_feature (1)..(1): n is a, c, g, or t
ngagccataaagtcttgtttggaaaggacagaggaaagaaagacataaagtatgaaaaagaacctcaagctgggcctgtagaagcctgggtttaaaatctggctgtgctcctcgtctgctgtgtgacttttagcaagtgcccgcccctctctaggtctcagacacttgtctaccaaataagagggttgtgttggaacctctggcctttgagatcgcttcaactctgacgtcgtacttttctgagagaaaggagttgaggcatcatattttgctagccatctagtagatgaatcatttttattattcagaaatttttttgatgtgatcctgtatggcaagaaatagctaatagcatctcttttgccattcctgctctagtgtctagaaacagtcattaagtcacagcccccatttcctcacttcctgctaactcccctgcagtctagttcccaactccttaatcctttgaaactgttctcaaggtcaccatgacctcccctggcagactcaacagacatgtctcagacctttacttcctccctgcacctctcagaaacatttcaacacaggggactttcctgtctttcttgagatactcttctcctggggctcagagactttgccctcccagagacccatgtttcaagggcaggatttgtacccacagagttggtgccaaggcctagttccacagcattatttgcagccatttgccttcccattgtcatcattttactactaaactctagattctctgggcaagttattcattcattcactgattcatcagctgtttatcaagtcagctatttactggcactatactaggcaacgggaatacaatttacccctgcataacatgggtttgagcttcataggtccacttctatgtgagtttttttctataaatactacacaactacacaatcaatggacagttgaatctgaggatatggaactcaagagctgacagtaaagttatacactgatgttcgaccccagagggaatgggctcccctaaatgcccccggcctcatgttcaagggtcaactgtatagcaagataggagtcaggcattaaggaagtaagtacaagatacagggtgtaattacaaatgtggatgagttcgctgaagaaaaggaccagatgctgtgagagaagagagagcagggggaccggcaggatgtgcgaaaatgtcatttggaagaaggatggtggcaggaagatcttaaagtaggggaggagcgatacaggcagaggaaatgccattgtggggcctggttggggggggcgcagcattttgaaagggtgatctggggaacatggcattgtcctgtaccaacagcaccctgcttttacttggattaaggatttgggagtggctttggaggagcagatgaagactctttccattgtcatcattctaccaccaaattctagattctctgggcgaagtcgttcattcattaattatttattggagagtcatctatactatcctaggttt

SEQ ID NO: 33428 - DNA, 1230 bp, Bovine  19866880812643
  misc_feature (1)..(1): n is a, c, g, or t
ntggctcagcagagaagtcgatggcacccccactccactactcttgcctggaaaatcccatggacggaggagcctggtgggctgcagtccatggggtctcaaagagttggacatgactgagtgacttcactttcacttttcactttcatgcattggagaaggcaatggcaacccactccagtgttcttgcctggagaatcccagggacccgggagcctggtgggctgccttctatggggtcgcacagagtcggacacgactgaagcgacttagcagcagcagcagctggtggctcagatggtaaagaatctgcctgtgatgcagaagacctgggttcgatccatgggtcgggaagattccctggagaaggaaatgccaacccactccagtattcttgcctgggaaatcccatggacagaagagcctggcaggctgtaatccatggggtcacaaagagtcatacacaactgaatgactaacactttcaggcccaaataagaaaggactgttgtccactaacagaggctatgtgatgatgcccaggagtccggaaatctgagctttcattctgcatctgctgactctctgactttgaatcagttgtttccatcctgtaaacttaaatctgcttctctgagcaatggaactacctgatctctgaggactctctcccagctctaactttgtcattctgatgctgcagaatccagattcccagcctggggtgggattaggaatggttcggttgtacctgcaccccgagatcctctgaggcctttttcaactgcccctgccctgcctaggtcagtgcttctccagtgatttttctctagcatttcaccactactcctctgaccaagaaccttccagaactgctaggacagagctgaaatgccacctctgtctcaagctgtgtgggaaggttactgcccaccaacagcatgactgaggggtgttaaggtgacattcaggagtttgtcaaagcagttccaagagagtgcaaacaggtgctggcttgttagaaataatttccgtgtctcaccactcggaccacattagtcattcaagtgctgaggaacaatataaattcctgtcatcctggtttatgtgaccactaagatttattccaagtgacaggtcattaagggttcttctctttatattttttctcagattcactgaaaactcatatttctgctccatgttatagactgctaacagctctgtttt

SEQ ID NO: 33429 - DNA, 1489 bp, Bovine  19866880864948
  misc_feature (1)..(1): n is a, c, g, or t
ncttgtgagtctcttggactgcaaggagatccaccgtcctactaaaggaaatcaatcctgaatattcactggaagaactgatgctgaagctgaaactccaatactttggccacctgatgcaaagaactcactcactagaaaagaccctgatgctgggaaagattgaaggcaggatgaaaaggggatgacagagggatgagatggttggatggcatcaccgactcaatggacatgattttgagcaagctctgggagttggtgctggacagggaaacctggcgtgctgcagtccatggggtcacaaagagtcggacatgaatgagagactgaacagaactgaactaggtcatatacctgaatatctcatttaatagcaaaacaattagaggatagatattattactattcctgtttgacatatgagtaaactgaggcttacataacctataaagaatctgccaggggtcacacagacagaagtgggtacagtctggattcaaacccaggtctgtcttcccaaatcctttttgaagaaagtgaggggaaaagaggagctaaaaataggagtacaaaatgggaacaaagagatgaaaagacctggaaagagacccagaacaaaatacataactctacagttatccaaagggtgttctagattaatgagaaattcttgctgtctaattctaatcactgactcaaaatgtctgaggttgcatgcacttagagataatcgagttcaaaccctccaggttaaagctggagaagaagacctggagaaggaagtgacttgtccaggggaacagagaggctggtggggataggcaggaaccagggccccatttcccaagcagggctggttcttcctctcccctcgcccatacttcctttcttccctccaaaagactctgtgatgacccacaggcagctaaggtgagcatgtggctctgcccagagcacagtgatggagaatgctgggagccccgtgactaagacatctcaagagagcgtcctctccagcagggcctcttgctctgagacatccagcaaccaccacagaaacaggtcatatttgcccaaagtatccaccaggcgtgtggatgtgtgtcactgccttgcacgactgcggtaacctggaccgccacacccatgaacctgacagtggccaggagcctggcattgccttgggatggacaggatccagtgccacccccaccccccaggaaaagagaaactgcatgccttgtagtgacacgcttttcctacaaatacaacttaattaacctggcataaatttcagcctcatatctaatcatcaaccatctctctcacacatgcatatgcagaagaaaaagtttcaaagacaagacccatttatgatgggccaagaaaatcctggtttcccacattctacttcagggagagcctcccactcagcctctccctggactcaggagccccttcctgagatctagctgcccactcagtgcca

SEQ ID NO: 33430 - DNA, 3007 bp, Bovine  19866880871471
  misc_feature (1)..(1): n is a, c, g, or t
ngagggcctctggcctagagaggttgacaagacaagaaatgggttatgaggtgcgggctgtgttatttattgcttccctgatggctcagtgggtaaagaatctgcctgcaatgcaggagacaggaaatgctgattcgatccctgggtcaggaagatcctctagaggaaatgacaacccactccagtattctcgcctaaaaaatcccatggacagaggagactggtgggtccgtagggtctcaaagaatcggataagactgaagcgacttagcactcatatatacaatgcagaaacagtatatctgtggtaatacaatttcatgagtgtggtagaattaggaaaaatacaggtttcttaggagaatgataatgaaaaaaagattgaggaacgtatatggttctacatcacttccatatcacataccgtgttccattaataagtgaattacacagtgcagagaatagtctatcctgtatccaggtgtttcctactagactataagcttcttgggggcagaggactctcattttcttcatctcctagttaccagtgcctatcacaaggcgtgcctggtaccaagtaggtcctcacagagtgctacactgaactaagtgcagggaataagctgaggactctgaaaccctccatggcagtgtttctcacaatgtggacttgaccacgaagaggccaaggacttgggagaaaaatgcagatcctcagcctccagctcagcagaatccctctgcattgtcaacagggtgattctcgtactccatccccccctgccctaggcatctgctaccagactctggggcagatccagggctccagctgtgcatgggtgagggacaccgaggggctaagaactgggcagtgcccagcaattcggcgagttccagggacctgaatcacagggtgagctcagaatagacttctcccagcctgagaagccaggcaaggagaaggtaggaacaaagatgtgggtcccaatggagagtagctctggaggatttctgcgccccctactctttgagaacacagccccacttgctgtggattggattctgggggtcctctgcccccctcccccgccccctgaggctgagtttgaaaagacggtgggtgagtgagtctgccattgctcaagggatttgatcaatcccttaacttattcaaaactgggctctgaaacagagtttcacaaatgggaaaatgcatgtaatttgtgtaattgaaaaggagctctgactgccctttaggggaacaatgcttgctggacagagacagtctggaatgtgcaatcagttgcttctgtttcctggtgctacaaaaatagagatttgcgccacaaaggggtgaaaattcatcctggtgctaaaatcagttaaatttaacttttgccttttgctgggcttcttgattcatggttgctgcatcaagaggctaatattgtttaagtcgtgatgtgagtcactgggagcgtcagctcctccaactagaggggaggatcttcatggagtctagggcaggcaattcgggctctatccctgtcgtcctggtcagatcccattcagggtgcgggctcagatctgggcctcacctcaggggaagcccaccagggtatagccttgggggcatctggggagggtagagttctggctattggagaactgagaatgttcagactggagagcctgcagggcgctggggaggacagaggagtcctagctgcctgagctgcatggctctttgagagccgttgccgggtttctgagatgtgggtggggagatgcaggagcatggctgaagtgagagggaagcagggcttccctgcagtcacgcccttgctgctggaggcatcgggcacagagcaggcttcctggctgcgaagtagtgagttccctgttgccccgttgccccgcacattctggtctcatccagtcctactgttagggagatttaatacccagagtaggcatacaccaggttgctgactgtcacactatatggtgagcgtcttttatgagggccaaagatgtgctcgtgttagtgcaaatttccgggctccacgctgagcaggtccaggttaagggattcatcacatccttcaaggatggtggaccccactcctcacccccactgtcgtttcaggtggcacagatgcagttggtttctgggaacttgctaggccaggtgatctctaagtcctgctcgtttcccaaacctcagaatgctgatgagtgctgctggctcacacaagtttaatttacgcagccccggttggaaagaggacatggagacagcaggtgctgctgctggggccagcatcccaggacaaagccctcagcccatggcgtggcaagaagttctccttcacctcgcccctctctttgtcacccacctgctccttcatccagcggccacttacaggctgtctcctcagtccgtggtccctctgcctggcagagcttgctcattcttccagatgcggtttggccgcttcttcctctgtgaagcttcctgttccttcccccgtgctcccttacctgcctagttttcccatggcgtttgctgccttgtgcctgcgcctccttccacccccgccctcaagcggccagaggtcagggcctggtgtggtcctgactcagatcctgagtggtccctggagctggatgcctgacttctgcaccttaggctcgtccctaatgatgagggcagactcagattcagactcagagggacccgagggctttccagctgcagccccttggtaaaaggacatgaagggacatctgaaatgatctctggcttggctttagcccacatctcgcatttctggccctgatgctctgtaactgatatgcttcctttgaaaatgttttcagacctgctcagaatcctttcctcggagatctgaaggtggctagcttctgactctgccttgcacagttttggagatgttctataaacctcccccaatgtagtctgtccccctaaagcatggag

SEQ ID NO: 33431 - DNA, 820 bp, Bovine  19866880875609
  misc_feature (1)..(1): n is a, c, g, or t
ntacatttttatgttccctgcttgtttttataaattgtgtgtgcaagtattttccagaccattttttaacttaatactttatcataagtattttctttgatccttcattaacttcataccatcatatttaatggttatagaatatttcttcaaggcttataccccaatttattttaccatcctctctcccctttttgaatatttgggctgcttccagtttttcactaagcaactctttgatgagtatttttttgtatatggctttttccatatttcagggtattttcttaggctagcttcccagaaggggattatggagtcagagtgtatgaacattttttatggcttcaaagcatcttttgaagaaggtaggtgttccatttcatgaggttcacaaacataaaagaggaaactttgtttcaaaaaaatcccttgtaacacatgtacataaaaatttgggcaaagagctgttttaatagttttttaagttattaaagcttgcccttttaaatttaaaagttacttttgattctatttgtttttgacgagagtctttgctaagatgttttacacttctgagcttttctaaaaagaacccacagagcacagtttaaacttttcttgatgactcacgtggtcagtatcaccatcagctgtttccctggactgaacaccctagggctttcaggaatttttcaggtggagaggctactgctctccttcacaaaacagccacagaccaggagcacttctggaaatctgtcccaatctctagtttcatggctctgcatctgagttgctggctacttgcagtgagctg

SEQ ID NO: 33432 - DNA, 2818 bp, Bovine  19866880878965
  misc_feature (1)..(1): n is a, c, g, or t
ncggggcatgagggagccaagggtgctttctcagtgaaaagacagtgagtgatgagagcttgctctggcaagatggactggcaggtgggtggaggctggactgtgagtggggagaaggggcatcagtgaggggcctgatgccaccctgtaggcaaggaagaatgaatgtcaggtcagggcagagagaggggtgagagatgtggacttaagattggccactcctggccacggactgatggtggcaggaaaggagaggagggaggagttagagaagactctgtttttgagtccaggtgactgggcggatggcgatgccattcttggaagctgggaacatgcaggagtagacgggaaaagatgctgagtgcaggtttgggtatagagagccctagggagagacatccagcagggaggaccaggatggggtcagaggcaaggtcgggcttagaggacagaggcaggatggcctggtggttccctatgcaacacccctccccctttccctgtaccttctctcctttcattcccggaagaccagatgctccatcaagtccaggttttccctcggggccctgaggaacatcaaggacaatcagcctacaatatctttgataagtatcaaatacgaaccctctttggaaaaggaggccagagctgagaagacccagcgggtgaggcgggtgggtctaaagccttgcgtcagtctgtagcggaacaactgtcctggccacagctcggccactgctggctgtgcgcctgtagacgagtgtccttcactctctgggttgtgctttctcttctgcagggcagtcgggggcagggctggactagacggtctctggggcctcccaccccaggccgagcactgacggactacgtttccaaggttttacacagattaagatgaagcagtgaaacaacgtgtaggacgatattttccttggctgttgcttcttatctggagtcttagtaatagcaatgtcttggctgaggaagattttgtttacaagtgccagctagctgctcacacctagtcataagccttagcactggggtctgcagtctgtaccccctccctggctaaaggaagccccatgggtaccgagagggggcggtgacttcggtagctcaccgggggaccaggttcaccagtaggtccatcctctccaggagatccagggggtcccatgaaaacatcagttcctggttttcctgggatcccaggtaagccaggtgggcccgggagacctggaggaccctaaaaaaagacaccgtgttaaaaaacagggcaggaggggacaaatgaatatgttccactcactccattgttgaaaacgaccctacgggtacagactggtgttgctccttagaagatggggaaactgaggctcagtgagatgatgtgacttgcctaagagctcacgcatacagctaattaggagaagagctgagatttggacccaagtctttttaagcccattatataatgttttctgcccagatgtatgtatacgatacagatgcaatttgttggaattcttagaggtgctctactttagttttctgattacctgagaggttagtctaaaactgcctattgttataaagtgaaaaggttagtcactcagttgtatccaattctttgtggccccatggactatatagcctgccaggctcctctattcgtgggatttcccaggcaagaataatggagtgagttgccattcccttctccaggggatcttcctgacccaggaatcgaacccaggtctcctccattgcaggcagattctttactgtctgagctacagggaagcccaatatgaagatggaagtactgggggttgaacccagggcctcacgcatgctaagaatgagctctatcactgagctattcccctagaaatgaggctttttcaagaatctctagtttgcattttaggtacattcctcaggggttattttgtctgatactattgataaaaatcagtcaaatagaagaggctacagatggaaaaaggccaaggcaggataggtggaaaacccagccacaatatgcccaatgaggaaaatgtctgaaattcacaataacagacacaataacagacctacattataatcagctcaaacaaagcttctcactttcctgtccccattcttttgtaagcatagctgttttttctaactgaaaacaaattcaagtgaacagactgagtcagcctctctccccaggctggaggtgcacacagacacctggtggctcatcacaggtaccctggctgcagccatggcctcagagatgagcagagatctgggccaggccagtcagactccttgggaattttgttggatttattgagggaaaggtattccattttttctgggattactagctgtggggaacgaagagttgctagtggccaactttgcttccaaatgagacaagcctgcctgaggtgcctgacaacagaaaatcaacagagaaaaaaggaaaacagacacaaggagaaatgaaacttgacgacatcatttgagcccctggatctaactctacctgaagccaaacacactcaactttagttactgaagtcagtaaatcctctgttctcttttgtcccttaaactatggctccttctcttatgaagggctcacatcctgataaacccattgtaagccgaaaacatcataagttgaaaatgcatttaatacacctaagctattgaacatcataggttagtctagcctaccttaaatgtgctcagaatatttatattagcctgtagtttggcaaaatcatctaacacaaaacctatttca

SEQ ID NO: 33433 - DNA, 1131 bp, Bovine  19866880882917
  misc_feature (1)..(1): n is a, c, g, or t
ngcagctgtcttaggatttcaaaaggtgtaaagtagccttagaacgtgtctctcattgcgacaacaggttgagtgattctctttgttccaaaagcttcaggggctcagactttggatttccaccatgggaagacatgtactttctgtcactttctcttgagaattgcatagaatccatggtatcgtctgtgctgttccctgatggtgtaagcttataactgctcgtaaagctgtgtacccttaagacaattcattttcttaatttcacgttaatggaaagaatggaagaggtttatttctggatcagaaacaacatgctgtggtaaagttgcacaggccttaaaatcaaactcaggtttgaatccagcaggctcactggcaatgaccttggcataacctccttcaatctcagtttcttgatctgtaaaattagaatcatccccctttccactcaagtgtgtcataaacgctcattgatatgacctgtgtcagtttccttgcacggttgcagaattttaggtggaccataaacagacaaagagagaccacaccctctctcaatttatgttcctggcttatttagcccagcatatggaagccgggtatcagccagcaaagcagatgcagcagatgactcttgtctttagctcctggggtccctaatgaggggtgctcagctgcctgtgacactagtcaggtctcactggctcaagaagcttaattttgtgctgccccatagcccagttataattggggctgacatcaccactcgcgaagaacttacagaaacattctctgtccttaataagaaatacaggcctcgaccctgtattcctgtatcccttctgacccttcagataaacagcctcagcaaagaccagcatctttatgggtggggcatgggagcagagccagggccaggcaccaagggcttcatctcttcctccatctttccaaccaccctggaagaccctgtccagggcacatgggtgtttaataaatagtcatgatgataatgatggtgcatatcttggccttaatatacatgtgttggtttcattattttgtgctcctcaaattatccagataaagtcacaacccgttctaaaaacaattagcttaattttgcat

SEQ ID NO: 33434 - DNA, 1412 bp, Bovine  19866880893403
  misc_feature (1)..(1): n is a, c, g, or t
nacgactttcttccttttttttgcttttctgccctatccagtctgtccttcctgccttctcgatgccgtaaacttcagtggcaatttttctcgttgtcaaaaaaatctttcctgtttgcagatggctggctgcttttatttcatgtgttctgtgctttctgaggagctggctgggtgtggggtctctgcctcaggtctgggatggtgcggggaggggagtggccagtaggatcagggggcaggtgttttccatcaaaaccatgtcacctgttccttcagcctgtcagtgtcttgtgatctgaaaagcccctgagagatgcagggagcttatcgttatcacaggggccctctctgcatctcagagagagcatggtgttgggtgcgggagcagacccttccccactgatgcaaacttggttcaagattttttttttttaatccaggaaagtaaaatgaaaattgaaaaaaagggattctcttggagctgaggccccggcagggatgccagaaatgttagaatttctccggtaaaaaccagggatcgaacagctttgagatgcccattttctgatcctttctctgcctcagttcttcacagtctttcttgcctttattgcttctgcttgtttcttttctcactctgtctttccacagcctgcatctctcttgtccttggggggtaaacatggtaagtaccgccatatactcatattttctgtacagtatcctatactgttcaaagtgcagcaacattgcaatgaactttctatcagcaggacttggctttctaccactctggtcacccagattactgtctcagacttcccttacttattttgttttcagagtctttctagaatgcacttctaaaaattccagggtgagagctgaggacagtttatttttaatgatattttcaaataaacattcagcataaagccgggaattgaaaagtagtaaatcatcattaattcactactaataagcactaatagctcataatcatgatagtccggttgtggttgggaaaaaagaggtgtggcactgagcagatggtagcaaatccccctctctctccccaggtggatatggaagcattcctcacactcaccgacggcgacttgaaggagctgggtattaagacagatggatccaggcagcagattttggcagcaatttctgaactgaatgcaggcaaggtattgttcccaatctttttttttttttctgtttcgaacagctgacagcttcactaggatccttggccctggtgttccaaggaccttcgtggtctgatttggtctcccgcacatgcctggtggaggcaggccccgctcacacacttctcaaggccagtgggtcactaccttccagtatgtctattccttttccaagacctctcttctcataag

SEQ ID NO: 33435 - DNA, 2126 bp, Bovine  19866880899266
  misc_feature (1)..(1): n is a, c, g, or t
ngtatataaaactcctgcataagcctcctctgaagaggaacgtaatttactggagaggagaaggggacaggaggaaggggtgcccagtgctccactgacatcttgttctctttagggtgaagctgaggaggggtttcctggcccccctggacctgctgtgcctactgaacccacggtgagattcctacccatgcttgtcatgggcacaaagtgcagggggccagggatgcacaaaacagccacagaggattcgtcccctcaagtgccctgcagtcagagctcagtgctcactcctgtaccaggactctctcctggagcccagcagttttatatttataaagctcctttatatcctgtgccctgaaaggcccctgggtccctcaaatcccaagctgaacttgtcaccatgctcctaggcctgctctccctgcagggctcccctgttctgggaatggtaccccatcttcctgatcaccaagagagaagccaggaaatgtcctcaagtgcctccccccacctccctgatccagtcagtccccaagcccctcagtctagttgtgcaacacctcctcatccctcagatggggacagcagcctcctaactgtctctctacctccatgtcatcgcttcccttctcccacccacatgcacacaacctgcccagactcagttccaacccctaacccagatcctccttgatgattgaaggaggctttgcctggttcccatcctcaggaattaagtaccagaaaggtgttttggaagtttccttttgttctttggaggaatttgatgacattcaacaagtagacattgagtgccttcctggtcccagatctcatgatggaccctgggcacccagaggtgtctcaggactgggccaattctggagtcttagcctagtggggccgacagatacacacaactgagcttcaaagccaggtggccctacggccaaatccagacttccacagaggctggtgggaacacagagcaggagagatgaattttgtctgaaaatggggttgggcagggcttcctggaggaggagaccatggaactggaccctgaaggatgagtagggattggaaatgcaggaaaagagaggatgagaggctgtgaaagtgtcctgtgtttgagcactggctgtatgttggctgcacagctgggaaggagagaaggagggcagctgtagaggggaccgggcaaaagagccagaagggaagtcaccagcagcagttacaggggcacagaatactggaaagctttcagtgacatgcctgtccttggagaatgatggtgaaacccagcatgggaactttttctctctgcaggtggaagtggaggctgagggctccggcctgggctggggcttggatgtcagctctggctctggtgacctggtgcacagtgaggagctgttaagagtgagtatgaagggttaaaaggcctggtgtcaggtagtgaggggagggcagccttcatgaggatccaggaggggggacacagggattgataacagatgaaaccagcctggcctctgtagatgactgctgaggctgacggtgggctcctgggactcactatacttcccatctacatttatgtatgcctggcatttccatctttggtcagttttaagtgagtctgaccttagtttatagtcaggagccccactttacacttgcctccttcccctggcagccttctccagcacctcttccacagcaggtatgcccatgaccttcacttctaccactggctctaccctccacccccttacccatcacagagacctgctggcctcttctctacacagcatttcacactttgacttccagacccttctcaaaaccctccctaccctgaggcagccccctttctacctctgcagaccactctttctgcctcctcggcaactcttggtcccccagcctcttgcccaaggctgggccaccagagcttcctctagatttccccctgggagcacctctcctctcacctggatctcatgcatctgtgctcagagccgcaacctcattccatcccttcctctgagcccctgtcaagaatccccatctagagggctctgctcagctgcctttctgcccactcatcatgacag

SEQ ID NO: 33436 - DNA, 2792 bp, Bovine  19866880907096
  misc_feature (1)..(1): n is a, c, g, or t
ncaccctgtggccaaggagtggtatgttctaattggtcaaggcctaggattactgctcatccctgacccaatcatagtggcaactgcctgggattacggtaattgttaaggtcagtcatggacactcaaatgcctagagcccatccaaaccacaagggtaatcccactgtgaactttcacaagatagtatttaccacttgctcctgggaacacacactcatattttgtaattctagcttcttgaccaggtaatgttcaattctgtttcaatttttaaaaatcccggtctgagccagtagattgacttcactactcactaacggtttgttgcccacagtttgaaaaatgccactcttcaggcctgcacaaactgctggcattgtttaaatagctgttaaatgcatcataaattctccaggaatttaagggggaaatgtgtagggaagtggaagttgggttaatagagtgtacaaggtcattaagtggatacgggtggtacttgccacttgtgaaaaggccttgagagaagacacttttgagctctaaggtgggactccagcttcaaggagtgagacagtccaccagggctattcccctgattaggttggacttgggctacaagggactcatctggagtgccaatatgctcatgccatacagctgggtgccctgagatgttttgttctgtgatttttcttacccagaacccactccaactagactagactttgtcaatcctttggagagcacagggaacacccaagatgctttttggttatgtgagggccaagctagtctgagcacctactgtgtgccggacagtgtctgtgtatgtagaggatgtgcgggaggagtgagaacaaacaggccatgtgcgcatgtatacaaagtgaaatgacatacgcaagtaaatagtgataaagacaacatttggaatagcagctgagatggagagagaaagctacaggggagagacagagacggtctttctacaggtacagcaatattttatttcctaatctaagtggtggattcgtggctggttgttttgttattaatatttattaaacattgatgatgcaatgtggacacattgtctgtatacacatacacacacctattggtatgcatgacaaaaaaatatagtaagccatgaactctacttaatgacttcacagatttgagtggaagacagccataatcacaatgaatatatatcacaatgaaatcataagaaatataaagaagcaatccattttggctaaacatatgaacttgggtaagttactttatttattgaagcttcaggcttttcagatacattttacagatagacaaatagataccagatagataaacagataacgagataaatgacagatatatatatacacatacatacacacacatatatattaggtttattgtgagagtcaattgatatgtgatgcatgaaaaaaatctctgacaaactgtgaaactgtaaaaaatgtgagataatattttcactttgggcatatttgcaactgtctatttctccttctgtgaaggcactaccccacagttttgtacccgagtggtagtctgaaggaagcaggctgtaagcaactgtaaattattctcaatctaacatattttgtgtctagcacaatgaagaagcaaataaagatgacatcggctaccactgaatagcttgcaattatccgaacaaggacttggagtttaagagctccatggaggccagggattagcaggcttttagggggcagggggcagagctgagaggagagtgctgcacttcaccttccctgggggctttttcggtccagccggcagattcccgccaccatgaccacacggccccgacaggtgctgcgtctccccaggtctctggcctgaacgtggacataaatccctcccccagctctcctgggcctcagggacactggcttccgatactgccagagtaggctctctttcaggagtgctggtcctctatcgcatgtcacacctaacaccagacaaacggccagcccagctctgcaggctcctactccaggtcctgacttctggctccttgccatctcctttccaccttaaggtcccagaggcctgttctctagaatgaggttagaatttgttattaaagcataggagttcaggttcaaggaccccatagacaaactgatacctgaaatgaggctctgaaggttctctctcttgggatagaatatatctcagagctcggggaagattgagaccccaggttagaatcaggtcatttgtgagcccaagtcccagctggacaggtggcacattcaatggggtcatttgacgggagtttaaaaaagggttatttttcaaagggtatggagaaaccacgagggagaatacagaaccctaggggctcacggaggcactggtaacagaaggtgctgtcaccagtccagttggaataggggaggggagcagaactgttggtgcctagagagagagtcatgtgcagggagctgcttgacaggagctgagcttttcaacagagggaggcagccagacctggagaaaccacagacatggaacctagcaaataagtaccctgagctcactctcctcccttcctcccatcaccacttggccaaacctaactgggcaccacagggcaagagaaccctactgctgtgttcccgtggatcagcttgcagggcacagagccaggtggttctgatggaataactggctcacacagcctcattgtgaaactgggaggcagctcaatgggggccagtcttgag

SEQ ID NO: 33437 - DNA, 1535 bp, Bovine  19866880999896
  misc_feature (1)..(1): n is a, c, g, or t
nttcttctgtgattcttgcctctcttcttaatatcttctgcttctgtcaggcctaccatttctgtcctttatcaagcccatctttgcatgaaacgttcccttggtatctctgattttcttgaagagatctctagtcgttcccattctgttattttcttctgtttctttgcattgatcgctgaagaaggctttcttatctcttcttgctattctttggaactctgcattcagttgtttatatctttccttttctcctttgcttttcgcttcgtttcttttcacagctatttgtaaggcctccccagacagccattttgcttttttgcatttcttttccatggggatggtcttgatcactgtctcctgtacaatgtcacgaacctcattccatagttcatcaggcagtcttatcagatctaggcccttaaatctatttctcacttccactgtataatcataagggatttgatttaggtcatacctgaatggtctagtggttttccctactgaacggccgagaggagctaccccgcgtccgaggtcaggggtagtggccgagaggagataacccggcgtttgaggtcaggggtggcagccgggaggagataccccatgccccaagcctgaggccaggcgccacgggcggggaggagctaccccacgcccctaagcccgaggccaagggtggcgggctggaggacctaccccaggcccgaggccaggggcggtggccaggaggaccaaccccacgtccaaggagccgtggctgcacgggcgcaggagggcctagaggagctgtcctagcacataaattagtaaatttcttgtcctgagatggtttttgtgatcatttttaaagttagaccagaattcacttctcttgtttctggtgtttacatactttttccctcccattcttaaaacttaccagactcatctttctgaactaagatttgtaaatcatttcttcccattcatggccccctttcagaaatgtttaccagttcctctttctcctacagctcttcactggtcatctggagcttggcattcagtactcctcacattccgacgcagcttccctcctgttctactgttttactacacacgtccccattctgcttatctaagctggttccctaaacatgtatcatcgatctccttccttctacttttgcttgtatattcctcctatctaaacaccttaccttctcttcttctttagtcctgtcccttctgtaaacccagtataaattcagcttatcttttaaagcctaccttgactgttaggagtttctggatccttttattagtttcctttttattatgaattactgatttcacaaatttactctgtatttcctcagtgagattttaagtttttgggtcattctttaacacctatcctgggttagaaacacatactaatattttgtattgaatactgtttatttttatccttaggtttaccattgcttgttcagagaacaattgcgagaactattgtgttacaagaaagtattggcaaaggtcgt

SEQ ID NO: 33438 - DNA, 1157 bp, Bovine  19866881030255
  misc_feature (1)..(1): n is a, c, g, or t
ncttcccttggaagatggaagactgcacagactgcttttctcattcagattttatgcctgagcaaaaccccttgtgctgtgatttattatagcaacactgatttttccaatttcaagacaacaatgcaacttgaaataaaacggaaagaaaacattgaaacatttgaaaccttcactttagatccttattacgtcttgcttgaactgttccaggcctgtatcattttctcctcctttctccagtctcccctcattccaactgactgccagagccacctttgtaaagccgaatctaagcatgccctctgtgattcagaacccacagaaaggttcctggtcccctccaccagtacttcctaaatgacattcctcatatatatgatgtaactatgcgacatcctgcaagtgaaaaaggagttccatggccaaaggagttttggaaatgctgacttaaaatatttattattggacttccctggtggtccacgggttaagaatctatacctgccaacacaggggacatgggttcgatccctggtctgggaagataccacattccacagagcaactaaacctgttcaccacaactataatactgaagcccgtgcgccctagagcctgtgttccacaacaggagacgccatcgtaatgggaaacccacatacctcaactagagaatagcccctgtttgctgccactagacacagcccatgcatagcaacaaagaaccaccacagccaaaaataaatatgtaaattatttattattgggactttcctagcggtccagtggataagactgctctcaagacaggggccccaggttcagtccctggtcaggaaaccaagatcccacatactgcagctactgagcccacgagccccagtgaagacctagtacagccaatatacatataaattaattaaatatttattattaaaaattaaagttaaaaacttctggttaaaaattgtaaactgtaggacttcacagagcctttaacatgctaaagcccattgtacttttccaagaggcagattcatcattttgggcatttcttaagacttttggaccatgaaatctccccagtctctttcatttgggggggtacctaatagaattagtattccatgatgtatactcaggggaggatgctg

SEQ ID NO: 33439 - DNA, 1453 bp, Bovine  19866881037564
  misc_feature (1)..(1): n is a, c, g, or t
nggaaaccaattctaaggcaaatgtggaaaggtacaaagatcatttcaacgtcctagaaatctcaggaagtgctctgcatgctaaatatttatcccaaaacttctggaccaagactgctaaccaactgcagaatgccccagcttataataatcataataatataatagcataataagaatttctaaatgttagcattcattgcattcattactcatacatcctttcatccagcaaatattttgagtgccattcatgtatcaggcacagtgctaagtactggagccacagaaaggaaagtggatgtgcctgccctcagggagtgcatatcataatgtgagagcccggcggaggcatagaccgagcacggaactcatgggaagagcattcaggggagtcttggctgagttctctttccaactatgatgagcatctatttctccatgcaccgcacctgcaccctggaggaatcttgagatcaggaaagttaacagctggggagtgactgctacaagacacagtgtttcttccaacatgatgaaactgttctataattaggtagtggtggtggctgcacgaccttgcaactatactaaaaatcaccgaatttcacaattgaaaggggtgcattttatggtacctgagttatatctcaaactttaaaaaagttaacagctactttcaacccacttgaaatatttagcaaattctcccacccacacacctggcccttcttacctgttctccttttagtcctggaaatccaggtacgccagtgtcaccttttggacctcttgggccctagaaggagttattggagagtatttggttgtttgttaaaattaaaatgctttaactaaacaaaggtttctttctttttcctccaaaagtaaaagaacacagagtgtcagtggaagtcacagttacgatgttttcctaattttaagtggtctggaaattgtggtctgggggaggaagacagcatcgagtgttaggagccctagaggccccatttctctttgaactatggtttcctccaatgggcatcactgaaacggccttgcctgctgcctctgctcacccatgggtccttggggctgtcctgcagcccacttgccccatcatccatcctccatgattcccaccccttctctggctccccactacctaaggaatgggatctagacaccctagtctgacatccaaagtaatcccagctggtcttggcacttcatcctccactcccgtcgctccaccaggggtgagcctgtccccttagcctctctgcacccacccccaacccccaccaatgcctccactattccctctgcagaaccaaattctgcacatccggtgagaggtgacctcgtctcaactccaacagacacttaagatctgcgacaatgactcacacagccagacgtctgtccccaaaaagagtttcaacacttttta

SEQ ID NO: 33440 - DNA, 912 bp, Bovine  19866881088196
  misc_feature (1)..(1): n is a, c, g, or t
naaaagtaaataaagagaaaaaatcccttattaagatataaaatattagattggggctcacctaaaaccattgggtgtgccaccaattcacataaaacataaccccatccacatgcaaactccttgctggtttgagaatcccatccttgaccctggcggacgatcctcaagatttccttgaatagctccagtgacggggaactcagtacttagcaagattgtgattcattcttgaataccttattactaaatatttcttctttattggttcatattagcctccctgaaagtcatactttgatctgagctttcttattttttaacaagtattaatatttgtgtgcttcttatgtaacaacttgagtgcttgttatcttactgtcttatggagggaagtaaggatgcagttacggttcagtgtgatagatctgatgggggtggggaggtgcacttggctcggactggaggtgtagggaggtgtttaggaaggcttatttgtgggggaatgagagagagcctggtatgctttggaaagtaaaaggctggagagtgagagtgagaaaggaggctagagtggtagaaaaaggtgatgcatgagctgactaagtgggtattgtaaccctcatgttccattagcacaaggacctacttcctgtagaacattttcacagttaagttctcatttcaaaaaaaaaaaagagccctggagagttgacaggacttattctttccatttcataggtaggaagactgaggtttaatggattgctggtgggcatgcagcttacactggaagagctgggtcttgattgttccatagtcacactgctttccttgtgtcctagccgcaggctcactggtccaggatgaccttctctgtccccctaagaagacttcacattctggaaagca

SEQ ID NO: 33441 - DNA, 1073 bp, Bovine  19866881091585
  misc_feature (1)..(1): n is a, c, g, or t
nctgttggagaaaagcctgggtgcgatgcagtccagggtccctggcagactacacgcaaggagagagaccatgcgacctgcgtggagggcccacctctccagccagggtcagttactcctgggcacatcctctctgcgaggataagatggaaccagcatgtatctgtgacaagggggtcccacaggaggggagggtgagggggtggttgtgctggcagtgaggaagggcacttggcctgctgcccccgtactgagaggcagcgggagcccctccactcgaggaggcagaatcctcccctccccaagtcagcagggtaggatccagctcaggactcagaggctgttaggtcagaagagccttccagcttctccctctctgggctaaaacttgggggtcccaggagagaccccttaccccttgagttagctaacgggaggccacaggttccagaggaaggcctgtcaaagtggcagagggtccaaggtcctagcaggtgctagctgggggttagtaatgttgacaagacccttgacctggagcttccacctacacaataagccaagacggtccctgcttgtctattctccttgtccacaggggcctgtttcctcctgagtcactcagtttccagctaagaggcacagataccattccaggatttgtgtggatggccaaggccttcctgcctggagactcctggaaggctggagccagaagaggcctcagggactagccagtcccagctgtgcccattctccccaatggccttcacttgggagaagtgaagacttgcctgaggctctgtggggagctctgggggcttgacagtggcttctgccttgaatacgcaagtgcttacacacaggggatgatctggattcccagccagaaaacccagcaggtttaaaacacttttcctaaaacaacccaccaggatcgctcagcagcatcactaggtcaaaggctgtgtacccattttttgcacgaagagtaacatcagctccttggtttagcagatatttgacaatctctttgttcctgtggaagaaagaaaaagcctgagtgagacctg

SEQ ID NO: 33442 - DNA, 1396 bp, Bovine  19866881111196
  misc_feature (1)..(1): n is a, c, g, or t
ntctactttacattgaaatgtttctttcatcagtagctcagctgtttttttaagtacattgtttgttttcatttccatctttaaatggttaacttatgaatgatggatccaaaaactattagctgaatgaatctaagttgcttttcttttttcacaaggcatgttttttaaaccataaaattgggtttcaggcatcaaatgtggtctggtgacacagttcgagtaataataatagctaccatttattaaacgcctacctattctgtgccagacaccttggtatgcatcatcttaatcttcatgactgcctgaaaaataggtgttaggatcccagtttttcaaattatgagactgtggtccagatggattaaatgacgtgcctaatgatactcagcagaggcagcaacagggcccagacccaatctgtctgaccccagactcctacatttgcctctcctccacatgcgtctccttggagatgcccttataggacttataggaggaaagggtctttcaaaagtaaagaatgctactgatggtcaacatgagaaagaggtaggatgatttggctaggatcccccgctgaaggagagatgaagtcggttctcctttatcaggggagagagtctggcctggagacagtctggctaaacctttcaggagtcagtgccaaacctggggcaggggctggagaaggggacagggtggggggagcccagcagggcctgctcttcgtacagtctgaggacagtaggaggatggggatgtcgccatgctccatgtcgggctggacaggtcctaagtgtggataggcagaaaatttagctcataactgagaggtctccagaaggacacctccttccatttagaggtttcaaaaacactaagatcccttacaaagaggatcagagatggacaagaggcacagtttaggaacagagccttagacggggaagcatcctatcaagtgtctggtccaaccactcaccaaaccttaggggtaatggcgagttttggagtcgggctgaccaatcattagtggtacagttctgggaagtcactcaccttcctgagcttcagtttcctcacctctaaagagggaataaattattcctctttcacatcaaggttgttgtaaggattaaataataaaaacagctaatatatattgagtactcacatatgcaggggactcttccaggaacttcacatataattatctccctcattaagtaagatgatgcacagtactagtcacttattaggcaaacaactaataataatattaatagtaataataataccatcgaagatggcaagagcaatgcctcatgaggctcccactccattatttcattgatgggatttttgtacattatttcttaggctctaccta

SEQ ID NO: 33443 - DNA, 1497 bp, Bovine  19866881193320
  misc_feature (1)..(1): n is a, c, g, or t
ntgtcttttcctattttatatttttgcctcctttgtcaagattaattgattgtaattgtatgtgggtttatttttaggcttcctgaggtcttaagattgaaggataaagggctggttccaagactgactacagacacaataagtaaatgtaacacacggtccttgactgggtcctaaaaggacattactggaccaattagcaaaattaaaaaataggtagtgtattagataatatactgtatcaatattatatttcctgaatttggtaggtatctgtggttatataagagaatctttttgttcttaggaaatacatgctatttagggatgaagaagggccatgatgtctgaaacttaactctcaaatggctcactaaaaatatatgtacagtttatattttttcattctctggttgtatttttctcctcttaccaccatctggctgattctctcctggagtttctcagctcactttcctcagagaaggacgctcgggttgaatcctctctaccacccctctgaggcagagcactttgcactaggaaagtgcataggtctctgacaagcctctggattggctgcctaagttcagagtgtctaccccttgtaaaatcagctctggcccagagtgcgtcatgtggtgcataacatggctgctaccactgcttcctccctggaggtggtgggcacgagggtctccttcaaggggtgtggcaggccccatgcttggtctagccaccagatactacatttccaactacccaagttaattccagagaaacccgaagcctcctgccctgactctgcctcattcttgccttcactcttttaacacatgctatgggtgaatgcctgctctgggccaggtcttatgctatgtcctatggcacagaagtgacccagtccctactctcttcgctctgattcaagtcggaaaggcataaaaaaactcagataactgaagtttagagctaatcacaaccaacaaacagaaagcagtcaatgctggctgagggtggagccccacggaacacaagagatggggttcaaaaggcctcctggatggtagtactggctgtggctcatgggatggaaatgggctatgaaacagggacctgcctgttaggagggtgtccggtgccatccctgggtttctgttttctcttcacacagccggacccagcaggacgggacatctccatccggcctctcctggagcactgtgagaacacccacatgaccatctggcttggcatcgtctatgcctataaggggcttctcatggtaggtgcagagctacaggcatagtaggggagatatttctctggcagagctccctctctaggggtctccgtcaacgtaaaagtaagcagaacccccaggactaagcccttgctctttgccactctcagtgctgggcacgtaccatttcaatcccacggcaaccatataagatacatacaaataatatccccatttcactgatgaggacgtcg

SEQ ID NO: 33444 - DNA, 946 bp, Bovine  19866881202731
  misc_feature (1)..(1): n is a, c, g, or t
nttatcttcccttctctgccactttctctactgttaaaagagaacaagtttttcagatattttcccttactaaacatctatttgtgtgttattttcccttccatcccattcaggcaaataaaatgtcattgtactgggtgaggtatctaatgcattgtttggggtctaagataagttttaaaatacaccagattcttttggtattatggagacatattagcatttatcctctaagctaattgtatatagtgatatttcaggagtgacatgatttgacctgtactgtcttcaaatctttgagacagtaaatttatatggacaattttctctaagatatgatatataattaaatcactaaaatagaatcagtagacatatcgaacattatttaatatatgagaaggttcactttgttcacataaaatgtaactcaagaatgtgaatattaaattcaggtttacctatgctctcctttcttctccctacagtgtcactcagatccttaaggagtatcccgttctttactatacaaggttcgtttgtttgaacacatattaaagcatcctgcttggtttgagggcaattcttaaaatagtgagaattttaataacgaattggcgttttcccttttagatttagagaactgttcaaagccaaattgggattacttggaaaaagcgagggtgatgatgatttaattgcatttctcttacatgtgagtttattatcgttttatctttttttcctgattaacatttgactgaatacactgtatattcttggaatgactgaggttgctaaatgtaattattttcattagctcatggaaaagacagaagctgactttacaatgacatttcggcagctcagtgagatcactcaaagccaattacaggaactagtcattcctcaggtatttattcatgcctttggctttttcttaact

SEQ ID NO: 33445 - DNA, 1240 bp, Bovine  19866881262288
  misc_feature (1)..(1): n is a, c, g, or t
ntatccttgttatttttctatttggctatatttttcttgattttaaaatgtaatttgggggaattccttggcagtccaggggtcgggattccatgtttccactgcagagggcctggatgctatccctgcttggggaactgaaatcctgcaagatgcgcagtgtggcctaaaagaaaaagaaaaaaagaaatttgggtatatttcaggctattaattcagctattggctatttttaaagtatcaaaaatttacctgaattgtctatttatctaattaattgcttaagcatcaaaggaatgaggcctcttgaactcttctctctaagactttgctgctccgaggctttttctgatgcaggcaaaggcatccaagggcctgggtggtgtctctttgagtcctgtttgttcaacctaatgagtacattcagatgacgtttcaagacgtcttctctatccaggacatgccactggggcatccttgaaggtttctgcgacattcttaaagttgttgcgggtgggaagagtcagaccttcggcgaacagacacagtattgcctcaccaggaggtatatgaatgtagtttttaaacttctttgatatagtttattggtgatatttccatgtgtgtagataatagaggggatcaagatcagactgtttattcaatttgacattggggccaacacaagtccctatatattttttaggtgtacctcttataaatccctatcttttctatctcataaaactgttcatcaaccagaggaaagggggttggagaacactggcaatgtgcctgtttacctcacttctgtgggtaaagtccttggagtgggacaccccggtagcttaggcctgaaaggtgacctcattctccctgtctttgcaagcaccatgctgaagtcattgctaccacactatgtccgggaccattcatcactgttccccggtgaagccggcgccaatctccctcaggcaaaacaatgacagcagaaacagacactttcacaattgtctgagaaaagctaatagttgttcttaaagcaggtctccaattattcagggcagaatttcttccgctgtaaagcggacactgaaaactgattgattactcatgctctgaggtcaagtttatcttgagaggctaaaagtttctgagaaaacaagttttatatgaagagtcccaattactgacaggttgtaccccacatatttttgagaaggcagttgttggaacgtgg

SEQ ID NO: 33446 - DNA, 2896 bp, Bovine  19866881423467
  misc_feature (1)..(1): n is a, c, g, or t
ntgtaataatatcctcccttttctccctgagaatatatagtatttacttagagtcctgattagtttgtgttcttagctctgtttcctcaggagacattccatgattgatgctgttctctttcagagtgtgcttttgctcagatgtgtagggtttcttgcttgtgtgtttatgctttagaaatcggaatccctctttaatctgttttctgcctctgtttatacaaagtactggcgagttgggtggtagctacttctgcaggttttaggacaggaggactaggatgtgcctcaacagctgctcttaggtgtttggggtacccttggacctcccagagtctgctagccacctggggctctgccatatcccattgtttcaataaacagctcttattgtttttgtagtgaaaatggaaggtgaggggagagggccagggctccatggctatctagctccggaatgtcaacttctatctagcagagccatagtctgctcttggcttccactcctcccttacctgatatttttctccctgtggtttgtctccatggctgaagcctctggcttcagctttcccgtgttttctcgttggcattcttcactgtttcaggttcaagtgtcactcaccatcttagttttgagcatgactgtttaactatccactctgtcacttctgtggatttgatatagaaaggggaagaggggtttgggagaaggcgcagccttagactgtggctttgttatggtgtcgagagccttctgtgtggccatgcggtttctggcttcttctcttgagcgtgcttggggtggtctccttggaggttctcctgctgggagcccccagctgcagtcctctgatgcagggcagtgtatcctgtggctgaccacgcctgaccatcagctcccattggtcctcccctctgctttgaactcacagctggctctttacctcgggatccacatctaaccccctagaaaacctcttccatggcccccattggtggtggacacataagctgttttagagaccctcccactcaattctggggctattccagccagcttttgctctttagatttttccagaagagagtcagccattatatacatatctccaaaagcctagggaatacatatcaaattcttgaagccccttttcttggcttcaaggaggagaggcacccctttacttccatctggggaaggtggggagagggtccactcagtacactgacagctttccagggaaatccttcctttacaatctttccctggttcatcttcaacttctgcttttcagtcttgaggtaggtaatgaactaatggttgaaaaatgggtttcacaagctttcagcatgacctgcctggcaaactcacaattactgtattgggctcgggtttgagacatcagtcaaaactgcacaggaagagtcccattttaacatcctgttacttatgtgtctgtaatcctgcattttcttctaaacgtacctaatggaagatatattattatattatatataatcagccatcatttttttttcagggagctagaggacctaatggctcagttggtgaaaaggtaaaagatgaaaaagaaaaattttctcttccttcttcctgtctctctgggtttagtataattgaactgttgggctgaagtacgaaacatgtaaatgtcatggatcagagaaaaacatctggatggaactgcttggggaaggcggaacatctggagctggaggagactgaatagcctgccaggttctctcctctgtcactccctccacccaaacgcattcagtgagtgccgtcagcttatctccaagtaaaatgtcagttggcaagacggctgtttctgtaccattaagcagcaccaatcagagaatccatccatctaatgaaattcaaagaacaatttttctgactcaggtgtgaatgttgttccttccatgaatgaacccaagactagatagtcagcctgtcctcttcctcacagggtgatcctggcaacagaggcttaccaggacccccagggaaaactggacaagttggtgctcctggggtcatgggacccccagggcctcctggaccccctgggcccccaggccctggatgcacaacaggacttggatttgaggtattttccttcatccctgtggttaaagagcaatgtgcattacagataactggaaaggccagctaactggatgccatggtgctgctggttccctgctgagccccagcttccagcaccatacctggcacaaggaggtgtctgggagtcagatctgaaattcttcttcttccttccctaggataccgagggctcaggaagcatcaggcacttacacgagcccatctctgggccaacggcttcaagtgtaggttgacttttgaaaccttcactttgaggattgtcatgctgtcatgctggagcagggaagctgtggggtgccgtcctgctctgttactttcaataattcatactctctgagcctccagcttccagctgtgcggtggggagaccaggtgctctttatagcttgtttctttgaggaacagcatagtggttttgcacaagatataatatgggaaaacttgaaaattacctttctctctctctccacagtccctaaccatcaagcatctctacttcattgcctcctttctgctgccctttcaagactcacactttgccccatttcagaatcccatgctcctaacaggtacccctgcccgctacctcttcccccagggaggtgtggtccatcttctactatgatatttctctcaagaccagtccctaggatctcattatgtttgtcaagtggtacccagagctgagcacactggtacaggaggagctgagccccacagaggagagcatcactgccc

SEQ ID NO: 33447 - DNA, 1366 bp, Bovine  19866881774620
  misc_feature (1)..(1): n is a, c, g, or t
ntacctgacacacagcaaatcgttactatttgttgaataaatgaataatgcacccaaactacccacatgtgaaaatccagcaaagagggaatgattcattttttgccaactcttaactgtggacctaattttcaccttgatcatactgttttcaaccaaatagttttagaacaacttgttttcagccaaatggactggcacagttctgggggcacttcccaaccattatacagctcctcacctgacacctgaatcccttatttatttagaaagcacatctaattccctagacaaaatttgccccatcacagccacacctttactgcaaggtgcttgctggaaaggctgcctgccagcccggcagctggcataatcatgaggttggtaataccagggctcaggaagactacaattagttcttgacaagcactttatggcctgcaatttaaacatctatgccattgtaattcagttccttgatgaggcaaacatgatactaacctcatctggagaattggatgaaatgcctcctcgcactgatggcgcctaattagtgcacaagggaaggtaaggctctgcagcctccccacctctgaattttgagagtgcttccctataacatccttctagaaattcaggacagtgaatgtatatctactaactctcacacacattgactaaacattgactgcagggggagagaggaggattgaatggttttagcttgtcgtttctccatagggtctcaatacagctggggatggatgattttagatgattttgaggacaaagcccactcacaaagtgtctacagtctagctgaagatatgcagtcacccactgggcctgctgaaataaatccttgaaatgcaaacagttcatacagaagatgttgaaaacacatttaataaaattcacttaaatttctgacttaaaaccataaaacccaatcctcctagtaaatgagaaagaaggtacctccagaacacaccaaagcctggcacaaaccacagccagcatgcccagcaacagtgaaacacaccatcaaacaagaatgcctgtgttcacaacatctacctggttctgctctcacagtttatgacaattcaatctgtggacaaagaagccacataaaaatattgaaaaaggaagaggtataagtattgttacttgcagaaaaggatgactgtctacttggaaaatccatggggaactatttggaccaatgagaatgctcaagtaggtggctggttatgaaatattcacaaaccaaagctttctacttaccagcaataattagttagaaaatatggtgacgaaggggagccattataaaataaaaggatatcgctcacaatacaacaaa

SEQ ID NO: 33448 - DNA, 1698 bp, Bovine  19866880418408
  misc_feature (1)..(1): n is a, c, g, or t
ntcaaaagcatcaattcttcagtgctcagctttctttatagtccaactctcacatccatacatgactactggaaataccatagctttgactagatgtacctttgttggcaaagtaatgtctctgctttttaatatgctgtctaccacagcaaagagaactgtaaatgttgaagtgataatgaaaagagtaaaatcctgttcttgaaaacattgtttcccatagaatttttcagaatctctccctctacctttttttctacactaaacctttaccaacattcagttttatttataatattacaaaatgtcaggaaacatcttctaacatttcttgagatgaaatatgggcttataatatgttaatagaatttaaaatatgacatctcagttattattttctaattttttaaaatttcaactctacaattcagtgacatgatgcatccaataatcctttatagagtaggattaacaattaggcaaaatttacaacatcatatatatgggaaaacatattccaagtactgaatgaccaatttacaaacaaacttttggaacccaatctattcctatgttaagaactgtctgtacttatgaactcgtcaacacattggttagggttgttagcaaaataacaaaattggctcatttaactattccatttcacttattcatttgtccatcctttcatgcatgcatgcattcagcaaatatttattgagtacctactttagcaggacactgggctaggagtgagataacggggacacagaattgaataatacatggtcctgccagcgggaaacctgttagtggagcaaacaaagcaacaattctgatacagtatgaagaaaaaaggaagagaggaaggaaaggaagggaggaaggagggaaaggaaaaggggaagacattctaataagagttgtcaaggcctcagggacaaaaagaaagttcagtgtgggcaaggaactgcaaggaagtcaacattgtgaattgtgcagttgacaactagaataggcaagatataaggctggatctctggtcatgaaggaactaacagagtattggacgggggagcctggtgggctgccgtctatggggtcgcacagagtcagacacgactgaagtgacttagcagcagcagcagaccttattctgttgtctcatgttggcagaactttgatgatggacttaagcctgcaaacaaaatgttcagatttatactttggttagctcattccagtaaccctgtacaacttgggtcagcaaactgcagcctgcaagatatttgtatgatctgtgtactaagaagaatatttatatttttaaggttttaaaaaagccaaagaaaagtatcttgtaacacatgaaaattatataaattcagatttccctgtctataagtaaagttttattggaacacagccacaatcatctatttacatagtatcaatgacttctattacaaagctgacttaaagcagttggaaaagaccatataacctataaagcctatatgttactctctggccctttacagagaagtctgctgacccttggtatagaacatagataaagaaaggaagaccagttgaaaatgacatggggttgaattagggtaagtggtacaaataagcaaagcatgtgaatgaaattaaaggtcatgtcagaaacaacctcaggttttctgttttgaa

SEQ ID NO: 33449 - DNA, 2527 bp, Bovine  19866880437336
  misc_feature (1)..(1): n is a, c, g, or t
ntcggctcttagtgagtgctgtgtctctggctcgtgagaggggtggccatgagacaagtaaaaggaatccccctttggctcgacattcttttgggattcggtattagggaaaagtttaccttaaagaactgagaaggttctttcatcacataataaaaatcgaataactcatgatcatttccctttctgcctttcctgtcaggaatctcagagtcaactaaaaagataacttttatgtgtgattatcaagcaatatatatgttcattacaattatctaaaggaaaaaatataaagatgaaaacaaaaatcacttcgtgtcatcagctattgttaatattctggtgaatattattcccataatacactacaactcagaaaccaatgaactagctcatatttagtttcagtctcttaaaaaaagagcaaacaatgatgcaaatatataagcttgctaagtatattatttgattataaaatgttcctattctatttttgagctctatacattattttgataaacaattataatgattattcatgataataatggtagttaaaaaaaaaaaagaaaactaccaatctaggtatttaagtaacctgtgcaagcacctgctccatgacctaatggaagatgtattttcagatatattgtcctttgctcgacatccaatttaagcatcccccagtccctaaggtgctgacaagtgacagatccgcagggtggctgccgaactgtcctcgggtgtgtgtctcctgccctctcaggattttcttccagcagtgaaacaaattaaatctatgtgaggaattgtttccagcatatgttaatgtgtcttaatttgtcttaatgatttggccacgggctggtgcctctgcttttattccaggtcccagatggcaataaaaggcttcataataatgagattcttggtggaaatactttaaatacagcccccaaagtagtcagctcctggctgttgccagtacaggaactctcttgcagttactttcaagaagaactttgttcaccatttctcaaatctactgaggtcctacagatctcctggatatatcagaaatgcattcaaattaacagtcatacttctccacatctctagagctacccctctacctttctagccaccactgattgagggcaaaggcggcaccgaaatccagactctcaacatctcgaggatgttgaggatggggtggggtgtggctgccataaagggagggaacatatgcagggagacattccaatatttgaaaacctctacaacaggaacattactgaactgaacatgaatataaaatgtctggatggatagtctagccacccagttgccagtaataacaatgataatgatgattattataatgaaaatgacaatggatactgtgtattgagcaatgactgagggttgtatcatctcctttgatgttcactataaccccaccaggtcggcatgattactcccattttacagagaaaactgtggctcagaaaggctaagtaacacaccggggtcctacagctgccgagcagtggagctggtttgacccccaaaggccagatcttaaccactatgtatgtcacactgggtctatccatgtgctactaaattctagaccactgctgcccagtagaccttcctgtggtattagaaatgttctctgtgctgtccactgcagtagtcaccagctaccgagggctaggaagcagttgacatgtggctactgtgactactgctttcaaattttgtttaatctcaacttaaacagccacatgtggctaatggctaccatactggacatcgacacaatctccaagcctcaccagagtgtccagcatttcatgtgtgctcaacaatgttgaatgaacagattcaagcttaactccattacaataaaccaggtaaacgatgaagataaaccagataagccatcatctcctggtgtgcttttccttccccatgctgaccatagcgctctgaagactgaggcttattcttttctggatcctcagtgcattaaggtgctttgtgaattttgtactaaatgtttccatgtgacagaaaaagctacacttcttatgtgtgtatgtgtgctcagtcatgtctgactctgtgatctcatggactgcaggctgccaggcttctctgtccatggaattttccaggcaagaatactggagtgggttgtcatttctctctccaggtgatcttcccgacccagggatcgaacccgcatctcttgcacctcctgcactggcaggcgggttctttaccactgtgccacctggaagcccactgcacttcttatggctccttacaaagtgagcccatctcaaagatctcctgtgtgagagatttaggaatttggcaggttaatctccctaaaaaccactcacacagggcagtttggtatggttcccagagtggcaaacaagaacgcttttcactcataacagacctccatgtgagaacacatttagcattttcggtttctcttttttttttctca

SEQ ID NO: 33450 - DNA, 2188 bp, Bovine  19866880524294
  misc_feature (1)..(1): n is a, c, g, or t
ntcgttttgtttttgtttttactacctagattctgcatgtcccaactagtcactgcttttgtctttttttatctttgctttcttggtatcttattatcttacggttgtaagattacatttttcagattttggatatgatgctgtacaattcatgcagatccttcaactgttattcagataaataacaagttaaaagaatacagtctataataagtaagagaaatacatatacaaagaactgaaaaatagttttctctattggagaaaaacgataggattgggattgatgaaagtaaagacttctcagaggagggaacatctgagttagattttgaggaccatataggagctttcctgtagataaagggaggcaaggcagcagccacagcatgtacgaagccagagtcgggaagtagtgtgatatgtcctaagaattataagcagtgacaatactgctggagtgaaaatgctactggggagtataatgtgtcaatttagtaaatatatgttaagctttttaagtgacattttgagacttttttctattggtgtttttctcccaaagtatttagaatatcattcatccttatgtcagtataatggatactactatagtttttgtttttcttttttgtagtttactcatacattaatttttctcatactattttaaaaaatgaaataagcttgttactctgtttaattcaagaatagtttctgaagaagtaaagtttatttttgcacatattatcattccagcattatttattatagaaacaaatagaaaaactatggtcatcctcaagagttgattttgtctccatttaaataggtagtttaaaatctttaacatttagtgacaccctttttcacagcccttacaagtgtcactaaccctttcatatattctctttcctttaaaagagaccaaaatggataggaattttgtgcctgagtaagtcacagtgctgccatggagaagtaaacaggagaagcagtgatctctctgaatagttgatagagttgaaaatattccctcttcagaagtgtaacaaagctaaggcaaaattgctgtgtaggatttattttatgacatcaggtataagaaataaggattgtactttctttacatctgacccctagaagttattaaattctttaactttagtttgagaagaagtttaaagtcacttaaataatcattatgtttctcagaatttaaaatgacctagtcactgtatccaaagtgttggggaaatatctataaagcttgtaaaactctatgagaaaatgctaaaatgctattttccaatttttttaatgaggaaaaaatcatttatttttaattgatttccttgtgttactgtgtatttctcagtaagacatttgtcctcagttttgtttttacttatgttctgatgtggaactttaacatacagaagttcattttgtgtctagagaaaggatttattgctgaactattgaggtagccttgtaaaatttctatgatgattctcggataacattcttggttggatgagtctaaataaagctcagcactttgctggttctgtgattacttgagtggtatcaactttttgaccaaatttcttactaatttgggtaaagatgacagtacacctttagtagcatttggattagtttggtattttgaagcaaaatggcagcatttccaaatatacttaaccaactttaaaaagagtttattttctgtgtctaaacagtgatcatgattagatggttaacataactaaaatggttaaactatatttacttttataacactgactggattggttttgcatgcagtattttactatatcagacatattttagtaaattagagaaaatgtaatttttctaaatctaagtctttgttggctcagtgtagtttacttttgaaaagtaaaggtttgaaaagaaaggttttgctttcttttccatctttccaaaagaaaaatttatagtctatgaataaataatactgaatctcctgaaattatctgtacttaacttgagcctagaatgaccgaccagacatgtctatttgcctgggactttgggctttccctagatacagggcttttatagctttaaaccaatcactctactttatcctgacaaattatttgaaataaaatttactggggaattctaaaagctattt

SEQ ID NO: 33451 - DNA, 919 bp, Bovine  19866880653481
  misc_feature (1)..(1): n is a, c, g, or t
ncatccagtgcatttcctctataatatcctccagcttcacaggcacatgtttgcacttttctgttgttaaaattgcagacaagagtaattttgatttattggtgacatctaatatagctgtgtttatattgttgccaataaaatgacttacacgattggtttttgtttatacaatcttttctgaggagtcagtcacctgtgttaggacaaggtacattctgcttattaaaatgaactcctaggatctaagaacactcagctctatctgtccttgattgaattgcaaaatgtgctttacactgcagccgtgcatgagaataacttatattacctatcaataggcttttcatttctatattcttctggctacaaagctgtaactagagaaacccatgggaatagcacggacctattagtgatcaaggcagcaatgttgaaaaggcaacgttaatgaaattatacaatcattaacccaaaggggaaaaataaaaggaatcaataaaaactctattttagatggtttatatgtatatataagaagtcagctcaggggcgatttgtttgctgaccagtgttttgtgtctcattatcaggttttctgtgcagggtaagaaatgcttgtggcataaaaggaatggaaaatgtaacaaaggctaaatgtagcctaaggaaatgaaatgatgtatgaaaattaataattaactggctcatcagatgaattatgactctagatgagtctattaataatattaagtaagaaagggcttttggatgtaaatggacattatggaactaatatttttggaattctcttgaagatatgagttaacattgctttttaaaatcttttaacctacaaggcacagtgcctcgagcgttgggtaaaaggtaaaagtatgatcttgtattttgattaaag

SEQ ID NO: 33452 - DNA, 1355 bp, Bovine  19866880704019
  misc_feature (1)..(1): n is a, c, g, or t
ntggatgtgagatttgaaccataaagaaggctgagtgccaaagaattgatgtttttgaattgtggtgctggagaagactcttgagagtctgttggactgcaaagagatcaaactgttgctgaaagagggaccgctttcagagcttgaaagtgggctcatgtctaacactcagaaatgaattgtctgaggagacacatgtgcagacaaagcaatatattttattgggaaggggcacctgggcggagagcaggagggtaagggaacccaggagaactgctcttccacatgactcgcagtctcaggttttatggtgatgggattagtttctggattgtctttggccaatcctctgactcagagtccttcctggtggagcacgcattgctcatgagaagaattctgggagtggttggacacctggtgtcaccttttgacctttcctgaactcttccggttggtggtggcttattagttccatgttccttaccaggacctcctatcataaaacaactcatgcaaatggttactgtggtgcttggtcagggcaggtggcttcagtcagtgtgttttccctgacaaaaccagtcaatcctagagtaaatcaactttgaatattcactggaaggactgatactaaagccaaagctccaatgctttggccaaatgatgtgaagagtcgactcgttgaaaaagaccctgatctggggaagattgagagtcagagaagggggcaacagaggatgagatggttggatggcatcatgaactcaacgtttgagcaaactctggagatagtgaaggacagggaagcctggcatgctgcagtccatggagctgcattggacatgacttagtgactgaacgacagcagctaggagcactcggctaaaacaggataaacaggggcccacttctataactggagagccatttaccattcagtacttccctcttcatcgaaacttaagactctgaacacagtaattttgtggtcagtcaatatgaagaaaggacagattatccaggatatctacttttttggagaaaaatgctcaaatggagaaaatcaaggcctgatgttacctgagatgggttataatagacctttgaaggccccttttagatacataaatccagaattattttcagccattttaatgggttattaatgcaactagagaattggaattcagaaatgttaaaatatagccaggtctgagcttgtatggaaactgcttttggaaaacatgtagtactcaacctgttagtaattaagggttaatttctaaacagcttctgctaaagtaagcattctatatcaccttaaaaataacataataaatagctcatgataa

SEQ ID NO: 33453 - DNA, 841 bp, Bovine  19866880799188
  misc_feature (1)..(1): n is a, c, g, or t
ngctgatgacttgtgttggcattggcttctccaaccttagcaagaccctcaagtgacattgtcagaagatgaaaggcccaaaggcttctagacaacgcagaagctgccaaggaaccaaagggaccagattcatccaggactttccaacttcccgcttgaaaacaatcaggatatccgaacaaaaaatgtctctctacctgtggttttcagccatttttccggggcagacattcctcaggaggcccagtcacaacgggagctccctcggcttacctggatgaagagtgtgccttcgggacacagttgtactgctgcagcatcacagctgcgttttagcactgcttcctgagcccacatcctcgggcttccgctgtatggctattttctagacctttggagtttgttacagttgcttctgcaaggactgaccctcctgaatcttggtttctgtgtcgggattaaatgagatactatgaattggaagccctttatgaataatgtcatgtaatgcaaatgtcagaaattggtgtgttagactattttatcccttgtcttatgaatggactactatcttggagatacactgctccccatctggttcattgtatgtggattttggggggaatgaatgcctagggactgcaagaatccaactaaagttattgaatattttccatatctcgggtgtgctatgcatgttctcatttaattctcccaatagcccagtgatgtagatttgattatccccacaagagaaattcaaaaaggatattttgttccttttgaaatttgataatatagagatattagctctcctgatttcaagatctaagtatcagag

SEQ ID NO: 33454 - DNA, 982 bp, Bovine  19866880864089
  misc_feature (1)..(1): n is a, c, g, or t
naaaaatgagagacgtttgccttttcaagggtgctcgacagctattggtttctccagagaggattactgctggagacagttatgaagagaacaagtaactcttttaaatgaccaacatgttcttgcttaaatatttcccagaacaattctaaagaaatataatccaggtaagttttgttatgttctcattgtgaattatgtttacaggaaacaaaaataggattcgaatcctagaggaggaaaatcaggcttttttgtacctgtggcttatgttttatgtgtcatgaattgtaaccatttataaaattatctggtttcttgcccctactcatggttgattttttccctctttttccacctagagagctttgaattatttttattcataagtgaaaaatgtgttacagctttatttccttttattaatagttccttcttgcccttaaccacatctctgactttttggcatgtaaagtccaatgagctcatgcttaatcatgtataaacagccatctaattatatggttttgaattttcatttgaccggctaaacaaaaatgacacagaaaagagaaacctgacaaccttcctgtctttgggtacctggcctttctctccctcactttctcttcatgcatttagtaaaatgcacgttaaaacttatcaaaaaatcagtttgtacttgccaagtttctgaggtaaatttgttcttttcaaggctacgtgtcaaaaaacaagtcagttaagctgaattattgtctttacaaatttctttcggactccagtctttcctcctctaagagggaggtgttactagaattccttgatgctactggtgtcagatgacagagaagccagtattcacaggacaagatttctcaatcctcatctccttaccttcactgaagaccaataacaagggatccctgttgccatatcttcccaccctccccaagattactctgattgacacatttttgaa

SEQ ID NO: 33455 - DNA, 1526 bp, Bovine  19866880877936
  misc_feature (1)..(1): n is a, c, g, or t
nctatgtttggggcaggtttcatggagttagaattttgaaatattaaaagatctgggtaattgctcagaagagaggtgggctgctaggcaaaggccatttgttggaagttttgttcttattaagtgttcaagaagagagctctccattcatattattgccttagggaataggacatagaattgctttctgaaaaaattttgataactgtcttagaacactgagatatctaaggacttaaggaatgtgcctgcatggaattatgctcaaatttaaatcaagtcatatttaggtgtattttaagaaaaataaggaacagctcttaacaatggaacaaatgaacatgttttactataggcagccctcaaaccaaatagtataatttcaaatgcaaaacatatataggtgtgtaaaatacttcctacctgctattcactgcttgactggtttgatctcctttcttgatctctcaaaccagtcaatcctaaaggaaatcaaccctgaatattcattggaaggactgatgctgaagctgaagctccagtactttggccacctgatgcaaaaatctgattcactggaaaagaccctgatgctaggaaagattgaaggcaataggaaaagggagtgacagaggatgagatggttagatagcatcacccactcaatggacatgaatttgagccaactccgggagatagtaagggacaggggaagccctgcatgctgcagcccgtggggttacaaagagtcggacactgagtgactgaacaaattcactgcttacaaatctgaaatgctctggtatgacagtgaccaggcaaatgcaccatttaagaatgttatataaaccacctcaacctcagggtgtaaagcaaagtcagttgtctttgccttatatatgacatgactactgatttgacttgggtctgaaagcaattcctgaatctccctggggaaaggactaaaaggcccttgacatcctatcaccaggagttatctgcagggagagctacatgctgtgggtgtgctgagaaaataattgaaagcattcatggggaattaaaaagcagatggttcagaaactactttgggacttgcaaaggacttcagcccaaatataaggatctggacagagaaaagaaaatctgtgttaggggcaactggacttaaattcttgctgtgtttgtcaatggtaaacattacttcactggatgaaaacaccagattgacaatggtgtaatctctcacctaatactgtgcatttcagagtcgagatgttttcttgctaatctcatgcttgtaggaaacagtgttcctggcttccattttgtgaaaagaagtaagaggaacagatgggatgagaatacttctattttccctcagttcttttgcaacaggttgctttataacagctggaagtagtaagtgggctcatcctgggaaagacagacattctatacaatatttaaaatttttttgtcagaaaaaagactgtaaaaagccaataaaagcacatattaaaaag

SEQ ID NO: 33456 - DNA, 811 bp, Bovine  19866880902591
  misc_feature (1)..(1): n is a, c, g, or t
nccagtccatctgacaagcaggtttcagagactcctagagcacagaggtaatttttcctgggtattttccaagagcaggttgttccccccccccactactggtcaacaggtgaaggccactgggctcactgtcatctgcccatttgatcccaattgcctggaacttgtcaggttgcctggcactgccccttaaaatacagcccttcttagcaggtccccctctagagcctgctagagcatggcagtgagaggagtcacaatgagctccctctggcagctccacagaccaaaccatgccagagggtcctgcctcctgctccaccaagccactcagacactggaatcacctacctttggggtctaaggagttgatctgcaagctgaggggatggaagatctgggggtaggaagagaatctgctcaatggggccccctgaagtcactacacggcagcttttagatgtattggtggtacttcttctgccaaagagcaactttcccaaagccccactgacctctgctccaggaattaagttattaaactccattataaggcaacaggaaacaagagagccaggcaggctgcactctcatgagacaggggccccaggccaagttcagccaagaactaactataagcaggtgactgacctctttttcatctgaaaagtaaggatatcacttgtttttaccatattccaaatgtgttctgcggctcaaagagcatagtaagctggcagggctttgcagcatttaaaccactccccagatgtaaatacagcggcatgtgttgtgcggctcctagagagca

SEQ ID NO: 33457 - DNA, 1020 bp, Bovine  19866880960221
  misc_feature (1)..(1): n is a, c, g, or t
ntatatgttgctctaaaatggtaaatctccaatgaagaatggcctcttacctaaagatgcatacaaatacaaactgtgaaccagaagtcattttaaagtgcaggagagtatatacatcatactctctaataataagtatttttgttccatttttcttttttttttaaattttttaaattttattttatttttaaactttacacaattgtattagttttgccaaatccatttttctaatgcaagttactacaaaggttcagggcctgtgaaagaatcctcatagggttaaaacgctgcactttatttttcatgagtaacacacacctttgagttacaacccataatgtgtttcagtttaaaagataacaagttattttcatgcatgactgcacttccttaaggagtgaaaatgggctgttactaaaatgtcaacacaattgtcccccttgaagcttagtttatcttgaagtatttttacattttcagcacttctttgtgtttgttttccaagagcattaagatccagccatggttaattttcagaattaaaaaaaaacaaaaaaaaaaaaaccaaaaaacttaccctcagtcattctgaataaaatgaggaaaacaggcgggggtgggtgactggagttttggtcctcaataatgaaaatctggggcccaatatcttctgtagttctttgcatttctccatgaaaaaaattagttgcactgttgttcagtggaaaatgctttcatgacctaaatccacaggccacagttttctagcaaggcacaggccctggcagggtcacttggaaggctgcatttgctgactgaggttaactagaaaatgggagaggggcggcagctaatccctgcctgcttgcctatgagtagaaggggctagttcttctttttctttcctcctaatgtctgggccaaggaaccacccaccactgccccccctccaccccgcttcttctctctctccatcaggaagggcatcattccatattccatctgtattaggaa

SEQ ID NO: 33458 - DNA, 1160 bp, Bovine  19866880965864
  misc_feature (1)..(1): n is a, c, g, or t
nttctggaacagtgtatctgggagttcctttgtgactgatagacactcttaaggagtgaagttttagtctctcttatttgaaagaaatggggagatctatagagttctacattgttcttgattttatcacaattctttgtcatgtgtggcacggtagttttagttctattccccttgaaaattcttaattaaaacaaaaaaattaggagtgtgtggcagagctctggccaactgtgtaaagaatgaaggccttatgacaggtgctttagtgagcagttcaggctatacagtgcctagcacagccaccttatagagatggttcctagatagttgctttttttgattgattgacagaaaccttccaagcttctccttttctttctcttattagattctgatcaaaatgattttgtaagaaaagcatttatttcagactttctgctgcctaaacataatgtcttataatatcatgacacagctcatcaggccctccttgggttttgtctttgtctctacttctgaagaactggcccctcatgcattacagcttcctctgctagttctctcttctctttccttttcagattcagttgaattttgtctttgctaaccatgagtaatattcttctatttgtttgtatcttgagctctaaagatttattttcaggtgactttacacaggggcttggataagcctaatgtgaaaacttttcatgtggatactgggaaggtggctgggtctcaagagtagtttctggattggatgtcagaaggtatgggcttcttttatgcagtacaatgaattgctccttgactttgcttaaattacagtcccccagtttttccatttccccatcttcatagctatcttgaacagcaaacatagggcttcaaaggtgaaagggtaaccatcttggtagaaagtgttgttacacatacctgcaatccagggtggtctattgtgaacaacaacagaacaataatgtccttggaaatctttttctttgtaagaactgaatactcttgtagatgaagacctctttcagtgaggactaatagctagtttctgtaggtcatatggatgcttggatggtggtgcaaaaatgatccagaagaaagaaaggaagttgagaccaaaaccagaaggaattaaaatcaaa

SEQ ID NO: 33459 - DNA, 3003 bp, Bovine  19866881006766
  misc_feature (1)..(1): n is a, c, g, or t
ngtttggctgtaacacagggttatttggaggaataagggacataagtctggaaaagtaagaaggctttgaacaccaggtttaaagtttagacatatagcaggaacagagagccattgttaagttgttgagaagtaaacacaaattttgtgtgccaaaaatctgtaaatttgttgtttgaaacccagactgttttctaacacagtgcaagcaattggagttaagagttccaggttggtccacaaaagcttgtttctcaggtgtttataacctgtatttgcaaggaataattattttactcaatcaacatgcccagaaaattattcagctatagagctatataaatgttgctttgattctcattgtcttaacctaaaataagctttcccaggaaaagttcctcagttaacatgtacagagatttatggccaactactaaaattcctggaaggggatgccatgataaaatatagattcaatttttttgccaactcatttggatgctgagaagtaatttgcatggaggtggaaccatgaagtcagaagcttatttagctgggccttcatttccagatccctaaaaagaactacttacccctaattgacacaaacctgttgggcttgtttttcagaacccatctgtgttgaaagcactgatttcagctgccgtctgtgcaggaatccctgcttccacctgctgctggagaaatctgttctggcattcaggtaagttctacctaaatagcaactgaaaggaagcctcaaatttgggagcacccaacaccagtgcctcattctgacatttcatgttaactaacagtcatttattcactcacacgccacaaatatttatgagtatctgctgtgtgccacatactgcactgataccagaggtagtagagacagcccatgagaatcacactgcaaacgagtgtttcactacagcattacaatttatcttatgggccgtacgtaggaaaagaggcatctaaaattgtctataggattgggaaaaagcttttctgaaaagatagtatctgagctgggatgtaaaatagaagctttagagagaattggaggacagcatctcatgtaaagaaatcagcaaataacaaaagcatttgattacagagcactgtgcatattcagtgaatatttgctaaggggcatgagtggatgaatacatggatgtgaagaaattctttggaaaccctgtattatcttctacccagtgatgtcagtgccttgaggtttaatttcaactctacctctagctctcagaagacagctttcctcattctgttaaaaattttaaatcttgacaatgaaagatcttcatcctaatgcacattttaagcactgaacacaaccccatactcagtgctaggatttcccattctaggagttctgaagctgcctcttacctagtgctccagaccccaatccagaatacaaactcttaaggacagttcagaaataccctgggctgataattgggttactaccaataaagtcactgagtcagcaggccacttggtttggttgctggtcaaactgcggagcctgaaatcttcttccttccgaatcatgcatgtgatgggatgtacaggctccaagaattagctggtagcagtttttttctcccttaaatttcttttaggagacatgagtcctactccagtacctggattcaggtaacaatcctatgtccagtcctccaactctcctgacacattttcaaggctctgttacccaaaagagccgtattcctaactgttactgcctgcttccagacccaaaggccagcagtcctgtaactccagccccaccccccacttacagtttgttcatttctgatatactgagacatttaatcttatgcttgtagtccacttatattttaaggtgaacgatacaaaatttctaaaattcaacagcttttacctatgagaactgcaatcacagaaagtcaacttaatatttttttgtggattttatttttttcatattttatccattgtgtctgcattttggagcagagggtatgtgtccaaatataatttatttttccaatttgaccagaagtcttgtctcttaaaatgaaattctcattcatgatgagttagaagttgactatcagaaaaataaataatgaagatgcagcattcttaaggtcaaaaagaaagatcaaaggaatgacatgtaacccaattaaggagactaaaatggaagggaataatgatggaagaggaaataccagggtttaaaaggggggcaagatgggattaaagaatcaagaggacgctgttagagaatacacttgtgaaacatgtttctagaggccagttcaagaaaagtgagtgtgaggtccaggaaaaggaatgctgctgctgctgctaagtcacttcagtcgtgtccgactgtgtgtgacccaatagacggcggcccaccaggctcccccgtccctgggattctcagacaggcaagaacactggagtgggttgccatttccttctccaatgcatgaaagtgaaattgaaagtgaagtcactcagtcatgtctgactcctagcgaccccgtggactgcagcctaccaggttcctccatccatgggattttccaggcaagagtactggagtggggtgccattgccttctccaggaaaaggaataataggcttaaatgttaagtgactgcaaagaaagcagatttgacctaaactctgggttgccctaggaattcagtcagaaagatcctttattccctgcaaaaagaaatagtttagctggcctaggttcaaagaggtaggttcaaagaaactcaaattacgtagatccatctcaggtcgacatgctcaattttgctttgtatatccctgtctcttgtttggctgtagagaggttctatccacagtaaaatcaaagtgacttgactccctacagctaggtaaggtactggtgattcaccacagagcatcagccctggaaagaattcagggttaaga

SEQ ID NO: 33460 - DNA, 704 bp, Bovine  19866881074067
  misc_feature (1)..(1): n is a, c, g, or t
ngatagtggcgtggtccacgttgagtactgtgataagggctatgatactattgaccacagagtcaccaaggaggggaaggtcagctggacttgggaaggtgagggaaggcttccaggaggagggggagatttcactgagtcttagaggaggagtaagaatgcaagagcagaaggaagtgaaagcatgttagcatgcatagcaggagaagcaggtacggggcttggcagcatgacataactattctctgagctctgagatgtggactcagctactggcttagccaccaactttgacaagatatttgatttgctgagtctcctcttccccatgtgtctcttcactggagacatatattcctgtcctctctctcattggaccataatgaaagttgaatgatatcatgagtaaaaatgctatttgaaaaaaaaaaaaaaaaaatgaagagataatgtcatctgtgaacctgtttctctctcccatttacaggcttgcaatccactccattgtaattctcccactgatatatttcataattgtacgaaagaaccctttccagttcgccatgggaatggcccaggctcttctgacagctctcatgatctcctccaggtaaacagaagagggtgtctggtggaccaccacttccctggtggtccagtgtctaagacttcatgctcccaacgcaggggcccaggttcaattc

SEQ ID NO: 33461 - DNA, 1460 bp, Bovine  19866881108236
  misc_feature (1)..(1): n is a, c, g, or t
ntatatttagtaagtatctactacaataatactttggggcacattaagcactacatgttattttaagctgtttaattttacacatttttggtttcctgttgcatgtagtaactcattcaatatatcttatacaatctatgtgtaggatttctgatatttctttccttttatgaaagaggaatctaagatacaggaaattcaaatatcttgcctcaagccacacaggtgggatatggagagccaaaatcttaattcacatgatggattttcagaacttatattctaccaagaacataaaagagatgagtaagaaagttccccccacacatcaactaagtatttagtggtatgtaaataattaaattgataattttgatataattgtcattgataattagactgcccactgcatataataaaagtctcagtactcagtagattctttaaaaaaaaaaaatgttggttaaatgaagaatgatttagtcttagcaaatagcttgcctggactattcatattcctcccttcccaaaataaaaccttatggatattttattaggttttatatttttttggctaaaatcatatgtatttgtatgctttgtgaaaaagcaacatacgtcaccctgtcactttgtaaaaaaaaagtacatagatcattcaattcaattcagtctctcagttgtgtctgacaccacgatcccatggactgcagcactccaggcttaccctgtccatcaccagctcccagagctttcacaaactcatgttaatccagtcagtgatgccatccaaccatctcatcctctgtcatccccttcttctcctgccttcaatctttcccagcatcagggtcttttccaatgagtcagttcttcgcatcaggtagccaaagtattggagcttcagcttcagcaccagtccttccaatgaatattcaggactgatttcctctaggattgactggtttgatctccttgctgtccaaaggattctcaagagtcttctccaacaccacagttcaaaagcatcaattcttcagcacacagctttttttatggggaaccatgttcacttataaattagcccttgaaactctcagaatcaacagaaaactaaactagttggttttctatggcagaattgagggtgattttatgttttcacatgttaacttctttttttattgctacagtagtaatatatttaaaattctgaagtcccttggaaacaaaacactgaactaacctaataggacattacttggattctttccttccttttctcttttatccaagcaaccctccacactcctaacacgtggaaatcattcaatctctgggtttttccaattctatttctaaacacagttctttggcttattatcacaaagccccagatatcattcagcaaataaatttactctggtaaacaccaatggccccttatggatttttcatct

SEQ ID NO: 33462 - DNA, 1474 bp, Bovine  19866881123373
  misc_feature (1)..(1): n is a, c, g, or t
ncccagttctcactgcatttgccctgaggtttgggaccatccctggcaccttttcctgacatgacttcattacccacaatatggagattgaattacttccttgcctactcacactaagtatccacaggttgtgaaagttaatgtctatacagcactgtatgttctttgacccaaaggagctcaacaaatgcagagtcatatcatagtgatacattgcccctgtggtttagtgacttccttaatttaggagagaaggaaaaggtagttcaaaattaaaatgtttatgatatgttgaaatgttccttgtggatcctttgctaattgcctcaaattgaaattactggagagagtgggaaagagatggaagggaaagaatggattttacactttctttgcttctgtgccagtttctaccacacagagttttcatcaaacaaaaagtctaagacagagatggagtgaatttggacttaggattaagaagacttggagatctagtcttagtcgaatcacttattctctatgtgacctcggttgagtcgctaatcttctccaaacctcagtttcatacctgttaaatggggtgataataaatcttcctgcccccaccactgctgtgaagattaatttagatagtgtatgttaaggacgctacacattaagtacagtgtataagcgacacaaattcttactgctgtcacattgactaagaactttggaataaactcaattaaatcacttgaatcttcaccctcatcagattaatatactgatgattagtaaattaagttccatttctgcaaaacccaaaagaaaaaagtatttctgagccaacacaatcttaggcccatctagggatatgatttatacacgttgcaatacccccaggagcacatatatgaaacttagcatttcttcttacttctatttcttttttatctcccacaaagtaaaattccaactcttataaaacatataatacagtggataactcggacagtgtgaaagagacttctagaggtatgtaacaaattatcctggaaggtggggtgatgtatttggcatgttgcttcagaaaaaaataatatgattgaaaaccaaactctaccacgacaaatggtatatactaagtatgaacaatgattaaatatctggaaatctattcatgtaattcagtacactaacagaatcagaaatccaaccagattactgtctcagtagaggttaataaagctcttgacaagattcaatcccaaaatgataaaaatgtattaaaagcacattcattaaaatgagaagaaatacaagcaagtttgctatcatttcaccactaagaactcaactatgtatcaaaggtcctaaataaggtaattaagaaaacaaatgagatataaatattagaaaagaatatctagaagatctaggaaaatcaaatgaaaagaaataaaaggcaaatatttaaaagagtttaata

SEQ ID NO: 33463 - DNA, 1887 bp, Bovine  19866881188359
  misc_feature (1)..(1): n is a, c, g, or t
ntttgtgggaataaaaaaggcatgtaagaaatttagtgactagggtagtgtgtagcttaaccaatcagccctggtgagcactaaggctggttaagatgggaggaaaaagatctgccagtgtaagcttcattttccgcacctggtctggtttctgatgtaagaatttgatttctattacaaatataaaaacagacaactaagtaagaataagaacaccacaacttttcatttttataccattttataccttttcaaaacatcctcttgtatagcatgtgtcattttattgttgcataatctagtatgaaaggcagaatgggcagtcttattatttccatttttcagttcacttcagttcagtcgctcagtcatgtctgactttttgcgaccccgtggactgcagcatgccaggcttccctgtccatcaccaactcctggagcttactcgaactcatgtccattgagttggcagactaggaacctgaggctcagagaagttatgtaagagaattgtccaggttagtaagttatacgacagaatcttctttatttttgttgttcagtcactaagtaatgtccagaacagacttccttatccttcactatatcccagagttgactcaaatttatgtccattgagttggtgatgctatctaaccatctcatcctctgtctttgctgctcagtcttctttatggttcaactctcacatctatacatgactgctggaaaaatcacagctttgactatatggacctttgtcagcaaagtgatgtctttgctttctaatatactatctagctttgtcataactttctttccaaagagcaagcgtcttttaatttcatggctgcgatcaccatcggtagcaattttgaatcccaagaaaataaaatctgtcactgcttccaccttttccccttctatgttccatgaagtgttgggacctgatgccttgatcttagttttttttatgtagagtttcaagccagttttatcacaccctaccgtggacataggtatccttactttgagctctgcgtgcaggtttgtttaatgtctttcagaagtgtgtgagaggtagcttggagagacaagtgaataagcttctaggagaaattaaaccacgagtctatctatatttgagtcaagatccctggaatttttatgtctcagctttgatcatggtttttttccctatgaagagaaagcaaaaagttgaagaagaataacactatagcaaggtattagaagaatttttcaacaactttgaaattaaattaagtttagagccatcctgatagttgtaaggtactattgtacagtatatatttggaagaaggaaatgttatgaggccttagttcacatccaattaatctctcagaataatttgtttactggattgtcttgctaaacccacgagttactttctgcagggtgagagttcatcagtgaagcaatttattatgtttctattacactgcatatcaatcctgctcatggaaaatgttaatggtgtcccttatatatcattcatcttccactcccccattcattattcccatcccccatcagtagttcttgtatcacagagggacatcttgttaggaatataccaaggtcagtgaatgacatagctctgtttgttgctgcagaatttttaaaaggcagtcattactcagaattgtaggaaggaattagcatttaagtaagaaagtattacaaagtcttagaagtggatcttttcatagcttcagtgagaaaattctgagaaatagaaatttgtttttattttcatatctcctaactgtaccagctcttccttctttaatcatacaatgccctgctgtgtagaagaatctgtgggcctctcactgtgatactga

SEQ ID NO: 33464 - DNA, 1375 bp, Bovine  19866881220071
  misc_feature (1)..(1): n is a, c, g, or t
ntagaaatcgtgatgtggccttctatgaatccccagggcagctaacactaggaaagagtctctaaccggtcagcgaattgttttaacattcctaattatcagatgtggactgagcttcttattggaaattctctaattaacatattcctgctctgaacatgctcacagatctctgaaaattcaagaaacattggaaaaatgtaccaggagctctagctttaattgaaaatataataattagattgtgggatcctactttaaattgtagagccagattttctttggtgtctaacttatattctgatgatattatgtgctgagaattaataaagtttctggaaatctgttacaatttttaaaaactccatgactcagtatcgacccagaagtatagataggacccatatcattccacttttcttggatcctttgcctgagttgttggagaattaagtccttgtgttgtcatgcacatgaatggaatgttatttcatctggaatagctgagcttaacttttgaagttggttaagtggtatattaaagcgctgacaagtgccaggcaaaacgtcactctttgatttggacaaaagaggccctatcctagtcccatacttgaacttcagtgtgcatagggactcgcttagagattttgattgagtggatccaagcagggcctagaattctgtatttttaataggttcccagatggtatccactcttatgttgatggagcacacttttgaggagcatagctctgaagaaccccagagctatggcccttctttatcttctcccttccctgtaagataaggaatctacagatccaaggagatgtgcctgctcacagcctgtgctccctccttctagaccttgctgtggatatttagagtcctagaattctctgcccaaatggccttacaccttactctagggtcttctctgacctcctcctcaggttctttcacctgaagtggatgaaccccaggtctgagggtggctgagggccagtattgtggatgtgtgttcgataccccttgtggtgtaagatagaactgaggtggggaaaagggggaaagtcaggatatggggggctctcctggcacagctctgttctagtgcaggactctgagaagttgaagaattctacactcaacctggatccagcctcaggttctttgaggaacttaaaaggagaatgccaggaggagctaggggtcttgtgaacaggagttgcctatcttgaatcggatagagggagcagacacttcacagcatatggtctatgggcctccatttgtactcttgcccctattctacaaatgttagggtcggtctaaccggacaatgccttagaccctaaagaagcttccagca

SEQ ID NO: 33465 - DNA, 1419 bp, Bovine  19866881229281
  misc_feature (1)..(1): n is a, c, g, or t
nacaggccaatatcactgatgaacatagatgcaaaaatcctaaacaaaattctagcaatcagaatccaacaacatattaaaaagatcatacaccatgaccaagtgggctttatcccagggatgcaaggattcttcaatatccgcaaatcaatcaatgtaatacaccacattaacaaattgaaaaacaaaaaccatatgattatctcaatagatacagagaaagcctttgacaaaattcaacactcatttatgataaaaactctccagaaagcaggaatagaaggaacatacctcaacacaataaaagctatatatgacaaacccacagcaaacattatcaaaaaaaaaaaaaaagacatggatgaaggactcttacgtgactatttattactggcctaaagaagccagtgtggaaaagctatattgcttagtccaaatataggccattctggaaaatacaaaactatggacaataaaatgatcagtggttgtcaggtgttcaaaaaaaaaaaaaaaaagaaaagcagagacattactttgccaacaaaggtaaaaaaacaacaaaaaaaagtaatatctgattttataatattttgaagggtctaccaagaggaacagtggcctcattgggaaattatttaaaattgaggtagggttaccctggttaatttgagattcctcttaacctcagggaactcagtgtaccccaaagtcattttacaaagattccaaatatctaaacagattgcacttgcatttcctaggacagccttgcttcaaagtttcctggtcttttgggagaggcagccagaatggggaagacactctgacacttcggcctcaatgagtcaactacttcagtgcatgtcacttatctggaattctgaagtggcctactgtactcatttatcgagattttctggaactactaaaattttgtagaattaatataaaaccctttctgtaatgttttcctaaactgtaaaaaagagatcccagttactatgtttttccttgttattctagtgtacaaaatgaatctattaactagctcataaatacaacttcctggcttgttgtgctttttggttttgattaagaaatctgtataaaacaaaggttaccgaaatgggcagtatgaatgtgcttcttattggtttaagaaaactctctctctctttttttttttaacattttgggtcatgggcagcagctgacttttaaaagggcactctaaatgaggtggcaaaataaatgagggtgtaacataaaaattgaaaatggaaaaaatgtttttgagaagccacatgacaatgtagagagaaatatgttacttctgtgccaacatttgaaccatattaaatttttatggaaattatcacgtgtctggtttataaaaatgaaaggagttagggacaa

SEQ ID NO: 33466 - DNA, 891 bp, Bovine  19866881290322
  misc_feature (1)..(1): n is a, c, g, or t
ncgttgatttcatgcaatctgcaaatacatatccactagagcatgtgtccttcagaggttcacagtaagacctcaataaatgcactttgcttatatgccagaagagcaaatatatttaaggctatgtaactggccctgtgcaaatatacctaaaagaaatcaaattatttcattttccgtgtatctctgtttctgaccaccatctaggcatacttaattccatacacatgaatctgcaaaagcataatacttctatgaagtatatataaagtctacatataaaagcaactttcatatattttgatgctctatattaaagaaaacagttttgcaaaaaattttgagcatcagtctatataccaatagacccgggaatattgagtttcttgttcactcagcactttataggctgtgcagatgatacaaaagcatcaccaggctccatcctgcctttcctgcattcatattacattccaagagatagacatacactcagaacaaattttgaatctgacccagcctgctccaacacccccaaactattttctatagactaaaggtgaggaaacaaatgttggagaaatcatcttttggattttagggattattttttggatttttaaaaagtgtcagaaatgttctctaaaactctagtttctctaaagggtctctcaaatttcagacagggatagatgaagtaaaagagaaataaggaaacgagaagcagaaaaacaaaaaaagagaggagagaaaaagaggctacgggtcaaaggagggcttagcacagacatggtcaggcctgtctcctccggtctgtcctcccacctttccaccggactccaggccagtccagctgcagttccctaattaagcatcattgttccactttgc

SEQ ID NO: 33467 - DNA, 1695 bp, Bovine  19866881322037
  misc_feature (1)..(1): n is a, c, g, or t
nacaggacaaatttggggctggatatactgattttcacctagtatttcaattctgtgtgtctggtagcagctacctagagggctgtggtgaggattatagactgccaggctcagctgaaaagagtggggtattgattagtgatgtctcaccttgaatgcagtatgtaggagtggtagtatgtattttgagtttttgccatttgtcctctaaccctaccaagagggaccacagggcaattatgttttcattttatacacacacacacacacacacaaatacacatctcacttgaactgaattactgatgaatctacaagcatggatctattcctttttatgatgatttagcttcaattaaatcaaatttcttctcctgattcacatcttaaaaccaagaggaatagagaaaagggtgtgtaagtgacttattttaaacaaatcaccacttcaaacccagatgttcaaaaaacttgttcacttgtagaggaaaggtactaaattatagctagttatctatctaatatagtatatcattgagtcctaaaatgtgactttttaaaatggctatgggctaggaacaaaatggcatagaggaatatgtgtgggaaatttaatataaactaaatcctaaatctacttcaatagtgtatactaatatttttataattgctgtatggtatttgacaaaactgtgttttcaaaataatcaagtgaaatgtggaagagctacaaagcagtatttttagaatgctggatgaagatgggtgatgttaatcagatttcaaggttcatcttgacctgctgcctcttgggacagtgatcaaagttccatgaatccttctgatgcggagttattcattagagttctcagcacataattatggactgtcagaagattttggttttgtgtaataagtgagtagcatgcctgcagcttgctgaggtgttagcttaataacctcataaggtaggttgtttttcttctccctcaagacctgagcaaactggcttttatcttgcccacctcatctcagatgaagataaaacattgaagacttagatttccttaaaagtttatttataagaggaaaaaacacagcttcttattttatcccctttctctttgttccatcttcttttgaatttgaagcataacaaattttgtttttatatggaatcttgattaggacgtatacattttttttcctatcacacatagttatatgcagtaggatattagtaaatcagtgctgataaacaacaccacatttaaattgctgcctgcgtgatgctcttactcggagatgcaattatttcccttggttttgacaagatgtcaactgtgatattcacagagcacaaacaactcctaagacactgtagtgcattagaaatctttccagaagaaaactcaagtatgtgtctggggttcccattctgactctgtcttctgtctttggatgtttgtttacatttagatactaactgcttgtgcacatgaagtggcatttaagaagaatgagtcattttatctggtgatcataattaataggggtttctaggaatatttttgccttcattttcaagtttgagactataaagaaattgagggtaattcatcattagtcattttattggtaatggtggtggaggcacttgtttataatagcttcaagagggaaattgaggcagtt

SEQ ID NO: 33468 - DNA, 865 bp, Bovine  19866881418721
  misc_feature (1)..(1): n is a, c, g, or t
ngctcctcggtccatgagattcttcaggcaagaatactggagtgggttgccttttcctactccagggtatcttcctgacacagggatcaaacctgcgtcccctgcatggataggcggattctttaccactgcgccacatgggaagcagaggtagattttaagagcctatgacataggtttttctaatttactctctgacaatatgttactatagttggggagatttcttcttaatcctgattttcttggcaagcttttttagttttgtgtcttccatcttcacagattgagtagtggaaatgagagattacagtacatatatttctctccttttcctctacctcctcgaagatctttaaataggtatttcccactaccctaatattatccttctgcattcagagaacaagccaagaacttacctgaagaagaaatacttaaaagtgggcatatcaacagtgctcatagaaagtaaagatgggcttactgcctcaggcttaattctgttgacagcaaatagcatgacaggacaggacagaaaagcgaagtcactgaggaggtcagaggaactgagtcctggaggcaggatcaccacatacttaatcagtggaccaacatggaaggagatgggccctgctgcctaccatctctactgaataaagaataatgcttctttattgaggtaaaaaaatggagaaataacttctttgcaatgtaagagcataagctttcaaatatataccacaaggatgaccttgtatattaaagcttttcatgtggaattccatttctctatataagcacactttaggtaatagtatttaacttgaaattcatcaagcagagcatactgctataccaggca

SEQ ID NO: 33469 - DNA, 1731 bp, Bovine  19866881484785
  misc_feature (1)..(1): n is a, c, g, or t
ntataaatttcttgcattattcttacaggattatcctttttctggccacaaactgaaatatgtgctgaaagatcagtaagtagtgggaaatccctaagggttgtctcataggaggaagaggtgacaagatgcccagtttctagtaatgctgtaggttgagtgtgcagatataaaggaggttgctaagtgatgtgtcactaaagcttataagctcttaccttgctaccacattcctttatagtttctgcctgtggggctgtgttgtttggaggaatttaactataccacgtacagaagacaggtttgtgtgttatcttaaaaccatttctaggttttaagaatgcaaacctagaatgcaaacatgcattcatatctcaccagttttaaattcaaatgtaaagttcattcaggctagatcactgtttccccagctccaagattctgcatgtgtgtgtgtgtgtgtgttagttgcttagttgtgtctggctctttgcagccccatagactgcagcctaccaggcccctctgtccatgggattctccagaccaaagcactgaagtgggttgccattccttctccaaaagaaactatggaaagaaagaaagtgaagtccctcagtcgtgtccgattctttgcgaccccatggactgtagcctaccaggctcctccaaccatggaattttccaggcaagagtactggagtgggttgccatttccttctccataccacctcataattcttatccacatctctgtaccacttacattatttacctaagattttctttgaactaattttctttttccaaatgaatgcattttaaaagaaaattatcactgttgcatattgaaaatcaataccgccccaaaaagaaaatcaataccactttccaagattatggtataaattaaaaaatgatgaaaacaaaacaattttattaagtgctacaaagagatcattgcctattgaagactctgagttctgggcttgctgtcttttagggatatactagcttaaattgtctctaagatctctgatttcagctttcaacacctatggtgttccaaattcttctcttcctactatttgtggatttcctccctcagttctcactcatgcaaactgtttctgcttacctcatgtacaaatgattcctttttaccaatgactgcctccatttttagtgttgagagtcactatggaagaaaaaaaactcaggaattctatgtaagaaatataaaaaggggggaaattgtgaaaagcagaaagtgattaggagaaggtgactcagacaaaagtcatcctgcttccttgacctagaatagtttcctctattttcccaaacattgtcttttcatgtccctgtactttcactttgaggttagaattaaaataagcatattctaaaaagacagatgcttctagcaggatgaagaaaccattgaaggaaaagaaatgaaataattttgatgagtgctgtaattggaaaaccaggggagtgtaagaggagagagggttggttgagaaggcaagaagaagtgaagtcactcagttgtgtctgactctgcaaccccacggctgtaagccctgccaggctcctctgtccgtgggattttccaggcaagaatactggagggggttgccgtttccttctccaggggatcttcccaacccagggatcaaacccaggtctcctgcattgcaggcagattctttaccatctgagaca

SEQ ID NO: 33470 - DNA, 1049 bp, Bovine  19866881872661
  misc_feature (1)..(1): n is a, c, g, or t
ntcagtcctgggtgttcattggaaggactgatgctaaagctgaaactccagtatttttggccacctcatgcgaaagagttgactcattggaaaaagactctgatgctgggagggattgggggccaggaggaaaaggggatgatggaggatgagatggctggatggcatcaccgacttgatggatgtgagtttgagtgaactctgggtgttggtgatggatagggaggcctggcatgctgcaattcatggggtcgcacagagtcagacacaactgagtgactgaactgaactgatgatgacaaagaatgtgatggtgcttcctagaaccatgcagtgcacatcttcacaactatgcctctagaagatctggatgagcagcttcatgaatgatcaacaatgtcctaaagaaccagaagctgagataatccaaattccgaagctggctttatgggctgtgaagctatgcagttggacagggcctcacaaatagaaaggctccacacttggtttaatactctgctgtcaccattctaatattcttaacaatttttgaacaaagggctccatattttcatttccactgggccctgaaaattatgaagctgatcctgactaatttcaaactgaattttctctggttgggtccatccccaagaaaaatatgtaacaaagatttgaacttttattctaaagacctgaacaggaaagtacagaggtaggtgacaaacaatttcaaaatggataatcacaaatcgagagaaaaacttttcatttcctggaaaaggcaggcatttggggtctgtttcagacccattatttgttctcaactaaaaagcacaacataaagccacattttgtgtgagccagtccactccttttcaatgaaagaaaattttaaaaaaagaaaaagaaagagagaaaggtcaactgacttcctagggaacagaaaaatgcagcctgaaaaaaaaaaaaaaaaagtttacccaactttgtccatgataccaaaacaagcctttgaccattctcagcaaaaacaggacagcactttt

SEQ ID NO: 33471 - DNA, 1528 bp, Bovine  19866882040664
  misc_feature (1)..(1): n is a, c, g, or t
nattctagactctgtcttgggctccgcaccttacatctcttaggctcatgggagaattggagtagccagaacttgtttgctttctcatcgtgctcagccaagaacttattcacctaatctaggcttaacagcaggactcctctgcaactaataatattaatgtttctttggctgatttttcatgtgtctgttgtttgaaacctgctgtcttctacttactttccactaattttcccttttaattctctccctctctctttctgaatcaggtttcttctgaaacattaccagtcttttctggacttttctacagcttctttatacctgaactcttaaagaatatgtgtttcctaatttctgacagtaccagagattgttttcaggggaacataattgtaagtatgactggagatactaataattttcatattgaaaaatgccacaggaggtttcgtggcaagagggcattctgtagcagtctcttaaaaatcttcaaagataagccatctctttgtttcttgaaagtttattctctttgccttgatgcaaacttactgggctttctaattaaaatgcatgagtatcacatagcaattcacatcaatcagttggcaacagttcatgctctgaagtcaatagtctttgagtaaatcttcctcagttacctttatgatttaaccacagctctttctttctttcttatttagaaaccttatgcttgtcaaattccgggatgcaccaaacgctacacagacccaagttccttaagaaagcatgtgaaggcacattcttccaaagatcagcaagcaaggaaaaaggtaattttaaatgaaaatttacccagccaggaaaagcacatttaaattcctcttgcagtactgggagcttctgtgggacattggtaatcctaatgcttctcaaagtgtaacatatttttgactctgagtagagaagtctttcatgaagtagtagcaaggctgtgattttcatagctgatgtaatcagatatgaatttctggggaggatttatataatagaagttgatgaaattggtgaaagtcaccaaaactggaaagtaacaaaatcaagttcaaatagtaaagaaaattgaattgggaaagcaacacaacaaatactctttctggtgataagtgcttaataaatatcaatacaaaacataaaatatcaattggctaaaattattagctctgactaagatggtaggatgagtatgtatagagcattgttccctttaagcttagaaaaaacacgtttcttaatgggtactatatatgaatgtctgagaaagaaattgaacctaacatcacttttgacatcattgagggcttagtgcacctctcagagttcttaaaagctgtagtatctctcagatttggaagaaatgttaaagatcagcctgccaacccacctgacttatcctcctgacttcataagatctcgagcaagtggttgacaatactgttctttaacatcttgaggaacgaagagcttactacctttcaggcat

SEQ ID NO: 33472 - DNA, 1579 bp, Bovine  19866881006062
  misc_feature (1)..(1): n is a, c, g, or t
ntgtgtatacattccccaccagtaaatgaacaagaggttttgctgccaaatatcctcacaagcatttggtattgtcagtgttccagactttggccactctagtaggtgtgtggtggtatctcattgttgctttaatctgtatttctctggtgatatatgatgtgctgtaccttttcatttgccatctgtttgtcttctttgatgaggtgtctgttaaggcctttggctcattttttatcaggtttttgttgtttttgagttttgaaagttctttgtatgttttgaataatagtgctttaacagatatgtcttttgcaaatattttatcccagtctgtggcttgtcttctcattgtcttgacattgtctttcactgactagacatttttaattttaatgaagtccagcttatcagttatttctattgtgaatagtgtgttttctgttgggtctaaaaagacatcgccatacccaagttcatttaggttttctcctatggtatgttttaggagttttattgttttacacttgggtctatgatctttttttgagttaatggttgtaaagactataaatatcttgaaaataattattttcaaaccctataagtcttgtgcttttgagctgtggtgttggagaagactcttgagagtcccttggactgcaaggagatccaaccagtccattctgaaggagatcagtcctgggtgttcactggaaggactgatgctatagctgaaactccaatactttggccacttcatgcgaagagttggaaaagaccctgatgctgggagggattgggggcaggaggagaagggaatgacagaggatgagatggttgtatggcatcaccaacttgatggacatgaatttgagtaaactccaggagttggtgatggacagggaggcctggcgtgctgcgattcatggggtcgccaagagtcagacacaactgagtgactgcactgaactgaactgataagacttgtgaattttatccctttatcatattttactgtaattgataaataatgtgtaaatactatcatataatataaaaatagcagggaagatacctcattgtgttaatttatgaagccacctttaccagagtttgtaattttttattttgatgaatttgtactatttgtatacttttcataacaaaaagtatatatgtatatataactgaatcattttgctgttcagcagaaattaacacttcattataaatcaactatacttcacttaaaaaaaaaatctattcttattgtcatttcattccatggccacttctagcaatcattgggatgtttattgctcttgtagtaaaattatgatatttacagtgcaataaatcattgtttctttgcctaatattagagaaaaccagataggtttaaagtggaataactttaaaggactatatgaaatacctttccaaatttataaaagctacacatattcatgacatttttttgttgtcctgacaagaagacatacttttcacgataaatcttcagaaaatgcatagaatatgaaaatgcaacttagagaagtcttaacgttagcatctg

SEQ ID NO: 33473 - DNA, 983 bp, Bovine  19866881085445
  misc_feature (1)..(1): n is a, c, g, or t
nagtcagacacaactgagcaactttcacttttacctattttaataggaagtacctcatggggcttccctggtagcatagttggtaaagaatgtgcctgcaatgtaggagacccagattcaatccctgggttgggaaaatcccctggggaaggcactggctacccactccagtgttcatacctggagaaccccttggacagaggatcctggtggactacagtccatggggttgcaaagcatcagacaaaacagagcaattaacactttcacttttcacctcatggggaagttatgagcattgcataaaatattacatctaaagagcacataattcagtgtatttgtatttctgtatctcctgcatggaactcttcttgcagatacttaaggcactttatcagagaattttttttgaccccattttaaatagcatcctccactttcccacctcctttcgttacctctgaaataacctaaccatacattaggaaaaaaggtcaatgaatttgacatatttcctgaccagatttctttacagggtcattcctactgacatgatcctcaagataaatgttattaaagaggaacctactttttaaaacttagacagaaatgttggatgcatacatcagtggaatgttaagttcttgggagacagaaactttagcagtcaatttgatatacttaagcatgcaatagtcctctaatctttgtaaaaaattttttttaattaaagaaattgtcatgcagctgtaatgttgtcatttatcagcataatgaatttaaactgaaggctactcttactgtgagaatgaactgattaactggagggactgcattgataataattagtcagaaaagtgcagtggtgcaaatcaatatcctttgtgctgagactttccttggggactgtaaaccataacaaagctgtcaggctgctgaaatgggggaatgttgtttattttgtgttgctaatttactct

SEQ ID NO: 33474 - DNA, 1047 bp, Bovine  19866880144866
  misc_feature (1)..(1): n is a, c, g, or t
nctttcttatgctcttcttgctattctttggaactctgcattcagatgtttatatctttccttttctcctttgcttttcatttctcttcttttcacagctatttgtaaggcctccccagacagccattttgcttttttgcatttcttttccatgggaatggtcttgatccctgtctcctgtacaatgtcacgaacctcattccatagctcatcaggcactctatctatcagatataggcccttaaatctatttctcacttccactgtataatcataagggatttgatttaggtcatacctgaatggtctggtggttttccctactttcttcgatttaagtctgaatttggcaattaggagttcatggtctgagccacagtcagctcctggtcttgtttttgctgactgtatagagctatgctctatgctgtaaacatacccacaaaagtaatttgttttcctgatggatattctaaaaatgtcaagagccatgaccattgaaactggacaggaattataaggaggtgaggcaagtgtcaggcagggcccaggcggaaacagggcagagaaggaagaaggaggttgctaaggagaagccaggagaacctaccaaccaagaggagctggagaggaaccaggaaaaaatggctctccattcttcagaccccaaattcattgctggtggcagtgagcagggcagggtcctttcagataacaggataaacctgtgagtctttcccctctctgtttggactaaaatatcacagttgcagtcttccaatcaagggctctgtgaggtttgcaatagcaaacattagagcacatttgagataatactcaaactttacaggtttttataattcacacgttctctttttcccaggaaagctctatctacagtcaatattttagtcagcctgttctcagtaaaacattgagccctcattaacaaataattacctttcatgagaaaaccaaacagataaggctaattaatttgccattataactccttaactttaaatatcatgttgcagtataattctt

SEQ ID NO: 33475 - DNA, 753 bp, Bovine  19866880544400
  misc_feature (1)..(1): n is a, c, g, or t
nctttttaaagtgtaaacccagatccctgtaatttatcgttctctacaaaggcattgtaagataggaaacaaattacaacctgcagttttctttctatgttgatctttttctattccggtttgatgtgttattttatgcacttatctgctgagaaacacaaggtgtgaaattgcacttcaggtgtgaaaacacttttctgtctcagaaaaagggctctccactcttcaaactgctctatggaaaaagctgtcagcaaactgacaataagggagtgaacttgtgtttctgcagctgtacagctacacagttcctggaggaaaagttcaatccagtcaccaaactgatctggcaattctgctgccagttatggcagtgggaattgaattaatcttgcaaacaaagacttgctcatttcacaaagagagcaatttccagctttctcctggtcagaagattattttctaattatgagaaaggctatttaaaataagccagaaagaaaaataccaatacagtatactaacgcatatatatggaatttagaaagatggtaacgataaccctgtatgtgagacagcaaaagagacacagatgtacagaacagtcttttggactctgtgggagagggagagggtgggaatgattttgggaagaatggcattgaaacatgtataatatcatatatgaaacgaattgccagtccaggttcgatgcatgagacaggatgcttggggctggtgcactgggatgac

SEQ ID NO: 33476 - DNA, 1256 bp, Bovine  19866880592957
  misc_feature (1)..(1): n is a, c, g, or t
nactatgggatttgtcaatccagtgactggacatcagcaaagaaacatgcagtcttgcaagtgggagaggttggtgacttgagccgacagtatacatcaggagttcagcagcattgggagggaagagagtgggtgggtttgggagctattgtggaggcagaatcaacagaacttagtgattgatcagctggactaggggtaaggaagccagtcttgtcaaaaatgcgtaaagttaaaaaataaaataaaatttaaaaaaagaaaaaaattaaattaaattaaaacttaaaaaaaaaatgcggtcctgagttctgatttgggacttgagcagatgatgctacattcacagagttgggggacactaaagcagctagtttttaaaagggagacatggtatttgtgagatgggattttacaagaaacaatgtggtattacattggattttgagcttggaagggaagtctaggtcacagatacagatcaggtaggtatatgagatggtccaaagaatatgtagagaatgagaaaagaagagactttttaggcataaatagtacttggacaatgaaaagaaaaacacatagggcaaaatgtatatatattgttacataaataaaatatggatgaagaatgtgcgtgtccacaaataccactgcacacatgccttcgcacgtacacacccctgcacatgtgttccttccgatgagcatcagcatggtaccccatggtgggccacatgcaacattaagcattaaaggtaatcatccctttcctgaagagttcgtgtaaggtgtgtgttgtgtgtgtgatagtcactcagtcatgtctctttgcgaccccatagactgtagcccaccaggttcctctgtccatggaattctccacgcaagaatacttgagtgggttgccattcccttctccaggggatcttcccaactccgggatcaaaccaaggtctcctgcattgcaggtatattctttactgactgagtcaccagagaagcccatgtgttagtccaacagcaacttccaggcctaaagatgctgctcagtatgttaaaaaggaaaaatgtactgccatgtagatattgcaattaaactagcaaaacagaaggcactgatgtcttctcatttccactgtttttttcctagatacatacggaaagctctttctcttcaattctgtgggtcaagagatgtctcgctgcaagacgtcaatccgccgtgggcagcccaatcccgtctataaggagac

SEQ ID NO: 33477 - DNA, 1534 bp, Bovine  19866880614113
  misc_feature (1)..(1): n is a, c, g, or t
ngcgccccaactctctgcacgcgggtaatataggaaaggcaaggaaggtgtgttaggaaagtgacttgctttggataaagctctttaagcgtttcttaagcgaaaggcatgcattctcgcaggtattattcataatgtttatggatacgtgttggttcagccgctcagacgtgcacacgtgtttcagcatgcacatccattacatcccagaggtaaataacccacactggcagggatcggagtgcctgggtctgcagttggcaaagttttgttaagcagtttttcaaggagatgagatttacatgtgtttgcaggcaacttcagttcactttcagcccaagaggtctgattcctacagttagtgtttctgctgttactggtcttgagagtttccagggctcctcagcagtttgtgaaccacccctggtttctcacctcacctgcttgtatttctgtgtattgacaagtagttgcccgcaacgtcctacttgcctgtgcttttcacatagttcccatgaggcaaaatgtctgctgcaaataaattaaaatgtctagagcactctacacagtgcaaaaatgcttctacttcctaatcttcatactgcctttgtgatgccggtgttatccttcccacatgtatgtgatgaaatgataactagaatgaagtggtctggtttggccaaataagtcctttgaagactctcaggagtttaatgatttaaattctggaggatgtcagttgtgaggccagaatgtgaatcagttttgaaaaccctgtttgaaattaacaagtgggggaatcagatggataataagaaagactcatttagatatttattttacactttgaggaattgatacttttatcatatattttgtaaaattacagctagcttgtggagtagtctcttaaataggagaaaaaaccataacgactgtttaactgtaacatcaaattatattgagttaatttcccttcaactaaatgtactttgtgaaatttagaagtggactggagaggaagggccaaaatagagattgacattttattttgtgaatttctgaataggaattagagataagtctaggaatctgaatggaattattaaattagtacccggttaggagttagattgggcaaagctctaaagaacagggttctgaaatataatggtgcagactgaccgatggccattagaagcatgttttccaagagagatcctagactggttttctttacccataatccgcacatttgaatcacctgagggacttttaaaaatccctacttttaaagactctagatgagactggctgtggacaccagcatcagtatttttcagctctccaggtgatcccaatgtgcagtcaagtttgagaacctgtagcctaaatgaagatcacaaggtaagggctggaagaagcataagtataggaagattcaggttacttgaaaaagtggggtgcctatttagatctgcctattttcccactggctgtagatttaaatgtaaattaaatttacatatcttaa

SEQ ID NO: 33478 - DNA, 2399 bp, Bovine  19866880683648
  misc_feature (1)..(1): n is a, c, g, or t
nagttaattccccaaattatactcatcggtaaatgagcttgcaggagtcggcaagaatcaactgtacctgcttatcatttttgaggttttattttctttatgattacaggcactatgattattaattctccacacatttatagtttcctaaaaaagtaagacacctggaaccctatcaattatatcactgtagtacaattatcttatctaagtattaaaacattccattaatacttctcactccatagaaaataaatatatcatttaaaaaattcaagaacctggaataaactttgatgtctttgtttcctttcctctattcctttttttttttttttttgaacgtatggcactgaaacaggtcgcaagcaggcagatgccctcggtgtcatctgagggatgcccacaagactaccaggtgggtcagcgatcaagactccgcctgccaatgcaggagatgccagatcaatgcctgggtcaagaagatcccctggagtaggaaaccacaacccactctagtattcttgcctggaaaattccatggacagaggagccttgcaggctacagcccatggggctgcaaagagtcagacacgagtgagtatgcacacacaggcgcaaaactacaacctcccccattcctcaggaagcgcctacatcaccaccttcattgtctaaagtgaaaccatccgaatgtctttccttggccaatatgattattttcagaaggtccttgtcaaaatattaatttccttgggagagtaaaagcagccgaagttaccatttcttgagggcctattttgtgctgagcgtgttttatgtattaaatctaatctttacaccagtcttctgtggtagctaacctgaacaccattttccaggagagagaatagagctgaagggacaggctcgctgtggcagagctgggataatacactgcacctgctaacaccaagtccatccccttcctcataccttccgcctgctcctccacatgtcaaacctgtcgccacctttgggccttctcctgagctgttccctttgcccggatgctctctataatcttcacatggctggatgcttcttgccacttgggtctcagccaaaatgtcaccctatgagtcctctgccactctaggtaaagcagtcaccttgtcatactccaccacaccaccctgttttaattctctacttagcacctaaccaccacgggctattcttgtaattacctctttgcctgcttattgtctgtctctccatgagagggtaaaagccctgtgagagccgagcttctgaatgttgtgttctctgccccaactataacacctagaacagagcaggcgctcaatatagatcgatgaatgactgaatggctttcctactgcctcctccacacattaggatggtatcaggaaagaatcaagtccagagagctagattcaagcttcacctctaactggctaggggctgcactctgggcaatctccattcagctcaatttctaggagtatcaggctattttccaaggtgtcagcaaggtgagctgtaactcaggaacaaaaaatcttattgggttggtggctcagatggtaaagaatctgcctgcaatgcgggagacctgagtttgatccctgagtcaggaagatcccctggagaaggaaatggctaccgactccagtatcctggcctggagaattccatagacaggggagcctggcagactacagtccacggggttgccaagagtcagacacaactgagtgactctcactttcaaaatggacccaggccacaggagacctggaatcacaggacaagaagagtaggcaagcaccactgattccatcgttttgtcttggactagcacagtggttcaccataaggcccagtacagctcaagaagagggtaaatattttaagtatactgataaatcctatctctttttacagggggttatcttaacaaaagacatcaagccaaggtcattcaaaatgtcccattttttttttttaactttccatctattgcaaacctcaaagaaacccttcaacagtacagacttctgaaaatacctaaataacacaaccaaataggtcctaaaatgggtcatcatctagtatatttcactgggagccagaagtgagaacatattttaagtacataccctaggaattagaaattaataacaacctcatttttgataccttttaacacctgaagccgggtatccgcagtcaggcttctggggaccgcgaaactgatgacactgttcccagcatgttgtcaatatgcacatatgtgcatttttctagaaacagggtccatagcttttatcatcactaaaacggtccagggttcaaacacggtttcagaagcactgcatctactagaaacccat

SEQ ID NO: 33479 - DNA, 1201 bp, Bovine  19866880695962
  misc_feature (1)..(1): n is a, c, g, or t
ncctttatttacaaagctttggcttttctgtttataaaagtaattacacgtcttcattcaaacataattacaaagtaaatacatggaaaattgaggagaaaataaaatagctataatcctgacacccagagatagaagtctaaatacgaggagaaacaaaattatttatggcttttagcatccaaagaattgcagattttagagcacataagatatttacaaaataattttaactatgtttggtttcccccttatgtcctaattatacttaatacttcacagcatgtgaaagaacagaaaaagaacagaaagggagaaaacgaaaaaatataccccttctttttcacttatattacaaatatttcctcatgtacttagtcatcaaaatcaagatttttttaacagttacatactattcctgatgccacttctatgaaatcctacaattagctagacttctgcttaagttgatctgaataagaggacatagtattaataatctagtcactgtactatgataaagatcagatttattagcttggaaaaacaagcatctctgatagcagatgattactaactggacgtggtgttttaattctgaatgtagattcccaaagaagaaatcttaggtcaggagtccccagacgctggggcactgactgatacctccagtcagatcagcagcagcattagattaggaataaagtgcacaataaatgtaatgtatttgaataatcttgaaactgttcctcccagcctggtccgtggaaaaactgtcttccatgaaatcagtccctagtgccaaaaaggttaggaaccatcgtcttaggcgattattcacttttttttcttgtttaagtttatttatttataattggaggataattgctttatgatatcatgttggtttctgccaaatatcaacatgaatcagtcatgctgctgctactgctaagtcacttcagtcgtgtccgactctgtgcgaccccatagatggcagcccatcaggctcccccatccctgggattctccaggcaagaacactggagtgggttgccatttccttctccaatgcatgggccccataggtataagtatgtataccacttgaacctccctcccatctcccaccccatcctacccctttaggctgtcacagagcactggggtttgataaagtcactttttaaaaaaactttgg

SEQ ID NO: 33480 - DNA, 730 bp, Bovine  19866880704609
  misc_feature (1)..(1): n is a, c, g, or t
nacctgaattttacaaataaaaatatgaattgcccaaggggagtttagtttgatggtctcaaagatccttcccatttcatcacacctctctgaaaaccaaggtgaggccctcagagtctccattcttcctctggaatctgccttcagagggcatgttgtctgggcattcttcttgtgaacattataagttgccaggcaaatatttttaaaatatctgtgtattttatatacctttacataccacatttgtaaaaaaaaaaaaaaagtccttctggattacttccaggaataactggagaggattctggttttgcttaactttagaactaatttttctctcaagagtaaatttctttggggacaaaaatagagaaagcgtccactgtagcccaaaggcaacactgcccaggtgtgatatatgttcacgatgccatgtacctgcaacacattgacaggactgaagaagtgactgtctctccgtgctcctacctgcctctcacctgtcattcccacatctacagagagaagacagggagcatagtagcttcagcaacacctgaaacttgaataaaacatcaattctcaggctacaacacagacttactgaattgcagattttgcaagtgggagccagcaacctgtgataacaagccctccaggagattctgattcagattaaaatctgagatgtattactttaaaaaaataaaaatactaggctcaaggattt

SEQ ID NO: 33481 - DNA, 2397 bp, Bovine  19866880710269
  misc_feature (1)..(1): n is a, c, g, or t
ngtgctaaatgtgaatagacctgcaaattaatgcagtttagctcatttgaaacccagtattgtaagtctttctctgaactcaaccaaacaggagttagttttgaggacatcatcatgtttaatatcaagaggcctacagttatttgtacattgtaaccttttatcctttaatgtgctgcaaatattttcaaagaaactttacagccaacattcaaaataataaacaaagtagattttaatagttcaagaaaatctattctatgtagcttgtgtgcttttcaatatctcatgtaatcttcacaacagttctacgagacagatattattgtttctccccattttatagataaggaaactgaggcacggagaatgtaacacaacatgcccaaagtcacctaggctttaatcacaggcagtttgtttccaaagttcatgttcttcaacttgaattaaatgatatgacatctctgatgtttactaataaccaaatgcaacagatacattacgacctcaattttcttcctttgcagcttttcacttgatgaatacaaaaggccactgtcgggaaatccattttattgcatttatgcttgacttcaatcaatgataacacactctattcactaacagagagaaaggttaaaaccacctttgaatctgaataacatatagcaaatgaaaatctctacaaccatgctgcagactaatgaaagctacattctgctcctggcaaggaagtgaaacaggtagttcaatgctaactatgtgagagagaaagtgagagcaataaacaaaatttacagcacaaaactagatgggatttgggctggtgtggggctggcctccatggatcttttattcagtattttccaaccaattaaagtcaatcaaggccacacttgtctcagtacaattcgtcattcaaagacatttcaaaatgatttctactcaacggattcatctctttggggttgaattttcaatatcccattcagcaagctctattatagcactttcagaagtaacttcttcccctcacagcacaataaatgtggcaaaggtaccattctactgaaaaggaactgatgggaaaaaaggagtcagagaaagatgtacaagaacggctttcatctaagcagaaagacacatttcaatttggttttgtattgaatctttccaataatggtcaaacctccctcacagagctaagcctccccaagctttccggcactgtctgttgatgcccagccgaggaagagagtgggaggaacgggtggtggagggtggtcacctaccagctgctgttaaaatctgtcaactggcaaatgaagccttctgatttgtgagcaatttccaaaacaaaacaaaaaaaaaaaatcagaactaccatctgggaagtgggaagaagataccgcttggcaaaaatgtttcataaaacatgagcaaacacgtgaaacacacacaaatacaccgatgtgtacacacacatacacatacagaaaggcaatgccctcagaaaaaccggcaatctctccctactgctgagacttttttccccaattgcctaacatgaagagggagctgggagatcttctccagagagtcagcaggtgacagaaaaactggattctgttggaagtcccactgctgactcactacctgacttcaagcaaaccacctgttatgaatgtagggcatagtttatcaatttgcaaagcaggtgtgagcattctcaccttctgcaaaccatgcagtgcatgtaaatgaggatttcaaagaactgtactattctgggaatagaattcccgaaaggaagtgtaacatatcatttttagagttccacatgatctccacagatgcagcaagaagcttcacaatcaagatcaaaccactggtgggcatcgctatttgctcacacaggtgcagcagaaaagcctgacgtctgttcccagtgggaagtgtggcacagccagtctaggggaaggtgatggatgctctttgtatctcctttcacctcacattcacccaagacattgctccaaaaggaccacttcattcctgatggtgatgcttaggctggacctatggggaccactgagatgaaaggtaattgtgcaaaacatcacacactgcattaaatgctggtccctgaacgaatttttctctgtggaatagaccaatatttttgctttaaagaaatagctcccagaatactgctgctgctgcttctgctaagtcgcttcagttgtgtccgactctgtgcaaccgcatagacggcagcccaccaggctcccccatccctgggattctccaggcaagaacaatggagtgggttgccatttccttctccaatgtgtgaaagtgaaaagggaaagtgaagtcgctcagtcatgtctg

SEQ ID NO: 33482 - DNA, 1208 bp, Bovine  19866880742522
  misc_feature (1)..(1): n is a, c, g, or t
nttcattctggcatactggaaagagaatgggccttgagaatttttaattatgtataaagttattaggataacaagggactattcccaagaagttggtctacaaattatggcaactgtgaaaccaaactcattcaagccagtatattgataaaatcaaacagttatctctttacctttttcttttttaaaatgctatatgctaggttgtacagatttctacttctctggttgattgtgcagagtcaagcaaccattccagggaccccaaaatctctcttcctcaaatctcttacttcctgacctcaccactagatgacaatctttttttgtgtgttttggctgatgagtgagggtaatactttgagttaattgttgtgcagttgtatctttctagatgaccaggtaagatcaggagcaaaacattatttataacctctgagcaccctaatgcgattcttgggatgcagtacagttaaatgcctgtgccaaacaaatggaaaagaaatttcagctcaagtatttattataatactcagaatttaattatctggtatttgggatgttttctaaagttcttgaaaatcatgctgtcacttctttataatgattcaaaattaacactttactaatagaaatttgaccttttcttcaaaaccatgttgatgaaaatggttttaagactacattctttattaagaccataattaataaattgcggaacagctgtcagtctttttgtttggagaaatgaatagtctctcttaaaagtgaagcttcactcaaccaaacttaatacttagacagtgctatctatgaaatgccatggtcctcgctggatcagggatggatgggaaaggggtatgaagacactgaaggtattttgacataaaagttgagatggtacttctttacacattagacagttgcttcgaatagccttttttatgaccttatatatacctgtcactttgctagggccaggagagacacagaagaggaatatagggaagatagggggcaaagggtaagggttatttgggtgaagcttatttattgagatgatgaaatttcaagcaccacaggactcataataatttgtgggtttttgagaatattcaaaataatttgagacatttaagccaaggtaatgcccagatctcatcatttatggaatatttgactatgatatataaggcttagagtgtcat

SEQ ID NO: 33483 - DNA, 1813 bp, Bovine  19866880775611
  misc_feature (1)..(1): n is a, c, g, or t
ntgtacttactaaataagtacatatttagtaagtacatacttactctggaaaaaatatttttcaaagactgttaaacaacttttgaaataacccttaagatgccaggccacatgcttacaaattcagagaagttacatgatttgccaactgacagaactagaatcttttgattaaaatgctctttcagtctagcatctgaaagtgtcacaagactgaagaaatatatattaatggaagtttcaacttttctctaactggaattaaaatcccttagttctctttcagtagcctctttgatgtctgaatacaggcataagcaaagcagatacccaactaacttcttcttctaaccatctacttaatggacaacattcagaaacactgcattattaggagagactgaattttgctttcaaaaaaaagtaagcagaaggcattttttcctcttttctttttttggccatgatacacagcttgtaggatcttagtttcctgaccagggaatgaacccaggccctcagcagtgataggagtcctaaccactggatcaccagggaattcccaatatttttttcctactttaagaaatcttttttcttttctttttttttggccataccacatagcatgtcgagatcttagttccctgaccaagacctgggattgaacacatggcccctgaattggaagcacagagtcttaaccactggaccaccagggaagtccaagaagccttttctcaagtattggaaattatataatactctttccactttctggagactgaggaactttacggacaatgaaacagaatttctcattttgaaaaccaatctctttcagataacataccaatttaggcattgctgtaaagtgaaatgctctgtctagtcgtagcttcctaaaaatataagctgcatcaaaatgttgtgcatttatcaaatcttgctgaaattttaaaatttcatcccaatccttcagggcaactctaatctacaaacaagaggaataaaaaaattgttaataaatgcaaatcttttttcacaaatgtattataattttgaaacactggtatttctctttaaaatcagttggctatgaaaatactgcacctgtttcatatttcagctggaggaaaacaattcacaaatattaccttttgttttggttgacacagttgcatgttatataatccatatagcagatacaaagcaccaactctgatctggaaggtatatggaggtaaaaagtatcgccaagccaaagtcaaagcttcttttgtaaacgtgttcttttctaaatttctcattctaccactagaaaacagaaagaacctatattatgactgtgaaaaaaaataacagaagagatttacacttgtttaaatagcagctgctagaaagtggacaggcattccacacctgatcctttcatgattcaaggataaagacctaattttctgctgtgtttcttacagtgaggccctagatactcttgacgcatcttccaaaagcatcaactttactgctgaattgggagcaaaaggaccaggggttacaactaactactggtttaagaattttaaatatgtaatatattaaaataaccatggtaatgttacagaataaaatacaaagatcaggagcattttgacaaaataaattgaactaaagggtattatgctaagtgaaataagtcagacaaagataagttctgcataatctcacttatgtgtggaatctaaaaaaccaagaaacaaaactgaaacatataaacagagagcagggtgcaggatgtcagaggggaagagga

SEQ ID NO: 33484 - DNA, 2100 bp, Bovine  19866880785606
  misc_feature (1)..(1): n is a, c, g, or t
ntagcacttgcatttctcttttccaaactatgggatggttatcaaacatgtatctccaaaggtgtttgtagccaagaagaggcacagggagaagagaaggtatactgagctagatttcagagtggaagaagagtacattctgctttgcagtgtattttatacttggaagaatgagagaaaaccagtactgcggaagggaggtgtcgctcatccctggggcacaagaggttgtaggtgaggaagggagaccagtgaaagtgcagaacaattcctcctccccgacctctctagctttgatgtactttacgtggcttatatcaggttaatattgtcaacgatatccctgaagggatagcagaatcaggaaatcacagtctgagggttgtatataatgtgttcaaattaaagggcagttttctttaatttgccttgtattggtaaattgctaaaatgaacctcgggatttcttaacatcagctactagaggcatgctcctctcccagttgcttcctttctgagtcacagctcagccaagctctgtcttttcagtctgttggaagtggagcttatggttctaatactctctcccctatcttttttaaaaattttgattggtgtatagttgatttacaatgctgtgttagtttcaggtgtacggcaaagtgaatccgttatatatatacatttatccactctttgtttttaaagattcttttcccataaagaataagtagagtaaagttccctgtcgtatatagcaggttattagttatctactttatactcttgatactgatttgttcaaaactatttggaagaaagcaacaatttgcagtactggttgaacccccttgagaaaggtttccagagtgtatcaaactagaatccttcacagtttcttgatagaattattttaaatactattcgacatagtcattaaataactatctactaaggtaatctttatgtttctggagttcagtgtaacagttataatttctacatgttttgctaaataccttaggttggaaacaatggaagatcatgtgtaattaattcaagcagttggttcatgagtatttatgtaatatttgaaatttaaatttatgttcttttttcccatcaaacttcattactgtaaatcagcaatgtgacatgtctcatgattattttttccttattaagtgggccatgtctaaaagtttgtcccttcatggttgaaccctttggattgtatttctccattaaagtttctgtctttccataaagattattctacagttgagtggataaagaacattcctctacattaacacttttcaaatcttgtgcatacaagtcatgagacatcaaattagaatacaaactctttttagtaggcctggtgtggagtctgagagtctgcgtttctcaagtttcctagaggatatgggtgctgctggctcactgagtacactttgagtagcaatgctctacatggcttcgagaatgaaaatatacactcaagtctacagtcttactactttcaaagcatatgcattcatgtctgcttttccatggaaattttttcttcaaagaaatgaaaggcaagaagtatcataagctaatttttcaaattggccacaaatatgacaatattctatacagtaaaatccctagaaaatgatttataaattttatctacatcaagtgcagaaaggggataaggaggtagtgatgtaccattcttgaggatccacgtgggttgaagaatttgggaaacctgaactgaaaatggtacctggaacttcatcttcttgtcttgaactctttcttgagttttatgccatgaaaagtcctccctttggtacagacattctgtttctcttaagctgttggtgtctgagtgaggggtggaggattggtgtgaatgagggagtcacctgaattgtctgatttgagcatgccaagtgatttttgtcaggctctcttttggtcttaaatttggtatagctattgtgaaatatagtgccataagtttgtcacaaaatgaaaggagaaaagcagaaatttagttctgtggaatgcactaaaaaaccaaacagatggtgttctacaaca

SEQ ID NO: 33485 - DNA, 993 bp, Bovine  19866880789339
  misc_feature (1)..(1): n is a, c, g, or t
naatgtaattagggatcttaacagtggcctaggctttatgggagacaaattggttgaggtggccctcagggagtgaggagctcccaggggacaaaaactgcaggagccatgagtggagaagcaactggaggccgccccctctgactcacaaacagagcaacagcctagagtgttcctagaagaggcgatttcttcggcgcacgtgtactggggactatgtctgtgtgtgcgtgtgtgtttgtgtgagtgaacatcttctgcccttgtcctgtagggctgggcgaaccaggaagcgcctcgcagaggaagagatttagtagtctcggccacgtttgtcttcagaaccgacctttcctgctctttgtgcaacaagacacacctctccgaggaaggaggcggacatcattactactgccctattaaaaacacacacacacacacacactcacacacacaacaaccgtgtaattactctccgcaggaaaggcgcacaacaggatgggcccgagctgaactcgggatgagccatccctgtaaagattaggaaaaggaacctccgcgccatgcacccgcctccggccagggcctctcccagatggtcaggctgggttgccagaccacctcctagggtgagagggtggtcgcgggcgtctcccagccacgcgggttccctgttccttctcctacccgccttccagctctcgctgggtctgtctcccacgcctcaggtgtttgctggggctgggccacaagcccttccctttttggcctgcacctggggtaacctccagccccgagcgccccgccagaccctgctgcagcgagtgcgcacggagcggtgcgagtcgactcgcgtggggctctccgggctgcgtgcgccccgccactgcccgaacacagggccgggctccggctgcgcgccacgcccccgggcttcgcacggcgcgcgagcccttggagggttctgtaacttgagccgagcggctcgaggct

SEQ ID NO: 33486 - DNA, 1865 bp, Bovine  19866880855807
  misc_feature (1)..(1): n is a, c, g, or t
ncaaagaattgatgcttttgaactgtgatgttggataagactcttgagagtcccttggactgcaaaggagatcaaacccagtccatcctaaaggaaatcagtgttgaatattcattcgaaggactgatgctgaagttgaagctccagtcctttggccacctgatttgaagaactgattccagtggaaaagaccctgatcctgggaaagattgaaatcaggaggagaaggggacaacagagaatgaaatggttggatggcatcaccaactcgatggacatgagtttaagcaagctctgagagttggtgatggacagggaagcctggtgtgctgcagtccatggggttgcaaagagttggacatgactgtgtgactgaatttactgagaatagttacaattatctcatggatacatcctagtaaagttctctgaagtatgtttgagtcacttgcctcatctggtgagattcccagaaggtgttaagtttttgatactggtaaagcaatagtaattataaagccatgttcacacagacagtctaagaataacattttaggaattggttttatgaacatgtatttagtagacaattgttttttggaacaaatgtatgaaatctggatgaaatgcagatatgcatcccttgtcacacagacaaatatgcagattaaatgaatagaacaactctgctgctgctgctaagtcgtttcagtcgtgtccgactctgcgtgaccccatagatggcctcctaccaggctcctctgtccctggaattctccaggcaagaacactggagtgggttgccatttccttctccaatgcatgaaagtgaaaagtgaaagtgaagtcgcttagttgtgtccgactcttcgcgaccccatggactgcagcccaccaggctcctccgtccatgggattttccgaacaaaagtactggagtgggttgccattgccttctccgaatgcatcttgacattactagtattaagacagcattagaactgtgagggaaaacttattgttcctttgtgtttatagatttgatatccaaaaaagtttagtaattcatcagttaagaggcatgaacttaagttatgtgcacatttggctttgccaactacccagtgtttgaatcttgatacacattaatattttatttattgttgtatcatttctttgctcagttttgaaacatcgtcatcagagcaagaaataaccatcaaacaggtatagtggccagataaatgaaaaacaagctcagagttgtgtgaagggaaattttttcaaagactaatcttagggtggtagtgtagagaaaaacactgattttcaaaaatatagtgatctactaatgatagtaaattttatcaaagcttacttgccatgtcagactcaactgtctctgtgttttgttttttactagcataagtttttttaaaaaactgctttgtttttcttcatactcaggtacttcactgcacaggccatattcatgtatacgataccaacagtaaccaatctcagtgtgggtataagaaaccaccgatgacgtgcttggtgctgatttgtgaacccattcctcatccatcaaatattgaaattcctttagacagcaagacttttctcagtcgtcacagtctggatatgaaattttcttattgtgatgaaaggtaagtgaaaatataacttgaaatttttaattagtccacaaaattgttttaactgttgactatagtgaagactgaaagctggaagaaaaatagacctctttaataaatctagttctctagttgtggtgtgtaggcttccttccacttaagttgaatacaatcatacatcctagaattttgtaatgaaaggtaagt

SEQ ID NO: 33487 - DNA, 1725 bp, Bovine  19866880893684
  misc_feature (1)..(1): n is a, c, g, or t
nagaatttacaggcaagacagggatgttattatgggttaactgtccatgtagtgtgattcaccagcatcagaaaagtatctcccattggacactccagatggtacatcaaataattagaaattcctttttatggattagtggtttattgctgttgggttttttttttttttttttggtaaaatgcaaatgccctgagaattagaacatcattcactcacttaattcttcctttactaaacatttattgttactatctatgagtaatttgctagatactggaataaaacatgaataggacagtccttgttctcactgtgctcagaatctaatggaaatttggcagagttatcaatgactcctgaactggttgacagagccatggtataatatcacaatatactgtggaagaatatataacgttcttggagaatagaagagggaaggaggatggtgaagataaagaaagactcttcacaactgaaataagacctgaactgaagataaatgagatcgcaacaggtggataaagtacaggtgaagtgagggtagaaattagactttataggaaaaaactgggcccttcatcagatcatatccagaggacatgaaactagagattattgtaaggtcaaatgatgaaggacctcaaataccattctcagcagtcaaggaaggattaagtggaggagtggctctttaatatttgacccacagaaaaatcatcctgagcagtatggagaattgagtgggaaaggcaagactagcgaatgaatcggttaagagggccttttaaaggttttagcaagagattaggaagtgtgagctaatgaggtagcagcagtgagaggggagaaggtggagggattctaaaagtatttcgtttctgccacacaacagtgtgacccagccatacgtatacatatgttccctccgtcttgaccctccctcccaccgctctagattgtcacagacactgggttgagctctctgtgttatacggcaacttcccactagctatctgttttgcaaatggtaatgtatatgattcaatgctcaattcatcctaccctttccttcccttgctgtgtccagacatctgttctctgtgtctgagtctctattcctactctgtaaataggctcatcagtaccatttctctggatcccatatatattcattaatatatgattgtttttctctttctgactacttcactctgtataacaggctcttggttcatctacctcactagaactgactcaaattcattcctttttatggctgaataatattccattgtatacatgtaccacacccctcaaagcaattaaaaataaaagaattatttctaattaaaataaaaataaaaactaaaaataaaagaattttaagacagctggcatgagggataaagagagtattgtcttagtactttagaatgtttgtactttcccattaaaaataataaaaaatttagagaagtaggaggttactggacatgaccttgtaatccatttgctgtggtgaagactcaaagagggtgtgaataattgaaggaggagtcctaattagaatcatgcccatgttgttgtcctgggtgactggaaagaggttctagcatcagctgagatgagaaatacagagggaaaaaagtgtgcaaaggaaaatgattgaattttgttttaaacatcttgagacagagcctggttgaggggtctgaggga

SEQ ID NO: 33488 - DNA, 630 bp, Bovine  19866880937098
  misc_feature (1)..(1): n is a, c, g, or t
nttttcaatggaacaggagaggatgggggcgggaaggagtggaagctcgggtgcaagtgggggcgaccaagctgcggctcatttctcttcccggggttttcaggctgggggaagtccacccggagcagggcacgcggcaggctgggggtttgaggcgggcaggagggcgatgcgaggcccgggctgccgggaaaggaggcgagcagggcccagcccccggcccccggcccctgaaagcactttagacgcgtctcccacccccacgacaagatggcgacgtggacagtggggagccgggccggcgaggctgggggagaaagagaggaggggagagaggcagaaacaaaaaggcggccccccggaacgcggaggccggcccgccagcccccggcggcgggcgggggcgccggggggagaaggcggccggcggaggggagtgggcttactttttcttgtcgttcgcgcccccggcgccctccatggtgaatcggtgcccgcgatgccttcacggcccgcggcccccaggctcgctccggcctaagcgctggctccctccacacgcggggaggggagaaaaggcacgtccagaggtggggggtgcgaggcgggaaacccctcgtgagatcagag

SEQ ID NO: 33489 - DNA, 657 bp, Bovine  19866880954625
  misc_feature (1)..(1): n is a, c, g, or t
ntacttaactatgaagtcatgatcccagccttttttgaaattagctttcaaagcagtaaaatgtttatttacacagcattttggagtttttaattttaaggaatttagaggttagaatttagaattttagaaagggtttttgagtctaaccttcttggcaggtttgctttttatttagtattctggtgcattaataaatagtatggttattggtaaaagaggagatggtttccttatcctggttttggggtaaattctgcacatatgtccattctgaaagatctcgaaaggaatctggggaattgaagctagaattactatagttgcaatgttggccaaagttggtttatggaaaaccttgagtttgagtctgttggttagcgcatctgatgttgaacagggagaaggttctgagttagggggaataaccagaaagaagtaaagttgcaatattttagttgcaaaagtccaatggagccacctttcaaaagctgaagtgagaatgtttattgctgagaaaagatggtaaatagcctctttgaataggcattaaaagatgtttccttgacttaagtttgaacatataacgcattggatgtgaattattctttcatgctttcaaagaggaaacaattttataaaagtgcatcatttgac

SEQ ID NO: 33490 - DNA, 1125 bp, Bovine  19866880979435
  misc_feature (1)..(1): n is a, c, g, or t
ntgcatgcatacatatatcacatgttatacataaaccacactgtgtgtccagagagagttctcttgatccactggacccaagtggtgataatttagaagtactgcctccatccagtatattctgtaacccaagtaaattcagagagatagcaaccgactttctccaaaacaatgttagaactaagttgccacttatgaaaatcaaaggcaatctctgacatacacaaagaatgtgtcttcaaccctagaccactaaggctcccctcgcccactctcaacctcacacaggaagtcatctagtgctgaacagaaatttcaaacaccaggatgaaatcctaatgctgatgacaagtttcaggggagaagaaacaggtcttcctgcctcttcacctgcccactgacacaggcgttattggggaaaaaacctactaaaagggatgccaatgtaactggcctggtacacagagcctctgctgccctgttcatttgaaacagtaagagcagaactagggttgctggaaatgaaattgaagcacaatgaaaccaggctctgtagcaattaatttttctatcaaaagattaaatcatttctgttttccccagatctcagctccactgagagaattctgcatgagtgtaattccaactaaatatatatatatatataaagcttgagaaaatgaagatactagtcagacactgtgttttgcatgaatcttgatttcagatgaacatgctggtgggtgagtgtcacataaggtgaatctgcggatgcttccatccataggcttttgagctattttcgcggttcagcttttagtgctaacagctctgaccacttgctcagaagtactgcgactgccttgctctgctcaaatcaagcaaaggtttagcatcaagctaccgatagcagcatctctaaagttagaaaccaccataggtttaggtagtttgggtgtcatttcctgacctccctatttttatgagaaagggcttataacaaaaacccagtgcagaagtagaccacacagtaaaaataattagagaaaaaggataacagtttccaaaaatgactgaatttttctgttgcgtatatcacctaattgtcacctaatgtcggtccca

SEQ ID NO: 33491 - DNA, 1285 bp, Bovine  19866880982287
  misc_feature (1)..(1): n is a, c, g, or t
ntgatcagatagtatcaggaggcagttcttcctgacctccgggctcctttgccagtggtgcagacttcactttcagcttggggagagttccccctagggtggcagcagcacttccagggttctatcattgaagctccaagtccaggagaaggttgcttccttctttaatacctcaaaaagcatcttggaactggctcttattggaccattagggctatgcacttgtcctgtggcccagaggatggatacgctcattgacttaattagagccaggtcacagggctcccatactgtctatgtactgttagtcgcccagtcgtgtccaactctttgcgaccccatggaccgtagcccactaggctcctctgtccatggaattctccaggcaaaaaaactggagtgggtagccattcccttctccaggggatcctcctgacccaggaattgaacccaggtctcctgcaatgtaagcagattctttaccatctgagccacagggaagccctatactatgtcctaaacacagttaaagacattgggcacaattaccagaagagggaaatgaatgctgtataagcaatacagcagacatccatgtaaggatggaatactctaggacagtaatcttaacttttaggatcacaaacccctatgagaatctaatacaagcgctgcatggacgaaaatgagcaaaagcactcacaagcatacaaggcagttgtagactaaaaatgtatgtccttcacgcaagcagccttgcaaagagttacatttcttgctcatttttcttatttttataagaaattaataagttttataagaaaattataaaattaataagtatttcctgaaaatgatagaaataaatccaaatttccccttccccaaaaaatctgctcaaaggtaaatttcaacaaaagcttgaaggtttttacttaaatacaaagttgaaagtatgagatggttctgaaatagaatgcaagtcatctttaatatttaaccagtttttcattttgataccaactggtcctgaggaaaattactcaaaaagacacagcagccaagaatcaaagcccccatatttcaccttgacagacacacaggtttgtatcaagaagcacaagaatgctccaagatttgggttgaattcaagttgtaccatttcctttgtcctgagattcatgagatcatctttggcaaagactgtatcattgatgcactgatgtcagcagggagaggattaataatccatgctttaacacaaaggtcttccagtagaagcaac

SEQ ID NO: 33492 - DNA, 1228 bp, Bovine  19866881054974
  misc_feature (1)..(1): n is a, c, g, or t
ntgaaaagttttaagaaccttgtgggctgtgccctactaagcagttctggctttaaggtgaactttaagagatgccattatataatatgatgctaaaccttgtagttggttcatgagcctcacctcatgtcatactgcagagggacctttggtaggattacagtcctcattctttctcactttctttttgagccaacctgctcctccacatggcagtcttatagaggcaagccctacctttgtgaaagtgctagttgctcagtcatatctgactctttgtggccccatgtactacagaccaccaggttcctctgtccaagaataccggagtggattgccatgcccttctccaggggatcttcccaacctgggaatcaaacctggatctcctgcattgcaggcagattctttaccatctgagaaggagacctgaagttatccagcattgcctatgatgagtacagtggatctaattctcaggtacactgttaggaagctcatcacaacccccacttccaaaccatcttcttcaacccaactttaccagtagaagtgcttatattttagttttctgctgtctgtgcccctcacagttggttctgatattggtcctctaaaatctcaacagttggtgacttcctatatcctgccccagtttctctcagccatgctggctcatccatttactctctctctcatcctcagccacacagttcctctgttctttcctgcctcagtgagcacacaggtgcagggagattgtgaaacccctccaggctagtggatgagttctgtaatgctctgcctgatggttaagtggtgagcactcctctcaggagcattctgtatgcctagttgttatttctcattagaaataaatttagttgggaactctatgcctgacactctcatcctgcagaattttggccagaactctctagtgtttccaaaacaaaactctgccttaattgcctctggcaaaatatttgaaagtaaaatccaaaagcaagggaagtatattgctgacattgatggtacccaatttgatacatttgcctggttaaggaacttatgtcagaaagaaatgaaaatagaaattcaagtcacatgagccttacttgggcatgttctctggatttgtgcagaaaagcgcatgagtatattcactgtcctctcttgaggaaaacagagtacagctgtacaaacatgttcaaacagcttccaagaa

SEQ ID NO: 33493 - DNA, 1218 bp, Bovine  19866881089986
  misc_feature (1)..(1): n is a, c, g, or t
ntgaaagctctccgtgttgctaacttggtaagttttcagattctggttctagatgtcttttccttgaactattttggtatataacaactgaacatcctttcacgtatagactgagacttggtctcttttcaatcactttgagatcatctaatgatagttattgagaaaagtaaagaacaaatcgctgaaaaggtgacttactgtagaacacatccagcctcactgttaaaatgctttttgccccacactgataaatccttgggttttaaagtgaaagggcactgttagaggtcacctactttactgctgaagaaaaatgaaggaattagggccacttagctttacattttttcactagtacttttcctttactcattcaacaaactttgatagtgtctctaccatgtgtgtgtcctggaactagaaagtatgaacacagtcccagcactgaaggtctcacagtcctttggaagaggaagcctggccaataattaccacaacaagtaaaaccttctaacataatggcacactcaaagcactctgaggccacacctttgtagatgaagagttgactcattctagaagatatgtatttgccaggcagggtaggaagagagggcatcctggacagagcaaacagaactcaggaaggagcacagtcactttggaaaacgctcagtgtgttagtgtgatgagtcagtaggacgttagaatgaggagtggtgaggactggcggagtttccactgtgggtagtgtcagtgggaatgctcacactcagctggaccttcagttagggcaaaatgtagggtattgaaatagttccaagttggttgaagaagagccattgatctgaggcccctgcaactgtcctgttgcacccctagacctcctcagagctagtgattcagcagttgaagagtcgacacccagcaggaggcccttagggaaccccctctggctgtaagggcaggaaggcagtggtggtatcaattttttgagcttctctcctcttggttgccatggtaaagaatgtaaactttatcctacagggtagaacttgaaaaccacatgcctccaggagtcagacagactacacagaaaggagtgaagctagtgggtataaaaagagagaggtgatgacttcagtgagctggaggcattcaaattaatttttaaaaaattctgtgttaacaaacatgaattaacctttgccattg

SEQ ID NO: 33494 - DNA, 878 bp, Bovine  19866881092391
  misc_feature (1)..(1): n is a, c, g, or t
nttttttaaaaatgagttaaaaaagggatacatcttttctcatttggtcaataatcccaacctctggagaagtcagttgatttaaaatctgaatttagtttccactcagtatgtgagatttatgcgtgagctctgctgtcagcaaaatgtgtgtcctctcccctgctgacgttacaggctgcgtctgcttttggagataccatgagagcaacaatacaaaaacacaattttatcaggcctttaaaactgtgtgatggagacaactatgtagtttgcagataatgatacttaccctgagttgtatgagggtcttttagcacttttcctttctggggcttaatgttctgtagggaatctaataggaaaagtaggattaaaagggagaaggagtgctgaggaggagaaaaatagcttgagatttagtatcttttctggtgagcccaagaatagaaaggaactaacttttcatttggtaaataccacttaccatctcttcaacaaaattatgctgctacccatttagttttcctacaaaaggactgaaaaagcaggttggatcaatgaaaagagcataaatttggaggcagccaaaatatacttgaattccagcctggctgctaacaactagtgtgacttttgggtaggtttttagacattttgagaagtcagtttccttgcatgtaaaataagggtgaaatcatcttacttacccctcagtcctcaagttcagtcgctcagtcatgtctgactctttgcgaccccatgaattgcagcatgccaggcctccctgtccatcaccaactcaaactcatgtccattggagtcggtgatgccatcccagctgtctcttccttttgttggccccttctcctcctgcc

SEQ ID NO: 33495 - DNA, 1482 bp, Bovine  19866881097758
  misc_feature (1)..(1): n is a, c, g, or t
ngagatcagccctgggacttctttggagggaatgatgctgaagctgaaactccagtactttggccacctcatgcgaagagttgactcactggaaaagactctgatgctgggagggattgggggcaggaggagaaggggacgacagaggatgagatggctggatggcatcactgactcgatggacatgagtctgagtgaactctgggagttggtgatggacagggaggcctggtgtgctgcgattcatggggtcgcaaagagtcggacacaactgagcgactaaactgactgactgaactgatacctaggtgacagtgataaagtttgatatatttttgaagggagaatcaagccaataggtatggctgatagaatggacacagggtgtcaagagaatgaaatagtcaaggacaactgcaaggtttcggccccagcaaacagatggcaccacttcccacaacccagggatgttttaggaggaatatgggtggtgaggaggaatcaaaagtctgtcttagaaatgttcaaccaaagatgcctactagacacccaagtgaagatgtcacttggataaatgagtctggatttcgagtaaacacctgaaaataaaaaaaaagaagagtcctaaaagtatattaaaatagcacacaagtactgaatgggattccttcacagagacagcatgattcagcaacaatataacatgtggagctcttgcttcaccaacagagcaagagtagatgtgtttcatttgtacttcatctaggtacagaggccaaacctttcctctcagttggagtgttgcctggttaagaaacttcccttgaacctgagcttcagaagtcatgaggcttctccaatcctgaagtgatataaaaacttactacagagagattaatgctctttcagactgaacaaattagaactcccctatatcatttcaaagatgtcaacaacttttaaaatttccataaaggactctccaaataagaaatacaggtgaggcgatcatgacacagccagtaatgtcatccatttgcatgctaaagatgtgacataactgatttctccaaaacctgcttcaaaatattagatttgccagtcagtctggagcttctccaattccgtgtggctccttttccttgacactgcaataaaatagtttgtagacaaggctgctgtgttgggcaaagccaagttttggcctcgtcccatgaaggagagccattttgcctggtgtattttcaacatgcacagatgtaagggctttcctttagctttattgtctccaagttttcttcagccaaaaagaacaaaaaatgccatgccacacaaagatcttatttccttctctatcattttcagttgaagccaaaccaagtgtaaatgaagtccagtgtcctaaatcataacagagggtatattttctttaacttccatcaacaggaataattgtccatcacctaacagagtataacagca

SEQ ID NO: 33496 - DNA, 1818 bp, Bovine  19866881101337
  misc_feature (1)..(1): n is a, c, g, or t
ncagggacgggagcctggtaggctgctgtctatggggttgcacagagtcagacatgactgacatgacttagcagcagcagtagcaagctggcattgcattaattaaacaaaaagcaaacaagatgtctgaaccatatgcattaaagatttcagaatgacatggcgagcaaattatacatgcaatgcttacactttcagaaaaacaggatgctcagagagacctaaattacgtgtgggtactatgaaaaaaataatgaggtggggcatagctggttgaaggtgagatttgggagcttttttcctttaaaatactttgagctcattcaagtgtgtgatgcctcagtctttaatggaacaaagaaaagccacaaatacgaacagaccaaaagttctctccaaatggaagacacgaatcagaatctttaaggaggtttgcctccaccccctctttagaagtgattggcacacacttaggttagactcaaggtaacatgatagaaaaactttctgtcaagaatccacagtggtctgtgctgcccttgatctgccctatcccatggtcattcagtaacaggaatgacttgagtgagctgttccgctaaatgagtctggtttggtgcccttgagctccagggtcatgtgactagatgtgttctgatgctccagagctgcaatggtatgactaaccttgctgagtcatgctatacttgtggggcatgaagcatcagtgctttaattaaaatgcccttaggagcattaggaagcaatgaccaccctttcccttcacttggggtgtgtcagtgacacaggacagagtcccacacaggatataattcatatgagccagtcttgagtagattttttttttcagttaaaagagtgaaaacctgaccaattcttacagatttaacaaaggaaaagacattttcctaatttttctgtccatgcaagtgatcatactgggggagaatgagcagcaaggctatttgttgatctgttccctcattccaaccccttgatgtgggaaaggagaagaaattctgtctttgggaagattctgcagatgccagggtataatcaattccagtaatattaaaaagatcttgtacttgtacagacttctagagcttgctaaccacttgccaggtggctcaatggtaaagaatccacctgccaagcaggatacacaggaaacttgggtttgatcccctggagaaggaaatggcaacccactccagtgttcttgcctgggaaatcctatggatcgaggaacctggcaggctacagtccacagggtctcaaaagagttgaacctgatttaagcaactaaataacagcagcagaaacactttcacataaataatttcatatgtgtctgatagcctcccatgggatatcaggattgttatctttacatatgttgatttttaaaaaaactttaaatgcactgtaatatgtatataagtgatgttcattatacaaatgctttttcattgttttctacaaatgcatgtagaaaatatcaccatagaggccatcttccagcccccacaaattgcacatgccaccctactctaaaatatacggaagaatgattttctagagaaagtgacagttcacacttttttcttctaaaacaggaagcaggcaccacagtaggagaaaagggaagctaaccttcctctttcatgttctctggggctgtgatgcaaagcaatgatgcaaaatattttaacccccagttaatctctataagagaaaacctaaagtgtcagagttaagggttaatataaactattttttaaatgacaatcttca

SEQ ID NO: 33497 - DNA, 1262 bp, Bovine  19866881134902
  misc_feature (1)..(1): n is a, c, g, or t
ntaaatgttctcagtagaattagttattcattctttaatatttctgatatgttcaacatgtaagttgttaaaggagttttagtcactgctgtccttcattcctggctttcatcttatttaaagtgaaggttggcaagaaaggagtgtatttgggggattagaatggaataggtactttttcagctatcctggggtgttttcactgtttcttaatttaaacagttacaactgattaaacatttctctttttttctaaaacagtgatcaacattctgcatttattcattcaattgaaaatttgaagttattttctctacatgacacttttttccttttcactcctagtgtttactaaaggacaagtcacaacaggacagtacagaatgcttgccaaaagaggtggatatgtctggatagaaactcaagcaactgtcatatataacactaagaactctcagccccagtgcattgtatgtgtaaattatgttgtgaggtaagcttggaaaataaatatttgggggcagcaagtagtaagtctttgaatgctcttttcttttatagaaaagattataaatgataactgaattttcacgtttctacccaattactgttttcagtattctgagtttctaaggcagctatctttcactgattccactaattaccatcagtagctagtcatccccatcctttctactcccatttaaaaaaagactttgaaaaaataccacatctctgatggattagtttgttctagtcatacagctatcatcataaattatctcaaggcaactatattatttttataaaaagaattctggccctggaatagttaggtttgtgtcatagctttgtccctcattaattccatgacttggggaaatctcatttctctgaatttcatccatttaggagagataataaaacttacctcaaaaggttaaaatgaggattaagttaaattatttgtgagattactataaaaggctgtatgatgggacccatgactcttgtgtattcatgaactcttctcttagtggactggcttgtgaatattgtggctatcaaatttcagcttgttgacctctgtgacacaaacctcctccattttagaaattatcactttgtattttaattgtttgcacacctactttcacattggattttacactgcctaaagcaagggttagatattttgaactttgaatcctcagttcatttagtaaacacttaaagtttgttattaaagcagcagggttcag

SEQ ID NO: 33498 - DNA, 1725 bp, Bovine  19866881146483
  misc_feature (1)..(1): n is a, c, g, or t
ntgtcccatgacgccccctgtgcccatgtactgtgcttagcacactgggctgttgtgctcctgagagcaggcgtgggttctccttcatttcatgcaactcagtccccacccagggcctggcagtgtgtgcccagtaaacatttattcctccttgttgagactcttaatatgagcccaaaaggtctctctgaaagactcagtagactctatacagcccataccagaactcagaccctgtacacccatggagcactgggacccaagtcagaggctcttgagtctctctctggatgtgactgcaactagcccgatggcctggttacatcaggcatcagaatggctgttaagggagaaggtggttagtaggggccttaataatgaccaaccggggatgtaaagacccttcttcctattggcttcctaatcccacctcctactgcctgaatacctgctccgagacagtctcaaaattgtcctttccaatgtcccatctttcatgtgaaaatcagagaaaatggaggaagccatgagtgactttggtttgtttctaattatgagtaatagtcatcatagaaatcttcagcaatacggaaaaatataaagagataaatggcatctgagatctcacaattgaaagcaacttgtcatatataagcattctttttttcatcttttctgtgcatgtctgcctctttggctataactgaaatcattctgtacattcatgtgtatgattttttttttctgatgtaaaatatcttcaccattagttgccagcagcagcaacccctactgtttattgcactttttagaagccccacctgaggacatgtttaatgaaaactttactgctgaggacggcttctcactcacccccagctaatgatgagtgaatcttctttgctaaaaactagagatttttgtcatttatctccacctctgcaaaagaaatggtggagaaattgctgccaaatgttaactgtctctgcagcagacatttttttaaaatagagtgaacagaattgtatgtaaacagaaggtctcttcacaacaaacacattttgctagctgatcaacatgcttttatttttctaccttgtgaccttattgtaggtctttggtaagatgggccattactttttgttaaagcgtcattgtgtctcagctggcttgttttcccttcctgcttgcttaaagagtcatgtgtcgcccaagggctatgagctgtaccctctgttctaggtggtgccagacaggaggttagaattaaactctgggtgaaaagcaacccctgctttctcggttctaaagtttatgaccttttcctgtgcatcccaggtgttcctgcctcccaggaccccctgcattatctgagaatctgcctctagggcaggtggtgggactgagacggagaagcacgaccaaggcaggaaggcagtatttccttccccagatctggaatttagcccagagtctagcttttcagacttgaagttatgaggattgttttgggggcaaactagaaatggatgcaatttcccttggaacgccctcgtcttattgatgcctgctgtcgtcgacacttgtgctaacttcactgatgtccacagcctacagagtagccacttacctactgaccccgttccagtaacaaggcattttgagctattggaattcatgggctgccagacacagccatgaaaaggggacaggccagttaacaaa

SEQ ID NO: 33499 - DNA, 3829 bp, Bovine  19866881151712
  misc_feature (1)..(1): n is a, c, g, or t
nctggtgacacagccagcctgggaaaactgggaagaacacaatgcaggtctttcggctcttcctgactcttaacagggttgtgttttttcctctcctagcactgctctccttttctctggcaccatctggattcttctcttacctttacctgtgggcagactagtctcttatagggaattattggataaaccatgtgttagctgataaggacttaagatttaccttcttatggggtgctggcattttacaatgggacttgcccccaaatgaatgaagttgtaatcacttaaggtgaggtggtgttcttttggcattttccaaagtcaaattcctctgttctctagaccagacttaattttcagtgcttgaaaataaacagtgaggtggaagtttcaggagacccagaggccagactgtttgtacctaatggcattttactgtggttcagacacagtgcacaccattcatccagttctatacatctcggaggtctctgccaccatctgtgcattatcatcctttccagatcttgtccatccaaatggtgggaggcaggtgggtaaggagggtttgcccacatcgcccctgctcctgtgctctgggtcttaccccatcctggtgaggatgtgattggcaatgaggatatgtgttggtctcatcttcagcagctttaacagcagatgtcctttgttcttggggaacacattaaacagtgagatttaaactgaactttgaactgagatttcttaccaaaaaaactgcaagtactatactatatctttcttttcctatctttttcttcttcttctttatttttttggagtgatgtgcaatttgtctttctgaagtaagtgggttaaccagatcttaatgagatttccttgggctttagaacaatagttgttactagctatcatttctatgcttttcctcctaagaacaaaattcactaaacattatagatgttaaggtgaggttatataaaaatgaattcaactaagtatctcctaaatgagtagcgtctctttgatctgaactggtgtctgtcaaacattctttattcaacattatatatgcatttgtttattaaactgaaagtctaaaatttgctaagtcatgttctacaaactgagattataaggatgaagatgatgcatttcttctccaagggaccttgccctacagtgcaaaagacagcattttagaaaactgggcttcacttaagtcaggaaaatagtaaaattacacgtaggattgctgtgaggattaagagaattaatattgcaaagccactaggatactgactggcacatagtaaagggctatactagtgcttccacaaaataaggaaactagaggacgttaatgtgtgataaggacatagcatgagaatgtggatgtaaatatgggtataaataaaacactctggaaacctggagtaagaagattttgaggttgggagtggcttcactgaagagttgagactgaatctggatcttgaatgatgagtgagattttagtaggtacatagagaaattgcaaaggagatttcctgaaatgggaatagcacaagctgtcttgtaaatcaaagagccttgtctaaaacattctgtccaaaatcctttactgataccagctcatgccgctgggccagatgtgatcaggtcccctcctctaaagcacttgttaaatgccttgatttcagcattatcttattttgcaactatttttctctaattttcaatatatgagtatattgaatactgccttggtgctggttctcctgatggatgtagtctctgttcagaaaccactagaaaaatggagcactgtctttggcaccagtaggtttccatagcacactttctgacccatttagagttaaaaaatgccattgaaagaatttatgcatatataagtaaactaatcctcttctcctgggttttgatacctaagaaattgtgagaaagggacaattgtgttcactctttctatgatttctgcttgtatatccagagttgatttttacaaaaagctcagagcacctcaaaggaaaaagaattattgaatattattgatattggtttaggaaggctgtccttaagggtctgccagtttctttaactgaacagttagttacacttcatagctgtttgaagtctgcatgtattttccttgcttctgtctgttccaacactgggttcacaatctatattttgaacataaaactctctgaagtgaacctgaaggatgaagtctgtgggggagtaggctggggtcaatacaagcaggattacaaagctgctttgcaattttcaatcctagaaatcctatgttaggaaaaagaatcagcttggcaactttcttttaaaacaatccaggctttctcattttaccccatcatgagttttattcctgactatctcatttatagcagaaaactctgatctttaaaataaaatcataaaggaagagtggtggtcctatgttatatgatgagatatgtattttttaaagacctccgacagagataaggaggatggtgtggggggtagggggatcgtgatgaacactggtgtcagagagaccaacaaggagatgatttcagtaatttgtccataaagttgtgcactaaggaagcagagttgaggatgaagagaaggaaatgcttaagagcgactgtgattcttttcagatagaattgactggattcagtgattgggtgagagagtagggggtgggctatgtggactccaaggtttctggcttgggttttgaattatgcagtactgttcattatgaaaagatgagagatggagaaactggtttggaagaaaagatgatttcaattttggctgtgttgagtttgacacgactgaggtgacttagcagcagcagcagctgcagcagtgggatatgtgtgaagagaagcttataaggctcttgaacaaaccaaatcaattagagagagaagggttgaaagtacagaaataggaaggaatagcatataaatcctattgatatgtggaccaagaggagatgagtgagacagacattttcatatgaccttttaagcgcttataagatgattttaaatacattggcaaataatgaaacaaaaaaagtcttgttaggctatttgttttgagttttggtttggaatatgtgatctgcaatgtcaaatgacttctcaaggtgccttcccacacaaagattctatgaggcctgggtgaaaaaaagaggtatttttaagtgaagctctattttacaattacaactgtgggacagcagagaaatcagactttgagctgagatagcatttttcccctcccctccaatttaagctttcattgaatttggaaatcatatctttctttatctgggtcaaggacttgagaagaaagacagtgagtttagtgcaaaacagcatgttcagatcactgcattaatccccttaaactgctcacccagagaaggtagaagggaagaaaagacaaaaagaaatttctcaacagatggttatcttttttttttttttttcccctatttaagcttggctactaaaatcactttgaaaacaaaccatgctgcttttgtaagtggagaaatatcaataacctcagatatgcagatgacgccacccttatggcagaaagtgaggaggaactcaaaagcctcttgatgaaggtgaaaaaggagagtgaaaaagttggcttaaagctcaacattcagaaaactaagatcatggcatctggtcccattgcttcatgggaactagatggggaaacagggaaacagtgtcagactttatttttgggtctccaaaat

SEQ ID NO: 33500 - DNA, 957 bp, Bovine  19866881152158
  misc_feature (1)..(1): n is a, c, g, or t
nttctttgcttttggagtattggtttggttttaagcagtcaaaatgacttatgtcttatcaaagttagtaactcctaagaattaaattggtccaaatctaaattgctcaggcttggagaggatttagctcatgtctaaatgacttttagcattgatagtgatgttggtcttatttccttggcttagaatcaaccttaaggaattacagtgggttctcattttaaaccgtgcaattgtatcttttgatttacactaatgggctcctcattctatgggactggtaaattatgtccctgttttcttgcatcagagagagactgggaatcccaccctttgagcttttgctagaagccattctcactagcatggtaattaatgctttgttgtcctgaggtgtctgtagccaccagtctatatatccaccctacgtgatgacaagtgctataaatcacttgtacgatagacagtttaattagatggcagaatgggcccaagggtattggctattgtagtgtttaagtgctatactggagaattttatgagatgggaaatttttgttgcgaatcatggccctatatagagagatttatcaagattattatgttagtgtatttctgtagcagtgattgtcaaagcatctaggatattttaatagaacgactataccaacaatgctttaattatgtgctgtcttctggaaagttcctttgatttttacataagtttcaccctgacacaactttgaccttacagggggagaaatgcttaaaaggtaaccaaaagtgtttagtttgctctatggttaaaaaaaaaattaagaaatttgccagaggataggaccacggccaacacgagcccctcataattaccttaatgaaataagtcatatggggccagtgtgaacatgttctcaaggtagtgctttttctccaagtgcttaaaccagaaccgcaaag

SEQ ID NO: 33501 - DNA, 3676 bp, Bovine  19866881152284
  misc_feature (1)..(1): n is a, c, g, or t
nttaacttatgaatttaaaaatgctaaaagttggttttttactgctgtatggtattattggatgacaatgccacaatttaatgcatccactctactgtatctggcacatatttttttcaactttatattcatgagatttatccattttgttgcaggtaactttagtccattttccacgttgctgtagataactataggccagtttattcaatgctgtataatgttccactgtaagaacacatttttatcaattctactattgatatgcccaccatttgttttcattttctgcatagtataaatactgatgctttgaatattcctggatttacctctttatgcatatgttcaagtgtctccattgggttttaaggtatgcatattttccacttcatgtggaagttattttttcctagctatttcgtaccaatttaccttccccaaagtagtcctagaagtttcctgttccctcatgtctttaccaacattgggtagttacagtcttactatttagagtgacttgctgcttctgctgctaagtcgctttagtcatgtccgactctgtgcaaccccatagacggcagcccaccaggctcccccgtccctgggattctccaggcaagaacactggagtgggttgccattgccttcttcaatagagtgccttactcttaaataaaacagtataatgaagattaacagctatttgaggaaaacctccaacatgaaagacaaagacagtgaaaacagagactgcagaaggcatggacaataaagaaaacatacaaatattttttaaatgttttagtagcctcagagaagtgaaaagccattaattccatataaaaaaggaatgtttttattgaatagagaataagaaaatactaaaattcattggaaggattgaaagataaatttaaggatttctcccaatcttaagtgggaggataataaaatgaaatattaaggagaatttcaaaaaaaatccaagatgccccactactaatttataggagttccaggaaggaaaaaaaaaatagaaaagagatgagaggaaattattgaaaaacagttacaggaaaaattcctagaactaaagaacatgcatttccagattaaaggggctccccaagttcttgtcacatgaactgacacaaaatagaaaccacactaagccatgctgtcaattaattttggaacaccaatgataaaaagaggattctaaaagattcagagtataaatcacagactatatacaaaggaagcataattttaaaaatgcgtcagtggggctctacaagtgcaatattgaagttaaaaaacaatggggagaaacatacactccgaaattgggaggtgaataagccagatatccaagcaaaaaggaagagataaagcaaaaagctgacatagcaaaaagcacatgtggtttcattacactgatacactgggataaaagtatgggcatggtgtgtaaatgtaaggatgtttgcttgtgtgtgtatcatgaaatgtagtaaaatatattaaaatattctaaagataattatttccaactgacgattgtctaactggccaggagatcaataatgtatgagaagtagaacaaagacatttttggatgataaacatgtctaattgcatcctatgcacacttctatgtacactttctgacaaaacatggtccactagagaaaggaatggcaaactacttcagtattcttgccttgagaaccccatgaacagcatgaaaaggcaaaaagataggacactgaaagatgaattccccaggtcagtaggtgcctgatatgctactggagatcagtggagaaataactccagaaagaatgaaaagaaggagccaaagcaaaagcaacatccaggttgtggatgtgactggtaatggaagcaaggtctgatgctgtcaagaacaatattgcataggaacctggaatgttaggtccatgaatcaaggcaaattggaagtgatcaaacaggagatggaaagagtgaatgtcgacattttaggaatcagcgaactaaattggactggaatgggtcattttaactcagatgaccattatatctactactgtggacaagaatcccttagaagaaatggagtcgccatcatggtcaacaaaagagtttgaaatgcagtacttggatgcagtctcaaaaatgacagaatgatctctgttcatttccaagtcaaaccattcaatatcacggtaatccaagtctatgccccgaccagtattgctgaagaggctgaagttgaatggttctccaaagacctacaagaccttctagaattaacacccaaaaaagatgtccttttcattatagaggacttgaatgcaaaagtaggaagtcaagaaatacctggaataaaaggcaaatttggctgtgaagtacagaatgaagcagggcaaagaataatagagttctgccaaaagaacacactggtcatagcaaataccttcttccaacaacacaagagaagactctacacatggatatcaccaatggtcaacaccgaaatcagattgattatattccttgcagtcaaagatggagaagctctatagtcagcaaaaacaagactggaagctgactgtagctcagatcatgaactcctttatgccaaattcagacttaaattgaagaaagtggggaaaaccactagacctttcagatatgacctaaatcaaatccctaatgataatacagtggaagtgagaaatagatttaagagactagatctgataaacagaatgcctgatgaactatggacggaagttcttgacattgtaaagtagacagggagcaagaccatccccaagaaaaagaaatgcaaaaaagcaaaatggctgtctgaggaggccttacaaatagctgacaaaagaagggaagcaaaaagcaaaggagaaaatgaaagctatatacatttgaatgcagagttccaaagaatagcaaggagagataagaaagccttcctcagcgatcagtacaaagaaatagaggaaaacaatagtatgggaaagactagagatctcttcaagaaaatgagagatatcaggggaacatttcatgcaaagaaaggctcaataaaggacagaaatggtatggacctaagagaagcagaagatactaagaagaggtggcaagaatacacagaagaactgtattaaaaagatcttcaggatccagataatcacaatggtgtgatcactcacttagagccagacatcctggagcatgaagtcaagtgggccttaggaagcatcgttacgaacaaagctagtggagctgatgggattccagttaagctatttcaaatcctaaaagatgatgctgtgaaagtgctgcacttaatacaccagctcatttggaaaactcagcagtggccacaggactggataaggtcagttttcattcccattccaaagaaaggaaatgccaaagaatgctcaaactactacacaattgaactcatctcacgtgctaataaagtaatactcaaaattctccaagccaggcttcaacaatacatgaaccgtgaacttccagatattcaaactgggtttagaaaaggtagaggaaccagagatcagattgccaacatacactggatcatcaaaaaagcaagagagttccagaaaaacatcttcca

SEQ ID NO: 33502 - DNA, 1066 bp, Bovine  19866881235707
  misc_feature (1)..(1): n is a, c, g, or t
nggagtttctgttgttcttgagatttcctgatgttttatgaatctttttcttaaggatgtcaggtacagcattatcacaggagacattcttgttcatgacatggaaggacttttataccatttcaaaaatcagttcctttagggaaaaagaaaccattatgaagttgaaacttaaagcattaccttcttaagctatgatatcaaagtctattacaaaatcaaaattagaacttcaagtttttctgagactgtctagattttattctgttttgatcctacaaaaagcagtcactgcttatatggaacgtttgaaaattgctctcctgcatttagatccataatgacaagcagttactttcatttgagtctgtgatagatgagctttactcttgctactttgctttgcaaggttggacttcttagtcataaagatggcattgagcaaatattgtttatgtaccagaagagatgctatttataaaactgaactaaactcaaactatatggaggatttctcaatttcttataagcaaagaagagtggttgagctcaagtgactgataagtgtggggataaatctggttcattgaaaagttatatccaggagttcaaatgttgtcttcggaacttggtctctctccctccctatgtctcttatttctgcatccatctgggctggttcccttctatggctccatgtgtagtgagatggttgccaaagctccagatttatatcctcttaggttataatccagtgcagaaagaaatgctactttctggcaactgaaaaaaatcctgaggttagcactcattggcttgattctccccgctcggcttgaattatgtggcaaaccttagtaatctttgaaatcagggaaatatggaactctgattggccaggcccaagtcatttgtcatttctatagctggtgtagagagagagagagctttatcagaagcaaggtctaagcatagagaaaaggtggtttacctagaagaaaatcagggtttcaaaagttgaaagagtagatatcgggtggcaaagaaaatgaggctctattggagg

SEQ ID NO: 33503 - DNA, 933 bp, Bovine  19866881246175
  misc_feature (1)..(1): n is a, c, g, or t
ngcccgagggaagtaactgatagctgttctgagtagcctcggcaggaagaaaggacataaccaaagtctgctcccctgtgcttgtgtccattttaaaactagttttgaccttgacacagagctttgagcctaatgagcctgtatatagcttccccatctgtttgtctaaatacctagctaggagaggtagtctatgagtttctggagtcatcagaaatcccatggcaacatggtctgacatttgtgggcccctgattcctttgagtctaggtgagaagcccagtcttctgggaattgtcaggagcaggtggtggcaatgacattctgttctcattcacagagtttgtttctttgctgtaagattggctgatgtctgtagatattggctatttctctctgcaaagacacatggaggcatctggttatttctttttttaaataacctgggttaagaactgagcactgcttccttcgggggctggagcctagtacacagcttgttatccggaacatgataatgaggataagtacataaataagcgtgaaagcacatcccagagccccggctcttgaaggaaaaaaggtgatttaatacacataagcctgacacttcctgcatacatagtcattagtgacaacctgtgagggtgaggggaaattgactctgtcctgtggagcaagaacattgctaaatgtctatgaaaatttttcatgctcaacaaattttgcttctttgcctcttcaatattggcttagctctgcttttctatccattctgaggcccgaagggacagtgataaggggacttctggaaagaaacttctaattattatttatgtagtcagttcttccagctctgctccgtacatctctgtaggaactgatggagcagattctgtaaagtttgctcgtcaagcctcctctccaacctct

SEQ ID NO: 33504 - DNA, 1036 bp, Bovine  19866881257469
  misc_feature (1)..(1): n is a, c, g, or t
natagtgtacaagagcgtccatttaccttccttattcagttagatgtaatcacccttctatccttgccaatttgccaggggaaaatgatctcactgtcttaccttcatttcttgattattgagattgaacttaaaaaaaaaatctatatggttaatggccatttgtatttcttctgcctgttgcctagtcacaagttttacctgttttaaaatttgagttagtttttggattacattgtagagattcattacacataatggacagcagtaatttgttaattggttgcaaatattattgttcagcttgttttgtttatgataacttccatatttttatataatcaaatctatcaatctttttatagctgctgggtttcatgacttatttacaggatgatacaattctaaatgaaaaagcagaacacaaaattgtactttcaatattctcttaattatgttacaactgttggagagggaaggaagaaagacaggagggagaagggagagttgggaaaagctaaaagattacaagtctaggtgatatgttcaccaatgattttttcttttttgtactttctaaatttttttgtaggaattacatattaatttgataaccaggaaaaagtcataagatatgtatttatatattttggctttagtccttttctttagtctctctactctctcaggctataattcccaacaaagatgtgtagggaaagtgatctactggtaggagtggaaacgatttattctggaaaccaggttgctagggcatgttgaaaaaaattgccttacttccttagggaatgtgaacatttgtgtacttggaattctgatctgttgtcataagctcattttttttaaccaatgaaattatttaaagtgtctcacatatatgaaattaccatgaatggcattgatattttcaaatgctccatgatatgtccctaaagtcttaatgaacttaaagagaaaatgaggcccctgctaaagaagcaacgttctaatattaaataggtccccatgccatttg

SEQ ID NO: 33505 - DNA, 1719 bp, Bovine  19866881324675
  misc_feature (1)..(1): n is a, c, g, or t
ntggagtgggtagccacttccttctccaggggatcttcccagcccagggactgaacccagttctcctgcattgcaggcaggttctttactgtctgagccaccagagaagcctaccatgtgcctatattacatttatagttaaaaagtcaaaaaattaaaagcaatgattcatggtatttctagatgtaatagaaatctattgtttggaaattttttttaaaaatgtattttggataagtctgcagttactttacatacttttgaagaatcaggacaaatataactattttcacaaagcaattgtatattcttccttttatccatcagtagttaagtaggaagaaatcaccctggtctattcatgaaaatgctccttgctctggattatgtctgagatttttaactttcgtgtacaattttggcagggttctgaagcagccagacctgtgggctttcaactttatgcttgccatgcttgtgatgagggctacagaaagcaaactgattggtgtgtgtgcagaaagatcccatctgctgacaagggtgttccagagaaatgccaacactgtcactgaaacttacaacacagatcctcaaactccaattatcactcattttctccaccttcttatcacttgtgtttgacagctgttcagtgacaatgaaaaaaaggttttccatctccaggtattatactggttggccagattaacctttggaaagatttaattatctttgagaaggcagttcctctaacaacatccctttatctatctcgtccaaattggtatttgcttcggtgattctcttcctgaggcttaactcccctggcacctcacactgtgagtgggtgtcatcaaacaccagaagctgagcctcttttcaggaaacattaattctgtggttgcctatttccagctgtatcttgatacacagaaacctgcttgaggttgtctatcaggataagaattaaaattaggtcatgggaaaaacaggttacaaaatgatcagtatggaatgagcctttcaaatggagtaaatgtgtgcatagcaatgtggtctaggaaaatacaagtgaccaccagtgactatctctgtatggtgggatcactgattgtctttatttgctttatgctgatgcacttgctggtttttcagtctacatatatttcccctttaaccccacaaaataacaaggctattttaagaattaaatatgattcagagttagggaattttagaaagatgattgagtgtgacccctaacttgaaaaagagctctaaaacagtcttattttggaattggtagacacgatactctacttttttccaattccaattcatttgattgttgaaactgtttgtttgaaataaaatcactttttggcttccagacttaatttctatgctgaagggaataggagattgtgtggcatcaataactgaataacacaacacctcagctagatttcagtatctctgtagacaaactgttcatgtacttgtgtctgtgtgtatgcaggcgtgtgtgtatatgtgcttgtgtacatacaagtgtgtgtgcacatgtgtaaaaccttgtctaataggtccaatgggcaagggttacaatcaaagcaaatcaacttccccaggaggcctcagctgaagacagtaacaaactcaagacaggggtttcttcagtcacctcctgactgcctctctgcacataacaggata

SEQ ID NO: 33506 - DNA, 1523 bp, Bovine  19866881329987
  misc_feature (1)..(1): n is a, c, g, or t
ntgttcttctttctcctctccctggacaaagtctagacaactttaggctaattttttaatctatctttgtgaaacttttacatatcctaaacagacatttgcccctaatgaattcatctttttctgaactcaactgtggaaattcctcaagtaataatttaggttaatttactattcagttcttgtattctattaaactttcaggccatatgacttcttttactatacaatagcatattctttgtggatagatactactttattccccaggacacaattctcaggtaaatggaaacttaataaatatttaagggtgatgcttttcacccatctgtaaaatgactgcccaaatagtcatgtagttactattcaaaataaatctggacttagattttttatttgttcagttttgtgttttgaaaatttttctaaaaaatcaccaaatgataagtttttcatcattacatattttgcattaaatatttcaagttaaaatattgtggttttggaatggtctttattaccaacttttttaatctaatgaagattcagcctagagcagaaccacattttgtgcacaaggctgccctgaggtaattctctaattagcaacaacagcaaaaaacaacaaagtgaatcatccttgccaagtatgaggagattacaggttcccatttatacaaaggaaatactaaatatagatgcaccccattgagctgctgcatcagaaagaagagagaaaatgcgcaggacagaagaaaatgggtacaagatctgaaaaatcagaaacttctacagagcatcttgtcttccatgatcacaaactttctcgactgaattcagccttctttctcaaacatttcccaggcagcatattgtgggctattctggggaaatatttgcacaaaatatctcaaacttatgtttgctgacaagctatgaagtctgcatttttagtaagaaaattcattttactctagaatttcctgatccaactggcacacctgcttcccatgaatcttgaagaaacagatggaagtgggaaactgatttttactgagattgagtccagccttaggaatactttttaaattcccttattaatatttcacaaggttctgctgttttattaagtagactggctcctctcaggaaaatcttgagaaaataaaaaaaataagaggctgcttttaatgaatatcaatatatattaaaatcagttttgctaaatgagttcaatcactgattaaaaatgatgatgaacatgagctatgtctgtaaaatatgacacagatgatagtaataccattgttactgttaattggtttcctgaaaacatgaaacaaattgcatcttgaccctcttgttctataaatatgctgcctttgctctatttgagcctcggcctagtggcctcctcttttctgatcaagaaatattttactacctgaagaaaagaggttaaatgtttggtaggaaacatcagtggaaagtcagacctggagtgttttggctagttggag

SEQ ID NO: 33507 - DNA, 2102 bp, Bovine  19866881331385
  misc_feature (1)..(1): n is a, c, g, or t
naatgtagggtactctgaagatggtcagttgtgactaggaaaaagcagggctatggttgaagagagcatatggtggcgaggaagggctcttaaggatgggagacacacagtgaatttttaatgcaggtgaaaacaatatggtatctactaagggaagtagttgaaaatacaagaattggtgggaggggggagatagagatgattttaagtgtagttgatttacagtgttagtttcaggtgtacagcaaaatgattaagcaaaaatatacagacatattcttttttcatatcattttccattatggtttattataggttattgaatatagttcctggtgctatacaataggaccttgttttttaatctattttatatgtagtagtttgtagctgctattctcaggctcctactttatcccttccccatccctctgggataattaatgcaagagagggaaaggggtgtggagcacagcctgtgtacaaagcaacacatccatctcatatttgattgcccctgggtattttaaaaggtctgcaaagccgataatgatgctactgaggaagatgttagttcctttttgagaactgtctatgtgctaggtgccatacaggttattttccatgtgttttatatttattatcttcttttattacttagaaaactgaagcacagagaggttaaataatttgctcaaggccacacagataataagtggcagattgtgatttcttcccaggaggtgtgactgctgaacctatgccagtaaacgttgctacctgtgttacctctagaggcagagggaataatcaatgcatgcatactttttaaattcacaatatatgttggttttgatcagcaggcactattatcattttgcagattacaacgctatttttgtcttgtttgttctttctctggcttgccactaaattgatttagtgaggcagtgccatttattttcttttcataggagttgggactggtttgattcatcctctctctctttatctggaaggtagcacaacctggatattatctcttcatattattaatccacatattaaacctgctcaaggattaaaactactctcaggagagtcattttcctaagctttcacactactacccaactgccttgaacaactcttcctgacacctgctttgtgattgattcctttatacagcttgatttttggatttctttatgaaatgttgtctttactcaaatgacatttctttgaaggagtcttttctcaacctgaaactagctctgacctttctgttctatgtacctcacagctgaactcaatagctgggactatggacctggggagcacagagtcatttaaagctaaggaattttttgatgaggaagggacaggggaagatggaaatttatcttctaatagtctaaaatattagctttcaaaatataattctaatttataatatggatgcacagattaggaattttcttgtcactgttggtaatcatcaccctcatgtgttgcttatttgaattagaaaaaccatatccaggaaatgactttcctccaattgctaatttgatggatgtatgtctgcaactttgtcttgtgtaattagtttttctaagttttaggcagttgtatttttaaaagacttgcttttataacactggtcagccatttcaagctcaacccatttgactgatatctaatagcttgcatgcttgatgttgaatattaagcaaaggataggggctagaggagttatattataggcagaagaagccacatgtgtgaaggaatggaggtctgtcatctaggaaccagcctagcttgatgcacctggcaatagtccttttcctttcccctgtacacagttctgggatgccagcaggtcaggacttgtagagtatctggcattctaataattgtgaagattccagataactttgatcagttgttagaactaaaaggtggttcacttggtgatattttttcctttgtgttctcttgctagtccctcccgaggccatcggcttcttgtctgcagctggggtctttcttggtcttctgggtggcctcttcctcttcatcaacaagaagctgagttt

SEQ ID NO: 33508 - DNA, 918 bp, Bovine  19866881360415
  misc_feature (1)..(1): n is a, c, g, or t
ntaaaaagctaacacagccccatgtacaattaagcacttaataatcttgatgatgttggtggatgttcaaagagaggatgaagataatgacagctctcagcgtgctgtgaaattactactcataatttaacaacactaataacttctgcattgtgcctaccactttgaaaatgctttcatggtgctaccccatttgaagtgggtaccagaggtgttatcatcactgcattaaggaataaagactgggtagcagtggcaagtcgaagaaggtgatggcaccccactccagtactcttgcctggaaaatcccaggcaaggaggaggagcctggtgggatgcagtccatggggtcgcgaagagtcggacacgactgagcaacttcactttcacttttcactttcatgcattggagaaggaaatggcaacccactccagagttcttgcctggagaatcccagggatgggggagcctggtgggctgctgtctatggggtcgcacagagtcggacacgactaaagcgatttagcagcagcagtggcaagtagaggtcttgtgatcctcagactagtgtgtgttctttccattctattatgtgaggttgcttcccctgccaatcagcgatttagacaaactgtttttaatacatcctccatctctgaaattctgtgtttaagtttctaatggtcaccaagctccatgacaaatgattacaatccagaagagcatgcatgacttcctgacagtttggggattatgacacccagtggagtcaacattaggaactcttttctttttttttttttaatatacttgatttacaatgttatattagtttctggaatcaagattgccgggagaaatatcaataacctcagatatgcagatgacaccacccttatggcagaaaggaagaggaa

SEQ ID NO: 33509 - DNA, 1013 bp, Bovine  19866881680484
  misc_feature (1)..(1): n is a, c, g, or t
nctggtggaaaaaaagacctacaccaaggtacattatcatgaaaatccagagctctggggataaagataaaattctaaaacctttcataattaggaatactagaagctggaagactattaataaagaacaatgggatcaaaattccaggtaaataccaggacaaaataactaaaggagaaaaaggggaagatagctgccttttgagatcaaaagtccaggggcaggaagtggtggagcaggactgctgaactgtataagctacatagtattattagattttttaaattatgcagaggtgttactctgatgaaaaaattaaaatgtgattaaaagagcatcaagtaaatttctaaattaccttattaaataaataacgtacctgagcaacaactgaaaaggcctttgattttattttcgctaatgattctgccctttcacatctctggaagtaaaaacaaaccggaaggggaaaaagttaaaacacacaaacattaagtaaaattacgaataattaagtattttttttaccagaaataagattcaagacagaaggttagggtaaaagaaactaacatttattggacacatattaagtaaagacacatagacatggcattactttctaacaggggccatgataacaaccccatggctactgactgttttcattcaagatttaaaaaggataagaaagaaagccgtgagccctggtgactatgccactccctcttcatctgcctatgcccaaagatggctctttgcctcattcactacgatggatgaaaaccttgaaggcagaaagcagtgaatagtagcttaagctgcagactacgcgaaagactgacaagcagggagaaaagacatagcattacagcagtcttcctctgcccctgtaaggactgagggcaccttccaccaccatccgtcccctttcccactgaaaacggtgaacattctcatgcccagtctatacctgatgtggtctttcacaagatttccaggaaagaacaga

SEQ ID NO: 33510 - DNA, 1509 bp, Bovine  19866880358161
  misc_feature (1)..(1): n is a, c, g, or t
nggatactagattatgtttttaaagttgcatgcatgctagttgcttcagttgtgcctgactctttacaactctacggatggtagccaccagcctcctctgtccatgggattctccagacgagaatactggagcgagttgccatgcccttcaggggatcttctaacccagggatcgaacctatgtctcctgcattgcaggaggattctttaccactgagccaccagggaagtcctttaaagttgatatgagccatcaagatttaacaaagcattcctttctcataatgtataaaatgtctgctaaaacattaacattagtattctaaatatgtatgagtcataatagttcccaatcagctattaatagttactgatgtcttctttgtacagaatgtttccatagcaacgtgccacatcaattttccaaagtagaatcaaacataaaataaactaacatagtattttacctttcaaggataaggaacactagtctatctatgcaaagagattctgtggattaaaaacatatttagaaaattcagaaggaaaagcactgtaaccagacaaacttagaaaatggaggaaaaacttttagtttgaacaaagtagataaagttttaagaggtgagaccaaattgcataaatgaatacttattgatgaaatgaaacaaaacctgatactgagagataaaataaatggcacccaggagactccgaccccaaagagactttgtataccaactacagtataggtttctcaaacacaagaggaataaagttacctgctctggtttcctgatgaaattaccccaatgctcacttttctagttctaaaactcttggctaagaatgctcaatctcttatttgggaacacaaatggaatacactcagtgatcattgtatttgctcagttggaaacaagccctgtgtacttcctcagtaatgcaccctatttggggtgatgggaatataaagccactgcatagacatcaaaactgggaggtggacctcacttcttgtccaccatttcactgtgttatcacaaagggtattcttccttatttatgagttttcttcccttggtatagaaggactaacacctacttactttccttcaaagttctcagggatgactcataaaaaaggctcttcaattaagccagtgcactaaggtattttcaataataaataattttctttaagcttgcagaaactttcatctgcatagacacttatctagaatctcaactgacctttcctatgtcttattcatgctcctaaaacttttcagaattgtagctggaggttcccactgtttcttggcctctctatagctataaattttctagccatgtgatcttacagtcaaccaggtttggtgaaagtgcatccagatacagcattaagtgagccatgttcaaatttcagctctgcctaatgttagcttccacgtgaccctgactaaaccaagcatctctctcagcctcagcatcttgtctataaaaagg

SEQ ID NO: 33511 - DNA, 803 bp, Bovine  19866880419621
  misc_feature (1)..(1): n is a, c, g, or t
nttcatatgatctaaaataatctttagtaaataaaagctagtttaagtttgttgggtatgttagtaaacatatcttgtgacacattgaaaattttactataaaaattatgtttctaaaaaatatattttttaaataagttgaatgagttttcatatcaaaagtgtgtgctcagttgtccagttgtgtgcgactctgtgggaccccatggactgtagcctgctgggctcctctgtccattggattctcagacaggaatactagagtgggctgccatttccttctccaggggatcttcctaagccagggattgaacccacggctccaactgcctctcctgcatttcaggtggattctttacccctgagccactggggaactttcccaatatcaaaagtaagctggtacaaattaaaagttggttttttcactgttaaagggaaaaagttttattgaactattggtctgatagtgaaaggtttttctttaccttttaaaatgatctgcctagaaaacaaacatcttgagacttgttaaaataatcacttgtattgcatgttgtctttgattacttaagtaaaactagtcctctcaatagtaaatgagggaagttttgctcagaatatataaccttccatatttgcttgagaagtctttgtcactttggtttagtagataactaagtattgtttcacagtgacctgtgattctattttgactgtttttaaaccttttgttattttttacaaacgtccccaaaataaaattctaaatgaaatcttttaacctaaactaactttgggat

SEQ ID NO: 33512 - DNA, 1072 bp, Bovine  19866880575631
  misc_feature (1)..(1): n is a, c, g, or t
nttcttacctggatcataggatgctgctgctgctgctgctaagtcacttcagtcgtgtccgactctgtgcgatcccacagacggcagcccaccaggctccaccgtccctgggattctccaggcaagaacactggagtgggttgccatttccttctccaatgcatgaaagtgaaaagtgaaagcgaagtcgctcagtcgtatccaactcccagcgatcccatggactgcagcctaccaggctcctccgtccatgggattttccaggcaagagtactggagtggggtgccagggccttctctgggatcatagggtagtatcttattattaatctccctagttcaagtttcatactcttctgatacagctttaatggtactgctaaaaggaacttttaaaactctatttacttcaccaatccttatatactccttaaatctcttctttgctgcttccttctcctcaggaaacctgaggctggtgtttcatcttctggtagaactcttacatatctggtacttatcacttagcgtactaaaccaatactgtcccattagatgtaagcttcttgaagacaagaattaaatcttgtttccactgtatccccagcatgtaacaggataaagtcaaactccttccatagcataaaatatgaccccttccagaatctgtcccacctctcccatctcactgttgaactctacttcacatcattacttccatcacacagaaatgtttctgtgttcccctgtcttttcaggcatttggttacactgttcttgcttcctagaatgcttctcaaaccctgtacctagcaaatactcacttttcaagacagacctcaaacatcactttttctatgtagccatttatcatcccttccctgcagtaaaacttgtcactccctcctttgaacccacactgtattctgtgcagcatctttttttttccttcgtattttaacaccattaaaaaaataatcatttatctatttggctcttctttctaaatataagtgggcttcccttatggctcaactggtagactctgcctgcaatgctggagacttgggtt

SEQ ID NO: 33513 - DNA, 1146 bp, Bovine  19866880691680
  misc_feature (1)..(1): n is a, c, g, or t
naatatcgcgggccgggcctgttgtgttttattttttcgcacaccgggccagggcagcggttcagcatgagccagattttgttccagcaactcgtcccgttgcaggtgaaatgcagagactgcgaggagaggtgaggttcgcgttaccccgtgcccgtgggtggcggttggggttgggccaaggggaaagatggcggcccccgccagtgcgcagcggcctgcgggagggtatccagccggagtccccgggaagagacctatctgggacctggctctctctcactaagtaagttctccgtcgccgagaagggaagtgtgtgagggatgggacgctgacctgcatcaaattaatttaaagaaaaacttatctctgaacgttatcgtggacattatagccctttgctctttgacagataagaactcctgctgagaaaattaatttactcgagggcttacgagttcaacgcagggcgggcactagaactcaggccttggttcccagccatttttccactcttttttgcgttatattggaagtaagttaagcttcgatttaatgaactatgtggtatattgcttctttttcacattagttactagagataagataaattacttttaatagactaaagacgattggggaacaccgtaaattcatttatccattaaaccaatattgcatatttgcaaaacacctgctaggcactggggatgcaatggtcaggaaaaagtccttgcgttcgtggagttcacattctattggggtaggaaatagtcgcacagataaatgcagaattacaactttgacaaatgaggtggtgctgttgaggcttaagtagaagagatcttggcgagaagtcagatcagaccagatcagtcgctcagtcgtgtccgactctttgcgaccccgtgaatcgcagcacgccaggcctccctgtccatcaccaactcctggagttcactcagactcatgtccagcgagtcagtgatgccatccagccatctcaagctctgtcgtccccttctcctcttcttctggcgagaagtcaggagacttcaattttgtctcaattccaccagagtggcagctgtctcatttgtaaaactgatataacatgcctacctacatggttgtttgttaggagg

SEQ ID NO: 33514 - DNA, 794 bp, Bovine  19866880705701
  misc_feature (1)..(1): n is a, c, g, or t
ncctgaaattctatacattattcacaatgacatttacaatagcttgtacacatattttagcagacttctcttactttatttcttcaccctgggtggtttttagagaaaaggaagaaagagaggatatggtttcaaaatgaagagaggtctcatgaaacaaaccataatgttcccagcactttaccactaaaaatgtttaagggtaatttagagagaatatttctaaatgtgatttctgatacatatacaaaaataacatacacataaatacctaaatttcataatggcaacatgtagcatgagggctttttccttttataacaaagatggataaaaagaaaacaaaggttaagagaacaatagcagaaaatgtccaatattttcccttaattggtttagagttctagaacaaaataatagaatgtttattactaagacacagaaagtatagcttttgttgataaatatgacatttctgaggcccagtatgtctataatatgaaaagttaaaaagttgaacacagcacagtaagttatcaagtagtccttttggtggttttattttattttactctaaagttacataaaactatgcaatattgaaattagtggcaactcatctttctgattgaattcagcagtaaacaaaatctcagtaccttgatgttattgagagatgccatgagaaaaagttttcaggttgatcagagacagaacatgtcccctggaagctagaagtgatgctctttgtttttctccaaaaacaaaaatcatcaagtaaaaagagatgaaaa

SEQ ID NO: 33515 - DNA, 1517 bp, Bovine  19866880891586
  misc_feature (1)..(1): n is a, c, g, or t
ntgtatcttaaatcataatcatgagtgtaagagattccagtgattcctctgagtctttctagtaaattactgaacttgcagttggtgtcagaagtaagcctggtctgatagaccaacccccttaacttcacactctttcaaaaataatgtataagctatgtttttataattgcaaatcatgacaagttacctatgaagaattgctgagcaactggcatgagaataatactgatggttattcattataaggaagagagtttggggtttaaaatacctgacaggtcctctaagtaccgggggggacaatgcaagcccagttttgaactgtatgttgtagcagaaaagagcacatgaacaggtttgggatttacttagtcacagagacttcaattatggctgcttttgctgccttttgttttattagtagaataccaaagagatttggctcttgcatatacagaagtgcaaagccccagagaaggtgaaattgcattttgtaatctcatggcttttaggcagaaggattatgaagcagctgttgagagtaaaatattcattagtttagtctgtagcaacattcaaacgtttagaccgtttctcatctgtggtagctcaagcccttccctagacattttaattgtgcagaatatattgaataggcagaactacacgaatctttggtaaatcgcttatttctgagactttcttcctcctcatgaaaatgtatagatattagacattagtctacccaaatttatgggatgaaggcaagagacagcaaaacatgaaaagccaagctaacattttataaaattaaaatgctttcccctgagtacgttaaaaaaagccatgttacctcaacatttatctctgcacaccactgcctacaggcagtttagctggtgtaggccaccacactagtctcttccaggtaattagacctctatctgacatgacaccttgggctcttctctcttatttctcaaaattaatgaatctcttggctagcagagtagattatattatatgaattttaagtaaaatgctaaaatttacaaggctagacagtggcagatttaaccactgttcctcttcaatggagtcatggtctccgaactctaagagtgtgaagtagaattaacaggggaagcttgcagtacatgtgtgtgtctgggtgtgaacacacacggatgctgattcacagtctggtgcatggaccaaaaatctgcatttttagcaaccacattggtaattctgaaataggtgattgtaggacaacaccataggaattatatatgaaggctgctggtagcaaaaactatagtttattcctccattgtttaaacattatgtgctgtttagggttaataccattctctatggtgtagaagaaaatagagctggtttccctaaaggagaaatgacgttttatttttctcagccttgcttgatgtccctgctagatgggcatataacacttttgaaagttttagggtcggaactaagttttacccttg

SEQ ID NO: 33516 - DNA, 1212 bp, Bovine  19866880926138
  misc_feature (1)..(1): n is a, c, g, or t
ntaccagttcaaagtgttttgacagttgaagatttccacgaatataaaggcctgagaacagagtatgaaccccagtaagaaactgatcactattcattattattaattttattaggcacaaataatattcatgctgctgaagaggcaaatttgcctgctcaagggtatttaaagacagaagtgtagaatttaaatgtatggcaagcaagaagcttgccctttctcagcacagagtcaaataaatattgtgagaggacagtgacacaagagaaccttagaattgggaggtaaattgaactcaaaactttgagagtcatcctttaaatgatagcttcggcatgtgagacatttacaaaccattcttctctaacagaactgattttggtattgtcttatttcctgatcctattctctccctggtgatctgagcctgacgccctctgactttcagatttaccaatgcaaaacttctttccaaatgtcagaatgtctgggtgctcaccattgactacatgccatagcacaggaggtatctaagtgacctataaatagagctgtgtctgggttggtgccaattcttcctgcaacagaaatattaataatctcctgctgaaaatttcagactaggcttcctagcaaaatagcaataatcagttccatcacaccttaactttattctggattgctgtctctgaatacaaaggacttgtttttgttaaaagaatgaattgatatatagatgcaggaaagatttaccctatttagttcataaaatataaaaaaggaaagcaatggaagaaactggctggtaaatttgattttaaaagcttaaaaactcacagtgtaaaaaattataagcaatattaaaacgtagatgatgcattggaaaattgtataagttatgacaactgagaaattaatttctcaaggtttaaatagcacttatatgccaataaagaaattgaaaatggaataaggatgagaagagataattcagagtaaaagtaattaaaatcaataaacatgacaagttttcaaattttcactaggaatcacgaaacaaataatgaagagatgctttttttggcctgtgctattggtaataattagaataggtaatcctgacaagactaccataaaattggttttcttttagaatatctaaacctcactacaatattgtgggaaagtaccatgctttaagaatataat

SEQ ID NO: 33517 - DNA, 994 bp, Bovine  19866880926724
  misc_feature (1)..(1): n is a, c, g, or t
ncatggactgataaatcatctgctgcttttctgaagaaggggcaggacacataccaggaaaagggaagagcccaaatgtgaatttcccaatttgaacctggaaagtaagttatgctgtaatacttaataactggaaacagtattttatatccctctgctatttattgtgtattatttttccataggactgctcactagacttcaggaactgattcttagttacaatagaatcaaaactgtccccatggaactaagttactgtgccagcttggagaaacttgaacttgctgttaacagagaccataagtgatcttccacaagaggtcagaatgatgtaaatgcctatgattatattttccatctaatagtgatttatttctcccctgtatgatcactaaaaataacactaatgaaaaaatgctataaattttatttcagaaaatatttagagaaaacaatttattattttaaagcatgtttttaattagagaaagacctatttagcataaaagatatttctattattggcacagtaccgacattatttgttgactagactatgatctccttgaaggccagggtgagaatcgtgtttctattcccagaattgaaggctcagctcagtatgaagtcattacataatactgaatgaatgtccttatcataaagcacaggcagtgtggtgacagaaaaactctttttatctgttggtttttataggtgatcagcttttgagatacaggtaaagtgaaaagacatgaattcttcatattaggaagtatatttgctagcttcccaggctctaccaaggaaaagacaaggcaatgggcttgtgaagctctcaaactttcattggtatatcttgttattggcaaaactgatcataaagatacagattcttgtattatttttcaagcatatttaaggctcttatgaatcagcaaaggaaatttccatggtgcttgcctagaaaacaagattttgcaggataaga

SEQ ID NO: 33518 - DNA, 2038 bp, Bovine  19866880939724
  misc_feature (1)..(1): n is a, c, g, or t
nacactggaaggactggggagttaccaggtcagagtaaacacacctgggagacagatgcatcatcccagtcagcgtagacatacaatggtaattaggctgttattccatgacagataagaaactccagggaattagggaaccattcatggtctgagtagacactcctgaggaagtagagtcaacccaagtcacaaaagacacacttgggagatttaaaaaagctttcagatcaagggagacatacctaggtaattagagagacatcctaggaagtagtagacaccaggatatttaaggaaacagtgagtcacacctagggaattagggagacatcactggtcaaagtagatacacctgggaaataagggggacattccaggtcagtgcagacacttggataattaaggaaaatccaggccaaagcaaacaagtctgaggaataagggaaacatccaatgccagggtaagcatagctggggaattaagaagacaggccaggcaaagggagacaaacctctgatgtgggatacctccttaggtatcagaggagacacccttgggtatcacggaaatacaagtcagcaaattacatgggcaattagagagatatcccgtgtcagtgtagacacactggaggatttagggaaacctcccaggtcagtatagacacttctgagaaataagggtataagagcaggtcagagtcgacatactggggaattagggatatttcccaggtcaaggtaaacacacgtggggaactggggcgacatcccaggtatgggtaggcacacctggggaaatttaataagacacatctggaaaataagatagacatgccaggtcaggtatgaggaatataggagacatcccagaagaaagtaaacacatccatatcttaaggtgtgtaaactgctcagggaattttaccgatgggggagtatgttcatggagtccagctgcttgccactcaaaagccaataaacaggccaggttggtggaaaggaaagtttgctttatttcagatgctggcaactgggtggtggggagggtagtagacatctgtcaaaaggccaactcccctcctccaacaagcagagggtgagagcatttatagacagagtcaggagggtgctacatcctgaaacagcacatcatctctaacagtcatcttcaaattggtcatcagtcatctgactagcatcatcttggttgttttaggtacagttaatcttcagttctgggtgcatttgttcccatctctttgtggtcaattctcagaattgttgcagttcatgtcctgtatacagcctggtcattacgtaattaacttctccacctggggttttagtatctataaaacagctcacaggatattgctcagaatattatctacagcccttttagaaagaactaaatgtccttgactatgcttaatgactacattattattattatttagtctcctctgactgtttttctttgcttccacatttctcacttttctgattaaacttattctttgactaaagttttccacagacaaaaggcagcaaggacatgggagagggcgggtggggcaaggaccatagggtcctgctttgtttcacttggactggctgccttaaaatgtaatattagttagttgggattataagaaaagttgtttcaatatgagctaaatctttttttcttctggtaaatatgagtttgattgctcccatagcaagaacaagatttttcaagcaagtaacattatgtctggaatatcctagcagaaacctgggtagattaatgtttcaacatacttaaatatttagaataaatttgtttttcaaaacaaatatgaaagcctcaataatcagttttttaattaattaaatattcacacatataattatcaatttcatacatttagtacaagtgaaactgtctcaatataagagaaattgctagtaggtagtaatactgtctactatatttacattttcagagaaggcaatggcaccccactccagtactcttgcttggaaaatc

SEQ ID NO: 33519 - DNA, 663 bp, Bovine  19866881028919
  misc_feature (1)..(1): n is a, c, g, or t
nggaagttgaaaaacatcttgaagccctatcagatcaaaggggaaagaaagtagaattctgagcagagaaaaagcaaatagcaaacctaaccacagagcatagttcaggaccagcagacaagagtcaacaacactaaaactagagtccaaaacagggttcacaagtcagaacaaaagccaaactaagaaaggtaagcacccagatcagatcttttccacacgtaagggtaaaactttaaatgaataaagacattgggccatctgtctcctttataaaaggagaactgacagatagccatggtctttggatgatgtcaatgtgggtcattaggtcactctgcccccatcaatccaggggccatatctggcacttaaacactggcagaacaatgttttcaatgttagctggatgatattaggtgtagaacaatctttaatgcaaagcctttttaattgacaaagtactctagtcaacataaaaagtggataaaacctgcaattagaaccagtgtttgctggatctgactaagttaacagactccctatccaccacatacttaatgtatatttcttgaaaatgggctgaagaatagagaacctactcacattcaagtaatcacaatacaaggacattggttggttgttgttcccgtcactaagtca

SEQ ID NO: 33520 - DNA, 1161 bp, Bovine  19866881061007
  misc_feature (1)..(1): n is a, c, g, or t
ntttttaaagtgttagttattttgcctacctttggtcctgaaactgtgtggatgctatttttggcagatataggatgagaaaaggtattctggaatgcaaacgcagaggagacaggataaccaatcccacaagctgggtaagtcagtctaccctcaacctaaaaataaaagcataaaaaaggctgaggatgagaaatttgttctaaatagtatttggcgatgcaggaggcattagcatctgccataataactaagagttaagaacactctctcagaggccaaacttgcctaccatgacaccaaactctgtttcattacatattatgaaactggaatatctttggcccagacggcttttcagagtggctgtgtaagcttagaccaaaacaaacaaaacaaaacaaaaacccactggacctgattttgaactgaagtaaaacaaagacctctgaatcatcttggttccctctaggccctgaattcctgaaaatggagttcgggggtagtcctagaccaaaaagccaataagggataaaataaaaataatcgagcaatacctttcacacagctatttatcattagtcggtaagattaagcctgtcgtcttttcatgtttttaattcagtaccagtaaggaccacttaaaaatgtaagtaccacttaactctgtactttttcccaagttagcagaaatccttacccttctttaaacatcaagtactatctcatttactagagtagattaaaaattctactatggatttgcactttaaatcctctgccaatgccctccagtcaaagacttggaccagaaatacatctataggtgtacacactctttgcaacaaggaagactgaagaccaggtggaacctagaaagagacgtgtctctgtaagacaatgttaaaaaggactatttattggactttgtcatgtgttagatgaatcaaggaacagtttaagaatgtggggctatactgtggactggatgctatcaagaaatggggataactatatgactaggtatatgaatagattttatccagtaaggtaggatgaatgcactaagaccaaagttataactggtaatgagcagcagtcactcactttagccggatcggaggatacttgcccatttttatggtttggcaatgtcctatt

SEQ ID NO: 33521 - DNA, 1491 bp, Bovine  19866881092218
  misc_feature (1)..(1): n is a, c, g, or t
ngtgggccctgtgcccagaccccaaccaatgaaagggattattgttagtgagtgtgagacaaggccaaaggctctttgctcccatggtctggcagagatagggaaagaccaggacgaggtctgccccagaaatagggcagcagatggtggattggattgagtaagggtgacgtgtaaatgcaagtttttaagccatatgcttgtttgtacagaaagtgaagcacagataaaaatatggaaaaaaacaatattttgccacaaattgaaagttaatattagatttatctttgccaagtgcaagatagcagaggatagctcaaaacgtataatttgattaaaagaagttaacacagaatccctttctttgagctgactcttcgcatgccaaggaaaatgatctccccgatcccatgtttcatattggaaaggactcagagggttgtatttatatgctgacttttaatctgcaagtgaaattttcttttaagtaaagaataaataaattatttcaaagagcattttgtttccctgaagtgtgttaaagattccaagtataaaaagaatggaatatttttgtttcttaatttaaggagttggaacagcttcattaatctgtgcatgtgaatctttgaagtagacaacaatcatatgatatcctttccatatttcacatgggaaatctctggtaataagagttaatgaatgggcttctgaacccttaacaatagtatgggactgggaggacctactaacgtaagttctagattatagtcttaaacttagggatcctgttagttaaggcatgtggcacttaaatacattttaaagatgcaaatgaaagcatttgggtcttttgttgggcatatgtcttgaaaggctgaaattggaattaattatttgaaagatgatttaattttatctgggctttcccccaaacagcttctagcatagatgttgtaaatgtgcacagattcctcagcatgaataaaagattaccatcttctgtcccatgggaaaagtataagcttatatggataccactataaatagtgctatgcttaagaatatattgatgtatattctacatgcctaagagtatgctaaaaaaagagtgcatttaccttaagaacattaagttaatgataaaaagatgaaactatcctatatctaggtatttgctaaggtcaattcttgttttagataattttctagttaataatgttggtaatattgacaccagataggtggtgtctcttttactctcttcgaactgcaagtccacatcttcccattgtgaagtgcgctgttttagacatgtcaaggtgtcttggcatccccattcatgagcaaagatgataccacttagctcatagtgctgtagtgaaggataaatgagaagatgtgcatgtagcagggactgaaggtaagactcacatgaggtttatgtgcatagacaacaccacttcattaccctcccttagatcttctctg

SEQ ID NO: 33522 - DNA, 2001 bp, Bovine  19866881200564
  misc_feature (1)..(1): n is a, c, g, or t
ngaaatagagggacatcacacgttatactcatattataagcttcagattcccattaaaaatttctatgccttcacagtcttcagatcagagatacacagctagtcagagcagcataggaactgctcaggtagacagtttgggattttaattccagcttctccacttaataatcccagatctccatgcagaccaatttatttaacatttaattatttcctgagcctcagtttcatcatctgtaaaataaggctattaatattaattccacagggttgggaggatttcatgaaataaatctaaaaagcattcattgcagtctctatcagaaaaaccaatgtgcaatcaatgagtcatatagaagatgttttcaaattattaatatattccatatttgatgtattatttaatgataggccatcccagaaaaactcaagcctcaacaaattcaataaattcaagtcattggatatttaacaagcagccactgtgtgacagacactgtgcaccttgacagcacgttattactttataataatggttcatgcctactaatgcctttcacattcttctggcttcctccacgctgtgcaatctggattcacagtgttccttaatacatgaaggctgaaagtggaaatcatgaaaatacctttaactggcaggagtggagcgttgggcaggggaaggagagaggtgaaaactgagtctaagactcaatgaggagggccaacaacaaaaataatgagatgtagttctatgattctgtgaacaggcagagacaggagtgactgcgagtgtgcttgggtgtgtatatatacacatgagctgtattttcatacccaagatactttggcttttatctcaaagtcaactttatgtgtgttggccgctcagtcgtgtccaactctttggactgtaacccaccaggctcctctgtccatgagattttccaggcaggaatactggagtgggttgccatttccttctccaggggatcttcctgatccagggattgaacccccagtctcctgcattacaggccagtgttgtacaaaatacttacagattttctgtctacttgttctgtgagttacctagaaaggtaacattttattttacagttatggatttgcctatttctctttgaagttctatgtgtttctgttctagaagaatagcaatgatacctacacatagggttgccgttagtattaactgagataatgtacataaagcactagtattagaacatagtaaatgtacaataaatatcaactgtactattattcaggaaaatgagaaatttgtatagaaatttggattgtttttaattggcattttttctaatcattttcctaatcatttcctaatcattttttccttcatcatttcatgttcattttataattttgtcaagatcaaacataatacattcatataattacaatttgagtctcataaacttactctaaaagaaataaaattaagcctgagaggatgtttatctctatacttacattacttataatggtagtgtcctgttttcgatacttaaagggactcctttgtaattgaaagtcttaaatcctaaagattgaatgtcaaagaataatttcagtctaaattctttatacataatctttagtatagcctgttttattttgtagtaaatgggtacatatgattgttttctaaaagagaaggcaaaatcaccagctatattgcctattttattaacccaacaagatatatgtttgattatatctcataaaatggctcttctttctttaagatccccttggaaaggacttccagagctgaccaacgagaatggccaatactgccctttcagctgtgaaacacaagcctggtcaattgctgctgttcttgaaacactctatgacttatagttagttgactcatgcatatatcttaagtatgcaaccaattgtattgttgaatgcagttataatggaatgtaaatgctttatatgcacatg

SEQ ID NO: 33523 - DNA, 685 bp, Bovine  19866881232253
  misc_feature (1)..(1): n is a, c, g, or t
nagagtatttgcaagccgcactctgactcaggactagaggctcctccaggcccagctgcaatgacagctgacgttccctgaggatcagcatctggaaacttagaatgtattttaaggaactggatattggaaagaaatcttgggacctaaaacaggttaactttagtaatatctgttaacatgtaaaagatataataaagttttaagaatttaccattaattttctcttcaaataacatcattcagttttttccaaatacatgctagggtacgagagctatcactatacaggattcatttgttgttctggaaagtattaatgctgtaagttgaaatatgtcgcttttttcctatgatcataatcctgtttttataatcattacatgtaaaatacttatgttttaattatatcttcaattaatactgctttctttgaaaaaaaaagtggtactatctaaaggcattttttaaattgaaggacacctaatcattacttgtgttttcaaaatttgttatataaaaaagcaaggaatgaaataattaacatataatattctcattaaaagtaataaaagtagttaatgaagttcataccagtatgattgtagacaacatcagttatacaaagcatattccattcctttttcaatttttgcaccagctgtccaacatcagtccaggtgta

SEQ ID NO: 33524 - DNA, 1170 bp, Bovine  19866881351232
  misc_feature (1)..(1): n is a, c, g, or t
ntaggagacacaggagactcaggttcaatccctgggtcaggaaaagggcccctggaggaggaaatggcaccatcctagtattcgtgcctgtgaaattccatggaccaaggagcctggaggctaccttccccggaatcgcaaagaagcagacaaggtttagtaactgagcacacgcatagacctcttacgaagacaaggaaagcctatgagccacgcttttcttcactaggcctattataacccctctgcctcctccatactacacattaatctgccaggatttcaacttaatcattacttgttcagaaccaacatatcacattcattttgaaatgtgtatgactgaggcagtgtttaaatgtaaactcactggttaaatgcaattttcacataatacaggcacatactacgctatggtttttcttatttttttaatgtaactttcagaaggttatattaaataacaataatgggaattaaatacattatctacagccaccataaaatagattgcttaatattttactcccttacagctcttattaatatgtatatatcatttttacataattgtaatcagagtagagatacaattttgttttctcctttcccattaattatgagtatattttcatattactatttagttttttaaattaacattttcctggctgtattttacccctagagccactgtagcaaaaggcatttaaccatttctatatcattgaacatttaggttgttttgatttttactgacataaataaagaacaataagcaaaatagaactcggactctgggtgacctacattgagtcctaactttgctatagatttgtacttacaaatacctgttgtgttagaaagcaggcttggtgctgggtatgcagtggagcataagaaagatgtggtccattccctgcataaaaatgtggttaatggattagtatagtctaaaatgatgataacagtattatctatcttacatggttgtcatgagaagtaaaagaaatcacaactgtaatgcatttagccaatgcctggcatataataagcatccaatattcttcttatcattatttgtattattattactatggtgatcttattactattattgtttttaggcttaaaacttgcttcagtgccatggttttcaaagattataca

SEQ ID NO: 33525 - DNA, 847 bp, Bovine  19866881476813
  misc_feature (1)..(1): n is a, c, g, or t
natgcagactgttcttgctctgcttccctgcttaggttatctgaaaacatgcagtctcccttggtactttgaactccctctcggcattgaacaatttccatggaaactgggctaaagagaatatctcaaaactcattactcattatgccacttaaacaagatttttaatttcccttgttctcctttttgttacatagtcaataaaaaccaacacatatttcttaatgatgcaactcctggacaagtctggaaaatggtgtctgattaacctacaaagattcctacttatagagaatacaacatctgtttttaaaaagatgctttgcatctcagaaaatgcacctaaatatttccagtgtagcttagccttttagccacagaaggaaaatcctatgctgagattccagaattgttctttgtcttggcaaccttccagcatttgtttctactcttccaaatgccacatcggagtcacagatggcagcatgatttgagcaggtttgagcttctctgtttttttaatccaaatcctaaattagatagaagtcaatattcacctctcagcctcccccatccctgtcctccccttcctgcttctttttgttttcatctcactgagctttcaatttttgaatgcttagtaattttttaccagcacaattaaaacaccagagtcacagtaaagtcaataccatttcccagcacccttcttgtttcaatctgtactccaaatctaaattaattgaggttatcaggtgaatgctggatgctagtttggcccacttcaaaaggtagatataatgttgatagtaggttggactggagtttaaaaagaaaatactacatt

SEQ ID NO: 33526 - DNA, 840 bp, Bovine  19866881876636
  misc_feature (1)..(1): n is a, c, g, or t
ntctccagaacacaaactccatgcaggatatgatgcagccatcttatgatagtgaggtaaccatctaaaattaaagcgaactcagaggtggtgagatggaaggctagaatgaccttggctccccagtggcatcgttgggctgtcaaatctgccctagatttcctactcagagcctcttgttatgtgtgcaaagcctacctaaatttgtttaagtaagtgggacattttgggggagtaagcagtagtttctattattcatagctgaatgcatcctgtaaccattataaggtttctgcattctactatctacttgaaagcctgatgtaccatcaaagtggtgactttgatattctaggcatgtaggaagttacccacattacaaactctgcttaactgacaaataaaatctgtggctttgtttcagtcttgtcttcccttatagagcttttactccaataattgcatgcacattacatgaaccctaaatataagcctaacatgagaggactggccatacttcttcttgtgaagtatggaaaagcctttcctctgacaaaatgcctaatacagtgacatatactcagctgggactctgggaacacatacatctgaggctgctaatgtcattcaaaccaaaaacagcttcctgccactctttagtgaccaccaatgtgtcatttaagtgtagaattggggctttctcacacctgtcatttcccagtttcaagaagtcttggttatcaaaccaggaaaatctgttggttttgcataaatgagtaaaacagttttcattttccttcagttaaaagagaaacagtctagatgaatttttgatccata

SEQ ID NO: 33527 - DNA, 1485 bp, Bovine  19866880435746
  misc_feature (1)..(1): n is a, c, g, or t
nctgccttttgaggagcagtttatttctggtccctatttctactaggaatcagccctttaccatacagacccaaagctaggagggtttccaagggtcctctttcttagtaggttctggttttatccccccaaagtcattgacactcccctcccttctcagcctcccagtcacctcttctggatttgaaagatgcctccaggagaaaaaattgtcaagttccacgcacatttggaatttcttctcccagatcttgttctcatacttcattgcctgttagctctctgacaactttaaacagatgttttaaaatttattttttgtctagcatttccagtcattcttaataagaggaaagatctgaattacttagtctatattcccagaaatccaagtccaccacagcccaacttgtcgcaatacaagataatacttgtatctatggaggcatcttcaaaactccctattcacagaaattaaaaaaaaaaaaaaaaactgagcagatgcattcctggaaattgctaatcagctgctaaagactcaaaagcatctggttaatgatattagcctgaatggatcacattactaagcccttttaaaacagaaattcaggccaccatccctaagcaaacttctggtagcaaggtcttcacttacctgcagaaaaataagctaaagattctcaaagccaaacataacttgaaagaacatcctacaccctaagctcatcttctaaagctttgcgatgtttctgctcccaagagatcccagactctgagcatcttctcttttagacagaatctagtgtcagtcatgggcttccctggtagctcaattactcacccaatcccagcctttcttgcgttaagaaaatctcagtccatttctcttctggactccctccccacatatctgttgcagttcaggatatatacatttaattaattcagctttacctcccacctgtaaatagtgagagaagtgtcagatttacatggtggataaataacaagggttttcccaggagactccatcctggtgaaagagggtaagtgtaattttcagctgtgagtaattgtacataatataatcctaaatgatttttcttctgtaatttcattagagtttagaaatttaattagattttgaatcactctgaaataaagtagcaaaacaccgagagactgagagcggtggttattttgtccttagaggccacattcttggtctcaaattggcatgtcttcattaggaggaagtttgcagaacttcttgatatattattgtctttcagaatggactctgaataggtctttggagagcattagaagagtacacaattattatgcacactcttcttgaggtttaagatcatctgccttgcatatacttaataaaaatatgtctctaaagttgtttaagaaactgtggagataggaaagatgttccttgaatgccccgatgctgttccggattattagcaagta

SEQ ID NO: 33528 - DNA, 1280 bp, Bovine  19866880456263
  misc_feature (1)..(1): n is a, c, g, or t
ntggctcctagagcctgggatccccgagagccgggattcacaggagggactgaggaaggacagggacaggggagatcctgcaaggcgaggctgggcagcccttatcctcagcaaggccaagaccagcccctcaggccagagtggaaacaggaaggcttcctgaagccagagcccatgggtgtggggctttggattgggctgcatggaagccacctggttgggagtcaagagctcttttccaactggttctgcccaccaactagctggcccctcctgtctcttagtttccccagctgcaaagtgaccaacttcctcaggatgctctgggagatctggcagctgggatcctggcacaaagtctctaaaagaggattgtggacccctttagtaaaaccaaagacagcatcagtctctcagacacacagtacaaacttctgcataaacttttgagattctaatcgcacctgtaaacaaggaacaatcacacccaacgccccaccaattaaaaagccttaataaacagaaataggatgccagctccttcaatagcaaccatggcccccacacagaccagctcctaatgagtttttctcctgtttgctgatggaggacatttgtaataaactttaatgtggaaaaacaaggtgcatttaaccaaagctgcaaacatctctaattctatttaaactataggatgtagtacattaacatctaacaatcagacactcagtcagtgtgaagctagtggagctgtgtttactagaaagcaggcaccaagtcatcttttatcaatgaccacagaaggagcagaaacctgccgtggctgccctccaaccccaccctgtgcattaattaagagtctgctccaaatctttcaccccatggagtgacgctgatggctttggagaagatcggctgagcaggacagacacactcagtgccgaagtctgctaggcttgtgcattcggggaattgtttatcccagaaaaataaatcttttaataaattttttttaaaatgtaaagtgtgtagtgttagtcactcagtcctgtctgattctttttgacttcatggagagaggcctgccaggctcctctatccatgggatttcccaggcaagaatactggaatgggttgccatttccttctccaggagatcttcccaacccagggattgaacccatgtctcccacgttgcaggctgattctttactgcctgagccaccagggaagcccaaaaacaaaaatgtgaagtgagcaattaactcagaagagcagag

SEQ ID NO: 33529 - DNA, 1528 bp, Bovine  19866880503097
  misc_feature (1)..(1): n is a, c, g, or t
nggatctccttgcgtccagggactctcaagagtcttctccacaccacagttcaaaagcatcaattcttcggcgctcagccttcttcacagtccaactctcacatccatacatgagcacaggaaaaaccatagccttgactagacggacctttgttggcaaagtaatgtctctgcttttgaatatgctatctaggttggtcataactttgcttccaaggagtaagcgtcttttcattccatggctgcagtcaccgtctgtagtgattttggagcccagaaaaataaagtctgacactgtttccactgtttcccatctatttcccatgaagtggtgggaccggatgccatgatcttcgttttctgaatgttaaatacaatactgtaggtgtgtgatgttatttgagttgcaaaaaatggatattatgtttctaactggcttggaaaactaaccattttcttggggaaataaaatacatgaaaagataataaaagaagacagttttataatacttactaactcacagcaggtggtggcatctttagcactgtgtagtaaagtttgtttaattattaagtacccttttttcaagttgttggaagatgtctcgtgagaaatgttttgcttatattccgaagcagttgtcactttaaagctctctcacctttccctgctttgtaggacatggtaatactgtggaatagttttgatgttaataattcaaggagactgatcattttgattcattcatggtatttagagccgtaggattaggaaaggcagcagtggcataaagatctaaaggcttagatgttacaattgccaggccagggcttgggtcttgggtctgccattttatagctttgtgacctggcaagctgctcagcttctctcagccctgtttgaactcctgaaaatgggtattttttttagtaatcttttgagaatgtgttgggttcgtacgggtgcacagtaaacttagtgtgctccccagcgtgcagcgttcacccaggtgattcctggtgttgaaaacagagtgtggctggcctcttcatctcagtgcttgagaaaagacattctgatgcttctgactgattcagtatgattatgcgtgagatagttcacactcgctttatcaaagatattcacaatcctttacctttttcaccctgtgtctaggtacattggctccaagtggatacagtgaaagagaatgttaaaattcttttttgggaaaggcagggtgtgaccagagaagagtccacacaaggatgggccgtctggcaccactgccatcgcatgttctttaaaaaggcccgttttctgaaacgctagcatgaaaagacttggctttttcaaagctgggagtcgagagaaaacataacaaaagtagaaaaggaccacgtggtcccttaggcatcctaaatattttcagatccgctccaagtacacaaattataacacaaagcgatgttagttcctgttaactttcgagacggcgtgcacacctgatacgagagatgatcgatg

SEQ ID NO: 33530 - DNA, 784 bp, Bovine  19866880546559
  misc_feature (1)..(1): n is a, c, g, or t
ngacgtccctatatcttatcttcttgctaccaccttccactccttgttactattaattaaaatggcacgttattcaaaaccatgagtgatctggatcactcattcagtccttcactaaaaagctcgttataccagcacgtgtcaggcacgtgggtttgtctaagaacttcacagggtacctggaggcaaggtccctgaccaggaccactgaggcagcctttcctcttatcaccatccgcctcagccctcaccaaccacaaacgtgcatccagctccattcagttatttgcaaatccctcttctcccccatccacgcctttgctctggctgtttcctctcctgacgggtgtggcccgcagtcgcagagccctgctcaccctgcggccccagcggaatgccacatcctccacgtgaacctctaccattcccccgagtatgtgaccttgtcttttccgtactctcatgcaagtgtcagcctcctctatggccttttcagactttctatcagctatgtcagtaaagtctatccaatatatacccatatcgacatacttctccagattgtgaggttgggtcccaggccagtggggatcaaacctccccacacgtacctctctttgggcaaagcacagggatgacaggctcataaactggggcttcatacgtgctcctgagtttgttccaatctcttaaattcttccaagaccacggcagttagaatgaggatagacacaatgaaggattgtttgaagttgtgtttaaattacactctggttgtcaattt

SEQ ID NO: 33531 - DNA, 1285 bp, Bovine  19866880568910
  misc_feature (1)..(1): n is a, c, g, or t
ntatgataaaccgctcccccaccaaaaaaaagaaagaaagaaaatgtaacagaggtgctctaattgacgtgggaccttcctctcctggaggaagtgacataaaatcgagacctaaaggatgaatccacatcagcccagagagccgtgctggtgttgagggctggggaagcacctctgcaagaaggaaagagttaaggagactttgaggagtggaaagaagtccccagcatctgaagagcagtgaggccatgtggggaggagtctgaaaaaggaagtcagaggtgggggaaggggtcaaggtcaaggtcacgctacagcaggcagtgtgaaggccccttagtcccggcaggccctcatccccaggtggcaccctgtctcctggagagcgccgcacactcacccatcacgatgtccatgccctcggagctgcgttccacccaggagcctgcaggcaggccgtctttaaatcgccctcggagggaggggcttgacaaaaagtgcagcagcagcttcaagcccagcaccactgtgctggggtgcatgtggccctgcacgaagagcaggaaccagtcggaccccaggttcagaaacatctcttcctttgtcctggtgggaagggggtcaataaatgctataaattatctctcagcccataagcaaacaacatgtccagaaaatacaaataacatccagcttcattaggcgcccaggagaggcaggttaagggtaacatctggacatcactcagcaaagtatatattacattttaaaagatcggtaatgtcggcaaggctgctgtgaaagaggtgaatttgcctattaatggctgaagcgtaagttggccaaagcttttgaaagcaactggaaaccatgtaccaaatgataaagccctgctcactactattcatacttacacagtgtctgaccggccactcactaatgacatcaatgtagtcgcataaaacacatcatggttacttaattcccttttaaaatacactgttcagaattagtcttaatggaatagcacattatttatgcatctttattggtttagacaaaaaaaaaatgtttaactgtcactttcaataatgaacttttaaacgatgtgtctagagaacacagacttgctagagggaaatggaggacagagagacgggagccgatgctcaggggcaattgttcagcaaaacctgaggttcctgagagccaggaaagggtccatcctggctgggcagcagtctcagcaccagttgccagattaggtgaggtgagggcatggcca

SEQ ID NO: 33532 - DNA, 4100 bp, Bovine  19866880657410
  misc_feature (1)..(1): n is a, c, g, or t
nttgttgttttctagagtttctgcggttgcagatttaaagaaattttttattaaaaaaagagatatttttgattcatctttttccaatgtccatgtagttaaacttttttttaaattgctgttgtttatttccagtttatttctgtcctagtcagagcaagcaatctttacactttctatctgtgggaaatttattcatggctttgttgtagacctaatgtgcagttaatttgaggatagctgaaaaaaaattgttttacagcatagaaagtttattactttttaaatcaatgctatttagaaaaagcaaaccaaagaaataacatgaaagcatttaaaatgaaggaaatacctagtatgcagacagcagtaaaaaataagaccaaacattgactttataacagcaaacataaaacggttaactattgtataacagatgtgacccttaaacagtcttctgggatctaacaaacatataacagaagcaaagtcagaggcagactttggttcagtgaagctatctgccatgaaagcatcatttaccaaatatgatagacaagcaccaaaatctaaaaggcaaaaactgaaaggataagagaagatcagaaatagaattgtagtgaatgtctctctcggtttatttatcttgcttataactttactttgcttgctgttattcccttgcacagggataaccatagatatgtttgcttccttgagcttggtgtcaatggaaccctacagtatgtacccttttgcatctcgaatctgcttgcaatgcaggagatctggggtcgatccctgggttgggaagatcccccggagaaaggaatggctacccactgcagtattctggcctggagacttccatggactgtatagtccgtcgggtcgcaaagagtcggacaccactgagttcactcaatacaggaggaattcgcttgtgttgtatatgttttgtagttccttttttttttaattgttcagtagtattttattgtgataatggatcagcatttattccttctgggttgtttccatgtggaaatattatgaataaagctgctatgtacatatcttttgatggacatacacacttctttctgttagaaatatacccggatgaaattgtggttaggctgtgcacatgatttgttttagtggatattgccaaatagtctccaaaatgaagagtcagtttacactcactagctcttattctgggaaggttccagttgctccaggtccttgtcaatgttttgcattgttggtcttctagatgttagccattctgctgtgtgcaactatccttgggagcagacagcatttccttccttgtgcaaatatagacactgtggaggttaactcactcgggcaggatcacagagcgagagcacggtggaaacatgtgtgtccagcattaatatttcattctggggcacctgcccccgggatccagcctggtgctttgcctaagcaccttcgggggatgccctgcccccgggatccagcctggcgcttcgcctaagcaccttcaggggatgcctgaacaaattctatatctgaccttatctcccagcttcttctatattcaccctgtactagccactatgaaaataagcttgaagcactaaaatgtctcatttaattctcactacaatcttaagaaaggggtcatattattactaggagtcttgcaacaaggcgtcttgttgagaggctcagaaaggaggtcttctctccagatctcaagtcctctggctcctatgcagccccgagtcatgcccccacatgctgcctctcatgaagcgtgtccacagccctcgacaggttctggagacagcgcctgggaacggacattcccggccagtgtgctgcagttccttggcctcgtgcacagcgcctacccccaggatccagcctggcgggcccctgagttcctccagaccttggctgcggtcaccttccccctgggaacccagaaggtaagacacacctctgccttgccccggtgagagcaggggtgagcatcatcgcccttcaaggacaaaatgccttcacacccctccccggatgaaaatgcattttgagtcaacctagccaaaaccctaagtaaacaactccggtagttttccttctctttatgaggtccagcttcagctcatttttggctctgagattcaataagtttttgagttgtcaggaaatctcagtagtgagaaatttgatggtagattaaatccagatctacatagaatacccacacatgaagcatgaggaaatcacagattccactccaggaaggccaggggtgggactgccataggccccgtcttctttccaggaccctggttctgttggcaggccatggtgcctttcaatcagagggcttgctgagccccagctggtagggcagagggaccacctgggtcttgaggacaaggggtcagtgtcgggtagagaacactatgggaagagatatgagtgagtctgagagcaagagccagtcccagccggtcaaggggactcgtgagcgcggagcatctgggagctaagaacagcaagtgaggaccagcgtgaagcgaggtgctggaaaaggaagggcagagatctgctcattacctgccttggtggaataggagctgagacccagccaaggagagtgaattatcgattcctgtctgcaaatcagtaactgtaaccaaaggaatacgttaggcatattggtaaggagaggatccagaagtcataccaagcgcaatgagggcaagtaatgtttgctccataattatctgctgatcggccaagaggatgaatatgttcttttagctaagcttttctagaagtgtattcatggtgccagcctccatctcctgagcctggtgcttcacatcccctaacaagccccgatgcaggaaatgttaaaggtggaggcgagattcagggaggtgaagctccacagaccagctccctcccgggttagtggggccatgagacccatctcacaaaagtgtcgaaagggtcgagaagatgaaacatgctgcagcttatgtgattcataggtgactaaaccaagatttacacctcagtctctcaccccgaaacctattcgtttccatcagtcagtttaaaataacaatacatgacctaacaaaatttaagtgtttagttttaataaaaaagactaactataaagaccagaagatttgcaaaaagataaaatgttttgatgggttactatcaactaaagcaacatactggaaaagtaagtaaaaaaaaaagatgtaagaaagatcaaaggcagcactggagggggtgggggatgggacctctgcccagaagctgggcgaccccagccaggcagggaggaagcatggttctacagactgcccctcaccattccgctcacctggaggaggacagggccttaagttggggggctgccattctatgcccacaggccaggctcaccatctgctgagtcggagttccagccagctccctgccagtagccacagaccgcagcctgacccagggttcttcctccccatattcagtggttcccacctgagggagagctggcccaaggtcacctcccagtctaccgtggatgagacaggccctgatgccagaactcatatcacagcacctcctggcctccttttagctccaagtcagctccaaaatacctttgttgcacagaacatgtgacagacctgttttcgtgcagaaggcaagtggccaaaaggatttctatttgctacaattttatatggcatctttccagccaaggccgcatggagctaattaatacagtcaccacctccctaggtgccattaaattcattttacagcttaattaagaatggctgcattaattttatgaatgagccaagggaggtgccagcagatgaacttgcatgaaaagttcatgggccaagagtcaggagtccctggccgcatgtccttgggtgtgtcacctggcctcccagcatctccatgtcttcccagacgtatctgggctaatgactcccatcacatttatctcccaatatttttgtaatgtaaaactagaaagtaagaccaaggcacttcagggt

SEQ ID NO: 33533 - DNA, 2058 bp, Bovine  19866880697175
  misc_feature (1)..(1): n is a, c, g, or t
ncatgtcaatgtctcactatttgagttcaccaacttcattcagaactagcaatacaattaataaatccggttggcattgggggaaaaataagatgaatcatttaggattgcatcctttatttaggaatatccctcatcacacttgttccatttcaagacagacaacattgtttatctaaactttcaaaatcagcatctagtcaagaccagcaaccatttctcttcctgtggttggaaatgcttggaagatttgttcatggctaggagagttgtgctctgtggtacttggtggatttctgctgaaatgtgaaagatggaaagttcatgggaaaggatggaacctcagcagaggctctgagcccagaaggcaagggtccaacctcctggaccgggctcattttcagcatggggcctgtctggggctcagagagcgcttgagaaagttgtgtagagctttactgttgattgaggtatttttgagaaaatcagcattttgaggctaatccataaggacactttccaagtgtttaaatatttaagacagattgttttgatgttttaaaggatgcagatgttatcgctgtctgatggatatgatgaggtctggagcgctcaccctgctttcttttaagcaacagcacactttcccaatgtagcctcgctccacttcctgagaagtcaagtccaaggtctgaaaagaaatcagacccgtgaaatatgctgtgttcttcaaggacagcttctcctaagtacactctgtgaggtcctcccaagagggtggagataatgagattcaggccctcacccactcggctctagtaacaggctacataaaccttctccaactgggcattttacctgcacccaagaggtcgctggagatgcaggcgctcactccgtgacgagagagacctgcctgtgggctgtgtctaccacaggtgccaatccatcctgcgctttctcctgctggacataaggttgccgagagcaggggtgtggccttgagtatggacacatccacctctttgcagtctgctctgtgtgggctcttgagaccctaacagttccaatcccaataaatgatgctcacagcccatcctgtaaccattcatcacccaccaaagtcaggtcagccatactccagcactgggactggaagtagacaagggctggttgccaagaggaaagcctcaaggaggctacccaggagtttctatttagccaaggatcatagctgcctctaagtcaccagcatccctgcctctgggtctgatgtggcatttggcccatcgaggtttgaaccgaaagacttcaccctgtgcccgaacatgggcattctgaacaccttgcaggtgcagaaactcaggacttttgcttatttagtcccgtcatgtgctcagtcctgggaccacatatagccttctattatggattaaacaactgttcatctctgagggatgaatgagggatcctatcaccgacactcgtatgtctgactgcagatattcaagaaaacacatttgccctgcgatgaaggctcaggcagacatcaacctccaggttgcacaaatggagccttaaggtggaagggatgatcttaaaagactaatttgcaactccagatggacaacccagtagcttgggatcgttcatcctctatgaagctcaatatggaactacaaatgcaacaatagtctccaaggagctgaaatattttccccaaatgagtgttcatttcatataactaaatccatataaaagactttggatagtcattattttcctggagtcttttattaaaaaattggagtacttgtaaaatgctatgatcattttgggtatgaatttaagaactgtggagaaacaaagtaatcttgttctgaaataagatttgctttattcacaataataatactaactgcttaagtttgtgaggcaccatattaaactcttgaaaatattgtctcatttgatccttatataatcccatggttttattattgcggtaatattactaaccacatttgactgatgaagattctgtgtttccttcagatt

SEQ ID NO: 33534 - DNA, 1437 bp, Bovine  19866880701198
  misc_feature (1)..(1): n is a, c, g, or t
ntgcttcgtgaagacaggattactgaggacaagagtggaagcagagacctgcaaaggcgggctacagttgaccaaacattagatggcgggggcttggaggtggagggcagaggatggaggagaactgctgtggggcgaggggaatgagcaacggaaaccagttaagccccagatgtttgacttgacccaccagggggtgggcagggatgctacttccaactccttgtcaagaccaggaaaactgggtggaacaggtcacagctccagtgccccaggtgggctggctgagatcaagagggaaccacctgatattctcgccacctgcctggcctttgtcagctctgcgtccctccacccccatgaactctgcgcccctgggtcattgcttgccagctttaggtgacagggtccttccatgcagcctgccctggtcatacccccatcctctaggctcacagggagtcatccctccctccaagatgcttctagacccaagagtagctcatcagtcagtccccctgggcaggctgtgcttacctgtagaaggccagctggagggccacctgaataaaggcatcggggctgcatttctgctgcttaatgaatgttttcccatagtcatcaaacttataaacggtgaagtcgagattctttactattctgtggaagaaaaaggaaagaagctttcactgcatgcaaaatagaatgcactcaccacagagtctaatgaagtttctcgagcctggtccatgtcaaagcagtaaggtgtccaggacacagtcagagacaggccttgatgtatgggagtggcagagggcatgccgacaagggggactctgaactgagggtgaggctcggctggatagggcagtggttctgtactgggggtggggagggggcctggctgcagggagggttgcagaagcacgagggtcatttgcgtgggcaaggagcaaacaacctacaaagtcctagggagtcactgcccccgaagtaggcctatggaggccgtgcattttgacctgtgtgtgaagtgtgtccagcatccccgtggactctgggcctcctggccatcttgccagacctgccaagcccgggtgctcagggaaaagcttgcttctctgatggctgcaagcatctctcactgaggctcgtgttcagggaaaagcctgcttctctgatggctgcaagcatctctcactgagactcgtgctcagggaaaagcctgcttctctgatggctgcaagcatatctcactgagactcgtccctgttgtgctgtgggaagaaaggcttggggcctggccgctggccacagtcaccacagctaaagctgctcatccaggctttgttggtgactgaaaatccattttacctggaaatcgatgctgagcctcccgtgatatgcccagacctttgctgcccacaatcactgtca

SEQ ID NO: 33535 - DNA, 1196 bp, Bovine  19866880706308
  misc_feature (1)..(1): n is a, c, g, or t
ncaaccctggatgcctgacagggtggttgttactattaagcatttatatagcactttacattggccaagtgctcccaatcatttattagttaattctcccagcactctggagccgtcagtggactctggttgccatttctccaatctggagacgaggttgctgaggtcaggcgaggccagatgcctcgtgtagggttacctggctcaggtggcccgagtcactggctctgcctttgacccttgactacctgtgggtttcacgtcttacaatcttgttgtcaacccactctaatctccagtgaggtgccctgtgggtggatgctcagttgctcagtcacgtccaactcttctgtgacttcatggtctgtagactgccaggcttctctgtccatgggatttcccaggcaagaatatgggagtgggttgccatttcctactctgggggatcttcctgacccagggatctaacctgtgtctcctgcatctcctgactcggcaggcagattggatggctgaaatgcatgacctcagtgacactccagaggctgctgtcaatttacagcctcatgaagggatgaacactggcttcagagtcaaaatctggttgtataatttgtaagatgggtgattatgaacacatttcttaatgctcccaagacttggggtccttgattattaagtaagaatagaaaaaccaaagaggttgttatgaagatcaaaagtgttaaataaaagaggacacagcataagacaaagcttcatacttgttaggcaagcctctaaggactgtcatggcacagtcagacttcagcttcgaagatgacacaggctggcccatgggaaatgtcataaaggaaagctttgggtccaagaaatccatgggactctatcaaattcttgccttcagcttgggaacctaagagtagaaaggtgaggaaaagggcaaagctggagctaccactgcttccattgcacacgaacgcatcatgctagttagaacctacgctagtcaaaacccagtgagttttctcattcagatcagatcggatcagtcgctcagtcgtgtccgactcttcacacccccatgaatcgcagcacaccaggcctccctgtccatcaccaactcccggagttcacccagactcacatccatcgagtcagtgatgccatccagacatctcatcctctgtcgtcct

SEQ ID NO: 33536 - DNA, 1398 bp, Bovine  19866880706315
  misc_feature (1)..(1): n is a, c, g, or t
nttaaaagctactagagcaaattatgcaaatgtagaaaagagaaaagaataggactgctttgagtgcaaaatatgaatgcaaagacttaatgataatatctgcccaactccgtggcccagttttgtcccctccccaagactaaacgtccatctgccctgctaccaaccaatgcttagagatgcctgacttttgaggccctggcccaaagcattccagtagaaaaagctccacactggggaactggtagttgatcctgaaacctgtgataatgagacaagattgtgtcagctgcccgggccacaggctgtaggcaagagaggtctggggcaaaaatgagatgcatggccctttccaaatttattgtgcctgtatgtgtgggtgagtgtgtgcatggagagaagacagaagtgtatgaaatggcaaagaactaaaagccctctgatcaacaaaatcacaagccaaggaggtagggaaaggtgttttatgggcttgactggagaagctcttgcagtaatggcagaatcccctcagttttctgaggatgcagcccattgtcaccttccctccacctcccttgtcccttactgccttagggtcagggtcccaggtcacctccaatcttcctgggattccttggccatggagttgggtgagaccaaagtggaaaagatggcctttcttggtatcgtcgtggccatgctcttgattttgttcagcttgtcccgggcctgttggcattttttcaggcaagtcccacacagatccttctcttccaccagatgtaggttgtccagccttctgatggaatccatgaacatatccgatgactctgccttgggaaagggatttcgctttgtgttgagctttttcagcttggggagcttggagatgctgttgggaatgttgctcagcaggttgtcatggagccccacctcatggagctccttcagagcacccagtgtggtgggcacgctgtccagatggttcaggcctaaattcacagtgcggatattcttgagttgattgagctctacgggcagcccgttggtggtcagcctgttgttgctgacattgaggtagagcagagaagtcatctggccgatggtctcggggagcttgtcgatgtagttgctgtgcaagtccagccaccgcaggttctggaacttggagatggcatcgggaatcttcttgatcaaattccggctaaggtcgagctcatccacatcagtgagtcgcaaaatacacttgggaaaggtggtaattcccatcttgctcaagtcaaggcgtttctttccatcaaatgtgatcttgatacaattcttggccacagcgagggtgatcttcttgcccttggggccttttgctcccttggccatgttcttttagtagaggagtgt

SEQ ID NO: 33537 - DNA, 1909 bp, Bovine  19866880716191
  misc_feature (1)..(1): n is a, c, g, or t
ncatgggattcttcagtcaagaatactgaacaaggtagccattcctttctccagggcatcttcctgacccagggattgaacatgggtctccttcattgcaagcagattctttaccatctgggccaccagggaagcccaatcgttatacagtaggttttttttgtatagctggaattagcacagaattatcctgagaaaatgttggccttgatcttattctggttcctttgagctcctgtcaccgagaattcatgtattctctcactcatcccttcagagatttattctatgtaaggacccaaatagtccttacttaatgtgggactctgcttcataccaagacatcatccccagatcagcctccccagaaagccaacactgagccagagatgtgcgcacagcatgtttgttgggggtgcgggttgctggatgtgcaacctcactgcggtctcagccaggcctcggctgagcccatgggagctcagagtgaatggaggcaaagggccagtccctctgcctctgtgctggcccgatgttggggacagatgaccactgagacggggacctgacccatgacaggtactctgtttagctgaggggattctgggaaactgccagcatcttcagctgctgagagaatgtgcttgagccagaggaagggatctggtgcctcctctgcacacaccttggagcagctttggcctttgcagacagcagtaccagtcttgcatttgtggttctaggcagagctggttctggtcctgtcctagttactttccagctgttttcttgacaagtttcttcacgtctataactgagtgatgcctcagacttcaaaaactttcctcattgtttactgaggagtgttttgcgtggttgtagaggagcttaaagtgacgggaaaaatgtcaacatgttcaaaatagcaataaacactcatccacgtgcctcagtgggatacggtggcctcaggtaggtgaaataatgaaacagggtgtcgggtgtagaaatcccacttagactgtgcagagcagtgcagctggggacagcggctccatcatttacagggtgctgctcttacttcccagtgctcagcgggcgaccagactctgccctcttgtcctccttaagaagctgggtgtgtttccctcatgcatggcctgactctggcactctctccctgcaggtgatgcagaagtactctgtggtcatcgtgcagggccacatggtctgcgaagggctcctgctcttcggccagcagcacttgtacatctgcgagaacttcacgctgtctcccgtgggtgatgtctactgcacccgccactgcctatccaagtgagtgcccctccagtcctggcagactctgccgtgaccccacgccgccttctcagctgccccatgcctatgcctcccaccttttccttcctatgggctcgggtttgggcctgaaactgagccatgagataaaacagaagaaccttaggcacaggcatccatgactaggattccccaaagctaaaatctggagcagttaagcatacagcagctgctcgggttctcctgccatgaaatgcaccacaggacaaaagggatcgctcttcaggttgtttggagaatagaatccagtcccatcagcgtacctattcaacaacttttttttaaatcggagtatagttgatttacaattttgtgttaaatattgctgaaaaataatgtatatttatgtataaccgagtcaacaacgtcttgcttgttcatccttatgtaagacatcaggcactgcctctttatccccgcaaggcccgtaatacaatcaccagcatatgcaggttcttttggaaagagtttggagcacactatcaccaagcgacaaaatgcatgttcctgcgaggcctcttcagggttcaca

SEQ ID NO: 33538 - DNA, 1781 bp, Bovine  19866880785560
  misc_feature (1)..(1): n is a, c, g, or t
ntctcatcctctgttgtcctcttctcctcctgcccccaatccctcccagcatcagagtcttttccaatgagtcaactcttcgcatcaggtggccaaagtactggagtttcagcttcagcatcagtccttccaatgaacacccaggactggtctcctttaggatggactggttggatcttcttgcagtccaagggactctcaagagtcttctccaacaccgcagttcaaaagcatcaatcctatacatgtagctgattcactttgttgtacagcagaaactaacacaactttgtggagcaactatattccaatagaaataaataaaaataaaaattttaaaagataatagtttaaacaaaaatgaagacaatacgttatcaaatttataacatatgtaaatgtaaaaagtggcaacaacagaatacagattggagagaatacactcttataaggttattatacttgatgtcagtatttctccaccacggttagtattttggactgcatagtttttcattgtgagggactactccatgcattgcaggattttgggaagcatccctgtcttctgtccattagagggccctagtctctagatcatgctatcttctgaaggacaaaattgtccccagtagaaacccacctctgtatacgaaaaagtctaatatgacttgaaagtagactaagttaaacatatatactataaaccctagagcaactgctaaaataacaaaacaaagagttaataggccaacagagaagataaaattgaatattagaaaatattcaacccaaagaaagcatgaaaagagttaaaagggaacaaagaacagacaggatacatagaaaacaaacaggatgatagattttaactgaatcatatcaaaaatcatattaaatgtacatggtttaaacacccaattaaagtcagagattgtcagaatggattaaaaaagcaataccaaaactacatgctgcctgaaagaaatgcactttaaatataaatacagaaatagattaaacattagggtggaaaaaagcatacgccatgctaacactagtcaaacgaaaaagctgcagtggctgtatcaacatcagacaaagaagatttcagagcaaaaatactatcagggatgaagaacggcatttcataaagataaagggtcgacctatcagaaggacataacactcaaacgtttatgacccttaataagggaacttaaaaatatatggagtaaaactgatagaactataatgaaaaacagacaaatctacattatactcagacatttcaatactcctctttccataattgataaaacaagtacacagaaagtagcaacatggcagatatgaacattctcaccaacttgacctgtgtgacacctgtagaagtgtccacggaaaaggtctcatttttctcaagtacacatgggacattcaccaagataccccaggctatgaaatacgtcttttacacttatgcatgtagtttggaaatcactggataagctcatgaaagtttccaaaaagttctgcagtaaaataaaacacagtaagaacaacaactaacccccaaaccaaaactgttccactttgtttaatgtagttcaggaccttgcccttcatccccaatctgaaatacctgcagaaaatgatgtgccactgccagaagtcaaagagcttggaggaattagaaattaggcaaaacaaggtcaaatttcaatcactgaatagcctgacattggatgtcagcatttccccgacgcaaataaaataat

SEQ ID NO: 33539 - DNA, 1695 bp, Bovine  19866880873214
  misc_feature (1)..(1): n is a, c, g, or t
ntgggggacactgttcagcccatagcaagggtcttggcacatcagtgggagtgacatgtttgggccatctgtaagagaggggctaactgaaggcagagaggcgtttccatctttaacttgggaagatggtgcactttgctccatttcccgggagctgctaactcggcctgagctgcagaagtggaagagttactagtttgcctccaggatggaatctggcctcccatgaggaccggagcacttggcatgttctcctggtttcagccactataaataacccctccttcctgccgcgttaataggaggagacgagggtgtggggtcccggctgtgcgctcatcccatccatgctgtttcaatttcctgccttccccagctctccttgcttccagtggggagaccctgggggcgggccgagcaggacttcagtcctggaagccagctgctccgtctcggctgcactccgcctgccaaacgcttgggcagctgttaaagtggggtcagcctggcatttctgtgctcttcagggggctcccaccatggggcctgagcggactttggggaaatgcttttggtctaatatgccgtggtgtgtgggctggtgggagagctgcagggaaacagtgagggcagcccctcctttgtcctgtgtgagtgacttgtgtagatagagattgttactaggggcgtgtgccttccttgggtacctgttgatctgcagtcccgagtgtctccctgggcggctttttctttgtcactgtaaacatacaagacctcattcttgttcacaatgagctgagtccagccaagcatccatcttttccttctgaattcacttccatctattttttttaatggtaacaaaagactatcacagtgctgttagctgaataatgacccccaaagatgtctgcatcctgatccctggaactgtgaatgcagtttaaaaggcactttatggatgtgattaagtcaaggatcctgaaatatcctggagtgtcctggtggcctggcttttaagagctgagaagcaaaagaaaatagactctcaagttgtatctcttgaggtgttcagtttattaaatgaacagtggaaactatgtcaaaacgatatgtaaggaggagcttattgcctgaatttttacaatgaaggatactgtttgtgttaaactctccctgtcaccccagcacacacagggcctcaccttgttgactcacagcctcttcacagtgtaaggaccagatctttactctctttttcatccttcctccttgcttacctatagtgctgaccagggttcaaagtcttgggcaactctgccatccaggcccccaagtcccctcatgtgaccaggagggggtatttgggggctattagtagtttgggatgacctcggggacacctgctcttgcagtagggcatcatgcttcctggagttgcttgctgggcagtgcagggatgatgatgtgggatctggtgagaagacagcccagcttggagagtagcaggctctgggcatcttgtccttcctggactctgcctgccagggggaggctgcactcatgagctcccgggctgcacagctgcaatatgtaatcctgcagacgccgtgcagtgtgtctactgggagaagacctgggcaagggtactgggctggctgatctgggtggacagggaggggcaccctcgaatgt

SEQ ID NO: 33540 - DNA, 2942 bp, Bovine  19866880875457
  misc_feature (1)..(1): n is a, c, g, or t
nttacatgctcttcaaggtttaattcagctcaacgtgacacccagttctctgagtgtttgagggtgcccagtggcaaggaggttgatgggcagggtgttcagggtccggccccccagatggcttttggggaaacattgagatgtgttagccatccctctccagcacaccttaagccatcccctgctcagaatggagttgcaaacagtcctggcaggtatgaaaatgaagaagttagctagtggccagcaggagggcacatgcctcgtctgcaggggcagccccgcacatcccgccacccagtggcgcccaaccttccgtttgaaaaggagtcagagatgccactgtcccaccccgcctcccaaatctcccaggctttaaaggctgctacccaatccaagtgactttagagcaaaagccccctgcagcctttggggcccctctgcccatgggctgcactaggtgaccctgggtctggagctgagagtgagggtgtgcaaggaacggtgtgtgctggttcctccaagaaggccaggagacagccagaaagcccctggcaggcttgttgggtgccctagatctgaccccagctctgttatctgctgcactcaccatttgcctttcacaagtccccaggatcccgctccctctgcaagaaagcgggacatgatgaggctgcctccagagccctcctctaagggccgcatggagaaccaatgccccgtaaacagtaggatagccctccgcatgccattcacaccaacagaactccaactagtagacgcccgtttgtgtgtgtgtgtgtgtgtgtgctgagtcgctcagtcacgtccaactctttgcaaccccatgggctgccaggcacctctgtccatggagatgctccaggcaagaatacccatgaagttgtgcaaaaacctcacagctctctgaacttgggctgctggaagcttctggaagcagtagtagtcttggagggttgagacccaaatgccaggtagtgaacctggagcggacatggtgacttgcagaactgctcatctcagagcatacagtctgggctcagtcccagcctcccaaggcacctgagccagctccggtcccaccatgggtatctgcttcccctactcttctctaaaactggacaggacgatgtgagaggaccacctgtggaggagctgaggatgggcaggggtcttgacaccttgcattccccaaaaggaagccagagctctgatgggattacaggtacaagagctgggcagcccccgtggttgtgagcatgccctcctcactctgagggcccgaggtgaccctctgcagcaatgcctagaaagggtccttaacatgtgcaagggtccagaagcagcttttaccccagaaacagttatcacctcacagcaccagccactggagagtgacctccccagcccttgggagaaagtagacagctctgggctttctagagaaactgcccctgcacggggatatttttagctccaccaccccatacatccattccaggggtgttaacgtcaccagtgaaattaaccatccaccttggccaggcaaaggtggctccagccgggggtgtggggcgggggaacggaaagtgtctcactaaaactctggactcaggtttccctgcaagttggtccgaccataatctcttgtcaaaagtagtaacaggttttcttcaccctgtggcaaatcatctcaatgaaaaatacaccatcatttaaaagaaaataaaaggaaaaatcaacacatgcacgtattctgctgacaaagcaatatttgttggttttaggcatcattttacctatcgcttggctatatattatttgagaacttttttcccggtaactacatttttacagttttaaagttttttcccatgaatatatacacatttttacattaattatataaactccatctttcttgattacttaatggaaacatggaaccatctgaagttgctcagctgtgtccaactctttgcaactccaaggacagtaacctaccaggatcctctgtccatgagattttccaggcaagagcactggagagggttgccatttccttctccagggcatcttcccaacccagggatcaaacccgagtctctggaattgcaggcagacgctttaccatctgagccaccagggaagcgattgattacttaatactcttccataaatattttcttctattttaaatgtgttaatgtttaagtctagccttagccaatcaaactctaaaattgggcatttggctgtttctgatgctttgtgtacctgccaatatttgtagagctgttggcctcgctaaagccactttatatcagataaccctaagtgaggttaccagacagactggagtctgagggaccggccaggcaggcccaggtgccacctcctcggccacgtggctctaggacagtctcaggtctcgccctggctcccgcggagcctgccagcgtcctccggctccctgctgtgtctctcctcttcacaggagctcccacctccccctcggttcactctgaccttctcattctctccttcctgccccagggaatttcctattttcttaaaattatggaacatttcaaatgtatacacaagttcagaagacagtgtaacaaatacccaaccccaaaaatcttgcttcatatactccaactcatttctccatacactgcattactcagaaataagtcccagatgtcacatcatttcattcttaagtattagcgtgcatgcgtgctaagtcacttcagtcatatccaactctttgcaacgctatggactgtcgcctgccaggctcctctgtctgtgggattctccaggcaagaatactgggatgggttgccacgccctcctcgaggggatcttcatgaccaagggatcaaacgcgcatctcttagcatctcttgcgt

SEQ ID NO: 33541 - DNA, 1688 bp, Bovine  19866880901687
  misc_feature (1)..(1): n is a, c, g, or t
nggggatcagtgtgaggccttcctactgtgtgcacaccctgtactgggtcagtgagggagcttcagtgtgggcaggtgttccttgccaccttagggcatcagctcacacaatgccaggcaggccttgctgtgagcatcatcctgatctgacagatgaagaatctgcagcccagagaggtcatgtgacttgcttaggtgacactgtgcataactggggacatgggtcctgggactcagacagtctgggtccagggtgggttcctgaccatgcacaaccctgcttctttcttgggcttgcactgctgtatgacgaccttgtgggacctcagctcatcctgcttccatgtgagccctgcttccagacatagtcagtaatgggcagagtcagcacttactgccccaaagctcagaattcctgtttagggctcaagaatggcctggatccctagggtctcagccccagatgcttaggacatggctcagttttctctgtgtttgtttgtttgtttttttaaatcagagaactatttctccagcccaatactgctcacatcttcctgcttgtctgtttttgatcatgggctctgcatgttttcctcatatccccccaactcccaactttaattagagagcacaattgactcacagcctcgttcctggcatcgactcccctggcactccctgcacttgtgtctcggctctttccagagagaatgacccgaggatatgagggatggcttagagctcaggtaatcagtgggatggacctctgaggacaggagaggatgatgccacccccagaaccacaaaagctgcacaagagacgacgtctgaccctggagaaagctcttcccaactgctccgaagcaggcaaggctcagaacaggatgtgatgagaacactaaattccagtggaaatgacagaaggatgtcgataaacggtagatatttgtcccaattgaggcctaacgcagaagcttgacacaaatggcgccttagcgacttgcacaaaataaaatggaatgaaatcttgaaagcaaaggaaaaatacgtaaaacatactcagttccgtgacttaggttgccatgcattttctacaaggttggatgtaggttttgtgagcaggagtcaccagggggttgggttgaacacaggaagtgattctcccttgaaaatcttactagaaaaatctcctggggaaatctcaccacaaagcccacttgccagtccggccacgattggcaggcatttgctggtgactgaggtggataaagaatctgcctgccagtgtaggagatgtgggttcagtccctgggttggtaagatcccctggagaagtaaatggcaatccactccagtattcttgcctgggaaatcctacggacagaggagcctggagggctacagtccctggggtcgcaaaagaatcagacacgacttagccacaaacaacaacatcaaaaaggaggatgggactgagggctctttcaggagtgagaccactactgtgacatcaatagaagtcaggaaaacagaaaagttgagtggaggagtcactgactttcccacaggttagtaacccaaacgaagctattttttgtcatgttgctgcttcgttaccatcattgttcccatgaatttttgtgaccatcctgtgtaaacagattttgtatatagctttctcctca

SEQ ID NO: 33542 - DNA, 1661 bp, Bovine  19866880937762
  misc_feature (1)..(1): n is a, c, g, or t
ntccttttctgtgacattttctattggcttgtaaatatataataatccaattacagaggacttccctaatgactggcctgtgatgagttttttccttataaataagctatcaataaccagatgtctatttaaaaattagaatgagcaaagtcatcataaatcaaaacaccccataccttggacatgcacagcctggaagttaccacagtatcttgggccaagtttgttgataacttccagagtttccattgagatggcttcttcaaagaagtacgtggggcccagacgccatattagtaatgacttttgtttccaaactcgaggggtagcaatatatccataaacatccacaaatgaggatggatccatcgaaaggaatggtcctggcaaggcttgaatgtacaacatctgttcaaacaaaaaggtgggggagaggggtagatgggatgtatttaatctcagaattaatcaaataaatacataaacccaaaaatgatatacattattcatctctcaaagtaaaacctttattcagaaacattacaaagataactctcaaagctgagaaacaccgcataaagcagtttataaaaaaaattctgtgtgtatgcactctcagttgtgtccaactcttttatgaccccaaggactgtagcccaccaagctcctctgtccacgggatttcccaggcaagaatagtggagtgggttgctatttcctcctccaggggatcttcccaacccaaggattgaacctgagtctcctgtgtctcctgcaatagcagacaggttctttatcaccagcacctcctgggaagccatgtgggagtaaaaacctgacattgtgcctttggaaataagtgtgataaaaaatataaagtgccactgaaaggttcatctctttttccagtcatttcacaaagaactttaaagtccaatgttggcacattaattaagttttacatactaaatatagctacagactagaaaggaagaaataaactgtccctatttgcaaatggcacgtccatgtagaaatttccaaggaatccacaaaaaaacaaactaataagtgaattcatcaaagtcacaggatatatgatcaacacataaaaataaattgcattctatagactaacaaagaacatgcagaaactacaattgctcacaagaaaaataaatactttcttgttctgcaaaatcgcatgtgaaagaggatgaaagaaagctatagattaggagaaattatttataaaattacatatccagcaaaggaccattatctaaaatatttagataaaactcttaaaagtcaatagtaaaacagtaaacaatccaattagaagtgagtgaaacatatacactgctgctgctgctaagtctcttcagtcgtgtctgattctgtgcgaccccatagacagcagcccaccaggctcccccgtccctgggattctccaggcaagagcactggagcgggttgccatttccttctccagtgcatcaaagtgaaaagtcaaagtgaggtcgctcagttgtgtccgactcttatcaaccccatggactgcagcctaccaggctcctccgtccatgggattttccaggcaggagtcctggagtggggtgccactgccttctccgaacatatacacagacatcactaaa

SEQ ID NO: 33543 - DNA, 2367 bp, Bovine  19866880944746
  misc_feature (1)..(1): n is a, c, g, or t
nttctttagtttccttttcccgcaaatccaacacatttaattgttgttagcacattgttttctaacttcatttttaaaaatctcgatatatcaaaaatctggttccatatcaacagaacttagttgacaccagggctgcaatgaatggttgtatgggttgtgcacaaaggcacatggccagagtggcaaaaggaagctgaaacccagcctttgtcccactgttcagcgtagccgtgcagttccgggacagcgtctgctcaaaggggacacgcggtgctgtgtggactagtggtgacctgagtgggtgtagtttgtggtgactgcgtgatacctgacaggaaggatgagccgtcccctcctcgtgctgatacttggattgttttattttgctctgctataaacaggatggtggaaaacgttgtttagtgactatctgtgcatttattttagggtttccttggagtaagtaactagcactgaaaatggtgagtcggaggatgaaaatgacatgcatatatgtcaacacaggtagatacactggcatttctcaccactgagttcagtcccagaccatgccatacttggctgtagaggccagggcttacaactctgatcgtggtactaagtttctgagcaggatctgaggggttgcgtttagatactggcttttctcttttctggctaggctatacagctgtgattacagggctaatgatgctttaaacaaacaatataatgactgtcatcagtgacagcaggaatttcctatgggagagcttgaacaggagggtcaccagcagctggccagccccaggggtgctcctggcaaaggtgggtaccaccaagctgaggtcggctcacttacaggtgaccttccagataggctgtgccttggtttccgttccaaggtctgatctgtatcctgtagccaaaccctgccctaaggaggcactgggacagcaaggcacaggctctttaaaccagacctactttgcctttcaaatctccaaacagccctctgaggcccttggttctacttcaaaggttctcaaactctttaatacacaggcagttgctaagcaaaggctattttgctccaataagcaatgcagagctctgctctaaatatgtcccccatcgatgtgtcatattcactgctgcccaggcagatgagcttctgcccttgaaccaacccagatcgtcctcctcctgtctccacatcctgagcgtgacaactttccagggcatgaaagttcttagaaatcactagcaaagcaataatttgtttagtgctgtggtgacatgcaaggtggaagccgtgcgggaggaagtcttgtggtggcctaagtcatcttctggtgctgccagctcctgcattgttggggtcccctgtcctcagcttcctcttctgtaaaatgggaatcatcatcatatagctttgtcaggtggctaaatattaaatgtggtaatgcatatggaaactcctttgtcaagtgctatgggcacattagttattggatggaatgctgagagagcagaccaaaggataacaaatatctgggctaccgacactcctatatacaccattcaggtgcccttggtcaggtccctctcccatcctcctaatccactattccaagccttcacctgctcactgctcaagggaagcagagccagcttttcctctacttcttcagtgagatagcacattcctgtttgacaaaagctgctctgcgtccaagttcccccaagagttctgttctcctgctgcacatcttcaaagtatcatattaggaaaaagactgggcttttgccttaaatgtaaaattagtcaaatttgtcagcattttatgtcatttgcagtgctcataatgattattacttataaatgtgcataaacatgtaacagcaatattaaggaaaattttgtaaacaaaaaaagagagaaagaaagaaatcaccctattcccactactccaaaacattaactggggttttaaaattatattgttttcatagttttgagtctttgttgataaacacttttctattttattgaactatgagacacatagaaaaaagtgttcaagtcacaaatatacagatttaagcattttcatggactgaacttgtgaccactgcccagcttaaagaatacaacattaatggctctccagaagcacccccagcttcaggccccattctagtctctagcaccttctaccctcacagtagacaatttcctggcagctgacatacatcggctttctacattgtacttttatgtatatgaaataacgtgtacacgcttctttctgtttttttttttttttcactccaaactatggatgatccatgtcatttcat

SEQ ID NO: 33544 - DNA, 768 bp, Bovine  19866880946824
  misc_feature (1)..(1): n is a, c, g, or t
nattgaaatggagttatttttaagacttttaattaactgaggttctgatttgagtggtgttatttattatctcttttcagaggtttctacttattggaataaatagtcaacctaaaagtttccagtgttggatgtgtagagaacctctacaagtctgtctgcttaagtcactgggtctgtatgtcacagttgatcatgcagctctaatgcgggtctttgtgccgtaacgcagtgaagaggctctcttggaaagcagcagtgaagtgacttcacgtgatttggagaagactctgcgggcatcacttgggatactggttgccagctttctcagctgggtaccccagggttcttgatgatactgcatttctttttctgttgttgggaatttttcttaattattatcagaactcaagaagatctatagtttttgctcttttaagagaaataatacttggaaacttgaatttatgtaattggaggattattggtcttttgagaaatgaatctgctttaattatgaaatatttgctaaactttataaatacaattctatataactgatgggcttgctgaaaaattttttccttttagatagtctgaagaggatgccaaatgaaagaatcccccactcaagtcagactcaggagccagactgttcatggagccaggatgtcagtggcagtgaggaggggacaatcaagcaggagaaggatggcgacatggacctggggcagagcctcccctcttgttcctctgctaatggaccct

SEQ ID NO: 33545 - DNA, 4754 bp, Bovine  19866880965234
  misc_feature (1)..(1): n is a, c, g, or t
naaacactgactctggagcctgggtccggctcagaatcctggatcccagtgaatctgattcagaatccactgcgatcttttcaggcaggcagctcttctaccccctatttacagataagaaacctaaacacaaagtatttaacctgtccaagatgattcaagtgccatgtggcagatccacaatttgaagcccagtggcttagctggggaccgtgatccaaactgtttgggagtaataatagtgccccccccgccacccgccacaagcattgttgagaaaagaacacggagcgcggcgcctggcacagagcaattaatcacgcagtgcacatgggcttggtgttactgtctgcaccatcttcaggttaggaggcagctcacgattcacctcctctgagcgccttctcagaggcgggtgtggagttcttcaagccctgggaactaagactgtgtttgtaggaaagcctcagggcagccaggcagaccgggcccaaggtgtccccagaggtcagggaaatcctgctgttcttaactctatgcagctaaacctctttcccctctttcctgggagattagtcctggtttaaaaaaaaaaaaaaaagcttggtagacctcctcctattcccctgggcatcctctcctcctgtcgacagactggcccaggagagagcctgggagttgaggctcaccccacctccaaattttcattctcctttaactgcgtttctttcttttttaatctagttggtttttaattgcacatatcagcaaccattgaataatgattttatctatattctaaatttagggcagttaaatgcaaagcaaaatgcagacactttctggcgtcttaattgaatgaaggtcacagctataacaacatttaattgagctatttttcattatcatattttaatgactttgcactgacagttcgcctgcttctgaggaaagagcatgatggagtcgtttatttccctatttagttattgtttgacaacatcagcttcgattaagaccctgctttatagaacattaatcatatttgaatgagcaaggggtataaatgtaaacacatttcccttcccgccagcaaagccatgtccccacacggaggctcactaaacaaatgcttcacaaccatcgtctgtttgcataacagccaacaatagcccgaacaacaatccccggctttaactgtcaccgcccctatctcacccttgcacctttcagggagaagttatgatcctgcacttctgaatgctcaataattgtgtcatttatctcaatttgcagttcagtctttaggcagctattggcaagctggcattaaaaaaagaaaggataaacagcatcctggccaaaggagattttcatttccaaataataatcagtttaatttgcccgcatatgaccaatgattcatgttcagatttaataatcaggatcacataatctgattataggggaaataatttgtttacaacccccaatttactgctcagaattccattatctctcttcagccattggtttttaagagatactaacatgacccaggggaaccgaaagcaaactattatatttcctacaattagatctttgcatagtcttaaccccaagcccctacataaaaaagaacagaaacagcatggaggaaatcccataaataaaatgaatatataattgtgctcaaagaatagctctcccggagaggcggcgctgcgactgtattcctcctgcattcgggcacatctgctgggctcgacgggcttgtgcacttaaatgtaatcaccatggagcttctaaaaagaaatcctgcttagagacggtcaccgcgggccacactaggctcagaggcagcccttcgatgctgccgtttaaagatttttaaattgcccatgttcttcacatccacttcactgaaagagtccacacactggagaaaagttggacatgatgcaatttctggaaagcagatcctaccctgttcccatatgaaaacagagttctctgcaattgaccggccttaccccagagcggtcagaactgctttgagaatagcatctcagctctttttttttttttccaaagcaaggaaatggatgtgcattgatgtaatttagtaccttagagacgcggacaaattagtgtagaacattatcactagttaattatgaatgaccgattaatcaacctaatctaatattccacattatgttgatgttattaaagtgcatcatgaaaatgacagatagtcttcatttgctttctttggccaaatgtgcactctgcagtcatgatgtcaaaaaaaaaaaaagtttgccagttttaatattagagagttaaataattaaaacgaaggtttacctgcactctggcttctgtgaggttgattttcatggctagctcttctctggtaaagacatcagggtagtgtgtttgggcaaaaactgcctccagagcttctagctggtaaaaggaaaaaatatttactggtgagaggttgcggctaggtgagaggaaacagaggcatatttcaaattttctatgagtggtgaggaagtcatttcacagatcaaataggggaggaagaggaagaaaagagctctttgaaaagatcccacagaattcaaatttcaaccgtgatgacttaggagcgaagactcactaacaaccttagggctacgccaagaggtaggagagaggagctaaaatgtatatatgcctctacatttaaagtgcagcctgcggggctttcactatagggcttggaacagcagaagcaacttgcacaagccctcactgcgtcagctccatggaagccgcccaggctttctgctccagggtgctctgggagaaggacaagtttaagggccctggaaacactatgtcaaggctccagttgtagcccttccactgatggacaacgataccgtctacaattccctcaacctcttgggctttctcgtctatctgctgggggtgagaatacctgacctgcctccctcagaaggttatttcgaggttgaaatgatattgctacatggctgatgtgaacatgtccccgagattatcagcctgacacaaatgggcaccagcatcactgcctcttcatttactatctaggatgacaacaaggtcctctgccctctctccaaacagattcctcgacacacaaattgttcaagaaaacagaaagatccggtttaacataattaagtcggcggccttattttaaaagacaaagaagagctgctcaaactctaagtgttttggaggcaggaagtggccggctctcagaagggggacatcatcacctgctgaagagtgaacgtggtccggttacggcgctgttttctccgcagaaatccatcgtcgaaatctcccgtggaatggttgccaaagggtgcagtgcctgcggtgagcaaactgggtcagtctgaacacagctccaccccacggtcctcacgcagagcccctgctacgcaccctcactgggagaccgtggcctgtcccctccagacggaacctcgtctggctaaaagggtttttctctgctcctccttgcatgtgctgtctctctctgtcccagtaatctctgactttaagctcaactacgcctatttcatagggtgatggcaaccttactcccctagacagccaagcccacttgtgaaattcgggaccctctgagtcaggaagggtcactgacttgagacggagccttcatcagctttctggctccagctgcatctctgcaccttcagctcatcccttctacttctgatcctttaatagaaacctcgaagtttcccttttgctcacctgttactttacttttccttgtttctataaacaataaggattaaaggctgggaaagggagaagaaagaaatctccaagagatttccccagcgctcctctcctagaacttcaaggcatgagcaagaaagaagtttataaatgaatattaataccattggtcacagctcatcggcgccatagtggatctgttatatagatgtcaattaataagaaatctgctctaatagtgactgtcctgaattccaatcagacttcaacagaaccattctcaaagggcatcccagcctctggccaggctcataaaagacccactgctcctgattctctgaaaagaaaggcattctttccacagttctccctggcagcctccaaagctcgtattaagccggaacagagtttggccccaaacgtgcattcagatcattttccaaatgtgcatcatttacttgacagtccacaaagactttttaataaaacaaatgagcaagttcccattagccaatgaatgctgtacctgccatgggctccggtctcagaaccactgcatgctcggcattaggagctgacaagtcacaccgcccaggcattatccctctgaaggacctcaggcccaaagtagcaaggtccttcgggcttttaaaaattctatgtactaaaaggagtccctcctactcattacgctactcccctcatcctatgccacgagacctccactctctggtgaagacttctcccctccattgtctcatccaaattgctttcttccttgaaatcctcaaaatatttttctctagctcattggaaacttcaaagagacagactctaaacagtcttattcccattattttgtgggaaaccaaattgtctccttttaaaacaaagcaccgacggtgaggagaagggtaacctttaagactctccaatca

SEQ ID NO: 33546 - DNA, 949 bp, Bovine  19866880971402
  misc_feature (1)..(1): n is a, c, g, or t
ntgcatgaaagtgaaaagtgaaagtgaagtctctcagtcgtgtccgactctttacgacctcatggactgcagcctaccaggctcctcagtccatgggattttccaggcaagagtactggagtggagtgccattgccttctccaaacaaattcaacagagactttaaaaatggtccacattaaaaataaaatcttaaaaatgcctatcacattttctacactgattttccgacccacctgtgggtctgaagctgcaattcagggagcatcgctttgctaaatctctggagagaggaggctgtgctcccccacacctgctgttgggtgtctacgggcccaggcatggggaccaggcctttgggtttaggttctgcttccttctgtctgattttctgccttctccgggtgtgtgtgtctccttcacggactcaggtttggttccagaaccgaagagccaaatggaggaaaacggagagaggggcctctgaccaggagccaggagccaaggaacccatggcagaggtgacgcctccacccgtgagaaacctcaactccccgcccccgggggaccaggcccggagcaagaaggaggccctggaggcccagcagaggtgaggctggctgaccccgggcctgggggcgggggctggcgggaacgccgggtggagagctcaccctgtggttttctttctctgccagcctgggacgcactgtgggtcccacagggccgttcttcccctcttgcttgccgggaaccctcctgaatacagccacctacgcccaggccctatcacacgtcgcctccctgaaaggtgagtctggactcggctggcctgcgcctcctccccggggatcgtggagcttgttcttggtctggcccatccttgcgcctggggcgggtgcagctctgtttctccttctctcaggctccgccagggctccaacagcat

SEQ ID NO: 33547 - DNA, 979 bp, Bovine  19866880987131
  misc_feature (1)..(1): n is a, c, g, or t
ngcaatggcaccccactccagtactcttgcctggaaaatcccatggacagaggagcctggtgggctgcagtccatggggctaagagtcggacacgactgagcgacttcactttcacttttcactttcatgcattggagaaggaaatggcaacccactccagtgttcttgcctggagaatcccagggacgggggagcttggtgggcttccgtctatggggttgcacaaagtcggacacgactgaagcgacttagcagcagcagcagcaaggtttacaaatgtttccagaatcccaaactcttaagaaacctgagataaaattagtcacagtagatgtaatttgcctttttatattgcttacaggtctctccttaatatcacttaggagtaggaattatgaagaaaaacaaacaccaccaaattatgcagattggacctttcaactctgttctttcaaaatctgtggactgatacctccaggcattcccatcctactcctgactatgtttaaagcaagaaaaccatttgatattaggaaaaaactaagaagtcggggtcctttcttcttattctattcatttcctattatttaaaaataaggttgcgtcttataataaagaaataagtaagaattaccttcaaaaaatgcccatgtctccttctttttctcaacggatgaatcttcagaagatttgagggaaatcactgtaagacaacaacaaaacaaaaacccgaaattgcatagcatgaagtgaagtagtttatgaacctggcccatctcagtccaaaagattatatcatatgggatacatggcacttacatttataaagtaattttcacatttgcaaaaaccacatttaattgtcacaactcacatgccaggggaaggtgcaatgacttacatgtaataagtaagagaccagagaagggaattaagtttttggtactcagttcggtagaagtcctacacaccccatat

SEQ ID NO: 33548 - DNA, 1567 bp, Bovine  19866881003349
  misc_feature (1)..(1): n is a, c, g, or t
nccccatccaccatggaggcataggtaggtttcatgtccccccctcagagacattcaaagacggagcaatcccaaccactggtgagtgtagaattgactgggtgttccaaccaggggtcttctgacccaggctttcctggacatcacctgcccacccccaccaggacagcctcaagctcctcccagcttccaagcacctctgacccccttgaggattcagcaggtcttttgctgggtatgatagcatttatgcatcgccagtcctcactgagcgtggctggaactccctgtggcctcctaccccttcgggagcactctgagggcctggagcacccttgcttccaccttgggccagagccggctccctgcctccagcccctccattagcctggaaaggtattgatcagttggcttctgcagctgagtgttttaatcccagtgtgtgaatctttaagaattaattagcaaagattgctcaggaaaaacaaagtgggcgcaagttttgataccgtctggtcacccaccattaatgttttcctcttaattatgaggctatttctggaagctggaggcatttcccctcatgttctattgcctcagatgggctcctccatccttctggtggccttccgtggcctcctgcttccgggtcctgcccagctgcctgtcccatccgcgtcctctgggaagcactcagagcctcagtttgcccaggccccttgcggctctgacccacggagccactttctgattcccaaggcctcatcctgcttttccttttgtttttgaacgtgctcacttctggggccttcacggatgccccaggctggctcaggtccccttactcctcctggatgctaacagctgtatgcttctctgcgttgggaagaaccctctgcatggaattccttactcactgcccatctcccaggagtcagggcccactgcagtccagggctgggaggtcctgacctgggtttgggagtgaaaggtctgtctggttcagtgtgctcttgccctgaatggggatccctggaaacgaaggaggcatgcccagtctccatggcccatcgtggaaccatctttgctttgttctagatcctctgcatgccttctgttttccatctctcagacctgtgcagctttgcaggtttgagtttcacccaaagtctaggtgctttcacgggaagaaaggaatgcccacaggtatgggataggaatgacaatgccctgtttacttgaagtttggcagctgcggcctctttactgagacgggaaaagggtattgaagaagagcaatttcaaggtggtttctaggtttgtgagccaggagcccgaggttaagtcacagaatgtcagaggaaggccgtagatcccagcgcaatgccagcagccactgggaacaggggccgctgcataacccagaccaactcacagttctctggcatcctgctcaggagaggactagagcctccatcctgttagggtttcacatgtctaatttctagcatttaacagccccggggaaggggcaaaagggccagggccattgacctggatttttctg

SEQ ID NO: 33549 - DNA, 1046 bp, Bovine  19866881012416
  misc_feature (1)..(1): n is a, c, g, or t
ngagttggggaaaaaaagaggggaatcaactaaatgaacagttcttacctcaaagcaggttatgacacagaaaaattgaagagaacattaaaactccaggccaacagcttgcacctaacgaagctgcaaggaaacaatcttcttttccccaaaataccctaatttgtttaattctctgaaaggccattgcccacatcttttcccaaagcccatctgagaagcatggcgatggtggaattgctccaagggccttcagcacatccctgctacgctgctgcagcctcgatgcaaatttcctctctgcactccaggctggggattaagaaactcaagatggcctaagacatatggagaaaacagctcagaggctctgggagctcatgaaagggtccctgggatgcagaggaaaaaatcagaatccccaggaaataaaacaaattaggcaatttgactacctggtccatctgaagaaggtagaatggtttgggtaagaagctgaaagcacattatgaactcgagagttgagagttacgtgatatgaatacaagggtcctccaagaggcactgggaaggaggtgggaggagagagaatgaggggaaagtaggagcctgggaggagctcactgggctcactcactgggtgtagtgggagcaagaccatggacgtgtccacacgggtggcctagctctgtgctgggctctgggcagccacagacacgggaaacgtggcgcctgactgctgctgctccatctgccctctcatctagactgtgtgttctctgaggaacagggatgtcagaatcatttttgtttgcactacacacacagaaaatcctgttctatagcaggggctcaatgaatattgaataaatgaatggggtcagaaagtaacaaagagaagacaaagcctctgctgtaaggaagcgcccgatggcaacttcatggttgcccagggatcagatcagatgagatcagtcgctcagtcgtgtccgactctttgcgaccccatgaatcacagtatgccaggcctccctgtccatcaccaa

SEQ ID NO: 33550 - DNA, 1348 bp, Bovine  19866881037740
  misc_feature (1)..(1): n is a, c, g, or t
ntgttctgcttacagaatacaatctattctatgaaacaagactggataccaatatactctgtgaaagaggaccaaaaccagcccactctgtaattaactaaagagattaaaaaaaaaagactttgggtgaccacaaatgtaaccacacttttcatcctggctaacgtgagtgaccactgctctttctccagtgacagtttaaaccctttccctttccttctgcttcctgattaaaagctttgaacatatacagataccaaattgtctctctgacagcaccccattcagaactgactgacctccgcttttttgaaccctccccaaaatcacctaaagtgagcccaaatcctgtcagttcctcctaacgccttattactccatggtaaggagggaaagaaggctcttgctacagcaagcttcataaatgtacctcttgttttgtactatatgcatgctcctagaagtatttgactggtgggcatggacagttcctaacacctaaaacaatacctaacatacattaggtattcaataaatatttaatgtggggaggaagaaaggaaagtgcgaggtaagaagaatcgttaacaattgaagtcaaaagttaactttacattttggaagacctttttttttaatgctcttgatgattccttctggttacctctgtgactaggcggcatggccatggggcaagcacagcttgggggaaacatctcaccttggctgagccgatgacctgtccatccaggtaggtgaagactgtacaattccttttcatttccttggtgacgaccacagccaggtggtgccactgaccacaagccagcagctggccacacctgacccgaagctggcgtcctgcagaaggctcagggtcatcctcgagttccatgacatctggacgagaacacaagaaccagacccagctgcagcgtcagggagcatcagccagccccaggggccccagtgccagcggagtgagcgccgagcctcccagagaatcctaacagcagcaggagctttcactgctggagcccttgctttgggccagacactgaggcaggcgctatcacgattcccaggttaccatcctgaggcacagcgaggcaaggaaggcaacttgcctaaggttacatagctggagttcaaacccaggagtcaggctgcagggtccacccatcactaggctgcctccagagggacacacatgggctggcaaagtcccagaagggaaggagcttaggcggctggactgtgtgtgaaggacaccaggccaaatcctgggccttccaaagtccatgtctcactctgaaaccgggcagaaaaaacaggcaggccataacac

SEQ ID NO: 33551 - DNA, 767 bp, Bovine  19866881071574
  misc_feature (1)..(1): n is a, c, g, or t
natgcaagaggatagagaaagagcagcctgtgaagtcaagacgaaaccaggagatgagtcacaaagatccaagagagaaggagagagccgccaactacctcggatgctgctgagaactctcgggaaaatgggacagagaggagactctgggcttagcaaccctaagtcagccatgaccttcaccaaagtcagaccagagtactagacaggggggaaggtgtatgcgggtggaaggcatcccagagtaggaagaaactggtaatgagacagtcactgagcagaatcagttaagggtggatggttcttttcagacattttggtactagaaggagcagaaaaacaggagtgattggaagaggatgggggtcaagggaagtgtttttagtaggagaggcaagtgcatggaaatgatccagtaagtgaaattgttagtgaggagagaggagacaaatggagggctgggattcttgcaaaggcaaaaggagatggagcacagagaatcagagacctttgactgatacagggaaactgaacctggcctgaggccagcagagccatgttgaggggggttctggaggcagaagagaatgtgtgatacagccttcatggggaagtgagaaagacaacctgctcaggaaacttgatgagattcatggactgtattgagatcatatttgagggccatacactttagcattattttgcaatcccccctctcccccacatacaacattgaggtgctgaggttcaggcaaggagaaggtggg

SEQ ID NO: 33552 - DNA, 2582 bp, Bovine  19866881100145
  misc_feature (1)..(1): n is a, c, g, or t
ntttggggcttttgtctttgcagatgttggggccgctcaagtgttagcaacaggcaagcctgctagagctgaagctggtaggtggctgcccaatggattctggatgcagggctgaggggcaggaggaggaactcaagatgcatgggcaggtggggcatcctggtgcccgtttcctcccagtcatcatggcaccagggcagtgctgacccccagacctgtctgagtggctagcatggctttatcctgggggaatggtactgaatgagagcctgtcctcaaaggggacatgagtcatcagggccacctctgtccactctctctgagatgagcagccctgcactgcagccgtgagcccccagatagcaggcttttccctggccagtgcctccctccgcttgccccatcccaacctctctccaccccagagttcagctctccatgtatggtacaccttccatgtcatctcctctgggaagactgtcagtttccacatcagcccaccctgtcactcggcactcgagtgagctcttgtcttccgctgctgattgcaggccccccaggatggagtcaaggactcattcatttgccgtcagcacactcaccagagcaggcaatcgacatacacatggatgaaccgatgcagggataagtgaggatggctgcaagaagacagagaaaggagccaccagccacttgggaaagattcccacagctgaagggaccagggttggagttccagggagaggagatgcaccatgggtggaggggtagggaaggagcatgttcccaggaggctggaaaattaggctggcctcagtgggtcaggacttcccaggtggctcagtggtaaagaagctgcctgccaatgtaggagacacgggttcaacccctgggtcatgaagatatcatggaggaggaaatggcaacccactccagtgttcttgcctgggaaatcccatggacagaggagcctggtgggctacattccatgaagttgtaaaagagctggacacaactgagcaaccaaacatacaaacacgcagcaggttggactacgtaatgtgaaggtccaagtgtacgctttggacttcattctgatgtaaagggagctgtggaagacttttgctgggtgatggctgattaaagccccttgttcaattcctccctgccctccagatatcaaatatgccgtcatcgggactgctgtgggcatcgccatatcggccggcttcctggccctgaagttctgcatgatcaggaagcacatgtttgataacgattcctctgacctgagaagcacaaatgtgggcttcaacggtaaggaagcagtgatgctcagccctggctctgccctttcctgagataagacacgttctggccggttatctggtgtgaggctctgagggtaaaactgactatagagagaataaaaatcatggatcaaaaagaaatgcagtgacctctctgtgtctctgtctctctctgcttctgtctctgtacttttccacttaatcattcttgatattcttaagaatcagttttcttggagaaatggggaagggagctgagttggcttctgacagaaatttcttttcttttacccaaatgatgtgatgagatgaaatcaatccccggaagtggcgaggctgctcctggcacgggtgggtggcaggagctatggccagcactgatggcctgccaggttgcatttttccccgcataaatcgggcaagccctgcactgagtgatgctgagtgtctgctcatgacccgagcagagctgggcttatgagcgcccagcatgtttctccacaccctgttgcagctgtggagatctgcgtccttgggtagaagccgaacactcagtgagtttcagtagcaaaatacaacattgatttgcacccccttgtctctcaagaggggacctgcaaaatccatcgcccatatggctgcttaatgggatggtaatgcagtccccagaggacagggaggaaggactctcaccatgtctcttgaaaatgtgattattatctgtaaagatacccaaaaggggagacagggcaaggaggagactgcacttgggggcttccagtgtgtccaactgcatagggaacttaactggccatagttcacttgcattgattttgtatccctaggaataaggggaaagagaaaaacagtctcttcagcacactgagagacatcctagatctcctacgggtgagagggcgcagcatcctcagggagggagaaggggaagaacaaccggcagagggctggggggtctatttatagggaaacctcggtctcccccgggtgctgagctgggggttcggtgagggactgggtagagaagcttcaacggtgccaacggggagggggcagagtgctcagcccaacaaccctctcagtggcctcaaccccaggaacctctcagcatcacccgagtctgctgggctctgacccgctcctgctggcctggcaccgagagagtggcactaccatcaccatgcccccgtcctaacagcctgctttctctgtttagagaccattgcgctaaagaagagaacttcaaggtaaggt

SEQ ID NO: 33553 - DNA, 1350 bp, Bovine  19866881114025
  misc_feature (1)..(1): n is a, c, g, or t
nacggtactgggcaggtcagatatggccctgctgggcggttaactctgcctgcagttggtctgcctgcctggacactgtccctccctcctgtccctctcatgtcacagggttttgttcaattcccacctctttcctcaaagtctttcaaaagcctcccaattagaagggctccctcccctctctgaagtcctggagcatttatttggtagctactggctctactgccttacgtgggtagacactgcattactatgtacttgaatccatccccgattcctatcgagggggctgctcaaggccaagggctccatcctttttgtcccttacacacccaggcctagcccaggtcctcaacttacagacactcaagaactctgaatggtcacctggctggaatgaaagcccaaggggcagacagaggctcaaagaagtcccacccttcttctgggaatgtaggcaagaaagcaagactctccacccagttcctgagaacagggctcgctttgggtttgaaaagtagtttccagaaggacaatttgaaaaatgtaagactgttgctggatttcttatgggaaagcttagaaactttcttaagagcagcagccagaaggataagatcagcttgaagatgaagaattctgggaccaagaaatcacatgaaggaggcagccaactacccttccagaggtgggcccatcccaaacccctacctgacaactctcccagcaactcagatcccggaaatgagcaccttccttgcccaccagtaaaacaccactgcttccctgcagctggccttccttcaactcaaaaaccttgccccccaccatgctcccagacatcctcggactccgggtctagtcagcctcacccagaaagtcagcatgccgtcagatgaattacacgggtacaaatgatgccttcagctgaccgcaggccaactgcaggatatgccattgggtcctggactggaaggaggcctgagcttcccacactatggcaaatggggatgaggtacacccctggagggagggaggccaatgggtgtgaggatgagatgagcatggagacgtgctgggcgctgctgctaacctttcatgaggaccgtcctggcctcagtccactcgctcctcccgtctgacgtcagcaggccgattggaggcaagcgttcatcctcgttggaagccattctgactatctttctcaactgagtgaacagatccccctcactgagacggcggaaattaatcacaacatccaagacaaagaactgtgggggaaacaggtcaaagacttcactcaaggcagcccgccttaaacgtcaggccttccctgagcctccatgtggg

SEQ ID NO: 33554 - DNA, 1256 bp, Bovine  19866881170285
  misc_feature (1)..(1): n is a, c, g, or t
ncggggtgggggatcaaaggaaatggccacctactccagtattcttgcctggagaattccatggacggagaagtctggtgggctacagtccaccaagtccaccagggttgaaacaagttggacatggctgagcgactaaacaatagcaacaacagttcaggttctgtgggttcttggggttgtggaggggcttttgcagtttggaatatatctgtgcagggtgcagggccatgcagggttcagggagtgtatgcacatgtacttgtgagcctgcgataagaatgtcgaatttttatatcacttccaaattttcgaacaatgactatcttacgtcgttttgccacaacctggaaatgggtagtgctgatatcaatattcccattttacagatgaggaaactgagggccggggaggtgaaagtgacaccccagagtcagcccatcctgctgttagagcggagctgtgtctgtagttcgggcatcccgcctccaaaccgggtcttttccctccacttcactctgctcatgcatgttcttacagacttcagtggggacacccatctctatacccaacctgatcacaaatacccctgaaacctctctgtccctcaccctacacatgccacacactaggagaaaccaagttctctcctgctctttctctcccagctcctgtgttttagacatccactgttgctgttgccggagagggcgatggcaccccactccagtcctcttgcctggaagatcccatgggcggaggagcctggtgggctgcagtccatggggtccgaagagtcagacacaacagagcgacttcactttcacttttcacttccatgcactggagaaggaaatggcagcccactccagtgttcttgcctggagaattccagggacgggggagcctggtgggctgccgtctatggggtcacacagagtcggacacaactgaagcgacttagcagcagcagcagcagttgctgttgtcagacctcagacaaaggcgaatgaattgttgacccagctgacagaatttactacacaagtttttatagcatttctgggcagcaacagcagccaatgccatctttcttggcattactgtttattgaatatagacttacagtctttaaataatttgaatatagtgctttcaatatacagttctttcatcacacatatatttctttaaagcacaaaactataacttaaaatcaaaaggctataaatacacatgtacatagtgccataaat

SEQ ID NO: 33555 - DNA, 1958 bp, Bovine  19866881218203
  misc_feature (1)..(1): n is a, c, g, or t
ncctgaactcttccagttgacccaatagaacattgccccagttacccaagagactttcaaaagagttcctgttgtcaatggatacttggcttctgccctcgctgagcactttgcagttcggggttcttgcgtagaactcaaactgattctgtaggcagtcagaagtcgtccgtttggggaggaaatgagggcaacgtcctcgtgttttgggaggcacctcccttctgggtctggggtggtgaaagcagcctcggcaccccttcccctgcccttgcaatacgcaacaatagcacggtggagagttttcagggctgggtgtcctctgggttcgcatgtctttagagaaggaggcgtttctttacacgcctctccctttccactagtagtgagtcatcagttttcctggggaggcagggcccgccaccacggctggtgagaaaggggggcgggagtgaagctcctgagaccccttgagtgacagcgccaccgaaaccggctcagccacagccgaggctgccggggcagaatggggcttccccgttgccacatctccaaattctccaagagatattggaataccagctttttagaagaaacctcccaatttttaaacactgataaggaattaaatattaatacaggatatgggctaaacaaaatgggctggggacccacccatttgtgatatgtgagttgaagctaggattggcaagtttcctttctggaacaccttggtcccagatgatcgagcaatgagaagcaacgtacggcttgtgagaaacggcttgttgtgttgtgtctcaagttgggatgggagctcacgaaagactgaggcccctttcccaaattctgggggtgagctgtctaaacagctcgaggcagcactggccagggcttatctgtacgggacccaggcacctccggtcatttacatacacagcccctattctccttatggccagagcccaggcggtcaggacacggctccatagcctggttgcccccccagtggcatcaccttggccaagcttgtcacttttctgctcctccctcctctgcctgctgaggtccagggacagagggcaaaagagcaatgaaccagtcttgccatcagcctccattagggctacatgtctcggtccagatccagggtgatgtcatcacctccacataccgtcatctcagttatgaagtcaggttacaggggaggagtctgttctcactgggtctctgtgtctcttgctctctccccctccctcccactccctctctacatgttggttttaggaacacgttgtatgggcctctttgcttgacggaccagtgttggctcttggcagtatctcagcagatgggtatctcttgccttcatggtagcagtgagcccggaaaccctctggggcacatgtcagctactgtcctagtcatgtggggctgggacaggaacccaggcacccagactccaaaggccaggtgagggccaggccacgcctggagcagccctcgggccctggtggactgagcccgttgcagaggctctgcatgacttcaggtgctctggtcatcagggtcaaaagtcacaggacacctgcacagcatccgcatgaacacgtacctgtgaggtgtagtcggccaggacccaggggaacactggatactgcatgtagtcattgtaggtcctcccagccagggtgttgaggtacatgaggtcttcgaagttgctgatgtctcttttctgccggaagagacaaaggggggataaagccaacacggctggttccctcctgagaaccacaggggtctaacttccagacctgcgcaggggcccaagctgtgcaggtggagcaaggcacatcgccacgctgctcccagtgaaccttgcgcctggagccggggcgactcggggaggccacgctaattccaagatgagctgaagcaaatacagtcaggaagcgaag

SEQ ID NO: 33556 - DNA, 1907 bp, Bovine  19866881234574
  misc_feature (1)..(1): n is a, c, g, or t
nacccgtggttttaactttaaataagcattcccgtcctaatagaagccccctctaatgtctcctgcagctttgattttggaacacgtcacattcctcattaaagcaatcactgttaaaacataaagcaacacaggatttatttcttcattaaactgatgatccgtatatgaagccaattaacattatgagtctggtgaacatcaagtgtaaagaggttagagaaaattaaaagcagtcaccttggtctttagataaagaaagtacacttttaggttgtaaattatcagagtgtccaagcgggacagatcggtgaatttggttaattggaaaatacattttaccgcacaagaattaagaaaaaataaccttttcgttaccgaagctcttttttagaggggagggaaatggtagcaatacgtgttagtcacctctttccggtcccggcccggagggtcggagacaatccgaggaaaaaaagagccgtcatcaaagtttgctgtagcctttactttccgtgattgcttggttggttgtttattcgctgttttgccaacaggaacgagcccggcctcgaggctgggggagaggaacttcggggaaacgagaccgagggtcccgctggctctgagccccgctctgggtgagtgttttgcgggagcccggctaagcgtcccagcgggcagacagccaggctcgggtgcgggacgctgggaaggccggggagacggagagcggcagtgggacgcttcccggctggcgccgcggggcagaagctgggcgttgggctgaggaacggagagttcagcccctgctgcgagcactgagcgagcgtcccaagtaactttctcgtttgggacaagaagaggatggggatcgggtcccaacacccagaatttggcggggtgcgtcccgccgccgcggagcacagggccgcagaggggaccctgtgactggtcgcgtcctttagcctcccggtggaaacaggtgccgctgtccagggttctgaccgacagggaggctcggggagcgccccgcctgcagacccaggacaagcctgtccagcgcctaggacatctctgggccttgacaggaaactgcttcggccgatgtcaggaatggggacctgagatgggcttggacctagctggtttttggggccaacgcggcgctgggcgcctggttcctagggttcctacacagatactcaggtgctcctcggagcatcttgtggagctagcccagatgttttcctcacctcgtttcacaggcactcggctccgaagcgcgcagggtgcttacaggaggccgcttagggtaagtaggagtttgagggagcttttggcagacccaggcactcaagggggagactccgactcttgaaaagaactccagagagcacgggtgctctgaggaagacagagagagcgcgctgagcttcctggcctgagctgaaacagggtcgcttctcagggctctagccctttccggatggagtggaaatggctctctcactaccccaccagcccagcttgctattgcgcccgctgcccagacctgcaggcatgctccccgctggcgggtcgcctggactcctggaatcggtggccctggtgaagctggcgctgcgggctgtctccactcagaatccagccagcgtttccagtggtttcttccttgagatgaggtcggctttctgcgcctgggtgggctgagcccaggaggggcctctgaagtgtagcggcccgatttgtctctgaggaagccgtcctggttcttcttcctggcggttttcagagggccatccacgggtggtccagggccctggcagccaatctgccctccagttcgatgcaccttccttggggggtgggtgttgcatgtgtggggcccccaggccttctgcttc

SEQ ID NO: 33557 - DNA, 889 bp, Bovine  19866881245121
  misc_feature (1)..(1): n is a, c, g, or t
ncttgctgaaattgtgaggaagagatacctaaagattttcggaaggaaggaatggtaaatggaaattaattataaacttgctgctatcacaaatttatgatgtgtaagaggccaatgcttttgtctttacttagtatgctgcctttgctttattgtattaaaggttaaaaaataaatagatgtagagtgcttcatggcttcgtttatgatctcaggcctcagccctatttttctcaaaagcttctccacaatgggttcccctactactgaggtttcaaggaaactcaccattaggctgggcatagattcctagccacacattattgggatgatgtactcagtaattaatgaagtatgacctggtaactgcagcctttatcttgagcgaccagaggatgctcaggttctttccagccacaacactttacaactcgctcaatccagtttctacgacactgaagtcttgtttctccaaccagactgcaagcttcttgctggtcaggacatccttcctagaaagctcaatgattcccacacagattgccctgcatgatgtaagagtctatgccagtgtcccaggaaggggatctgggactcaccagcatctgtctgatttctgagatgagggagtgcttttgtgggtagcagattttcccagaccaccaggaagagaagaaagatggaccacccttctacagccagtctgaacaatctcacatatgaagacagaaaaagacgctgagtacagaaggacaaagcatctcagtcagccctggaccagcaggtgggagccaaggagctgcatggttgcttcatctcaccgagactggtggatttttatgagaattcaccagctgtcatggatatgagggtagtggggcttccctca

SEQ ID NO: 33558 - DNA, 1017 bp, Bovine  19866881254034
  misc_feature (1)..(1): n is a, c, g, or t
naatagtgagacattgacatgcaagggcctgtcgcaggggcatagataacagagtcatgcccctagtgcccagcacaaggtctgaaggcaccctgggctctcgatgcctgtttactagtagatgaatgggtagataagtgagtggacacactgcctatctcttcagctgctgtcactgtggatccaaattccatggcataggtcttgcaggtagaactgactcactgatgatcaactgttgtctgagccaatttagagtttaagccaaaggctctcgtgaatctttatttcacgttccaggtggattccagtctactgtacagagaaagacactgtcttgcttctcacctgtacgtgatctttgtatagagacgcatatagttcttgtcctcttcgtctgtagttctcaatacacgacacaaagtcctggagaagagagaagacaagtcacagctagtaacaatcgtgattttagataagaacttcctgctctggccaagtgccagaggaagtagccgtcacaggacctgttggtcaaatcattcacagcctcatgaatacaggatacacgttcagattcacatacatgtttaagggttacttttacttctaactacattgaaccaggtagagcagataaatcttcctcccaagaataactagaaaagtagaacataatacttcaatcaaaagggaattctaaaaaatgttcaagtaacatatttatggaatagggcacccaacagtagtagaatacacaagcccccacaaaacatatactgagacaaaccacatgccagaccataacacaaacttcaacaaatgtataaaagttgaaatatgcaaaatgtattttctgatcataacagagtcaatctgaagtcagtaacaggaaatctccaaacacttggaaactaaacagtgtacttctaaataatccatggatcaaaaagtaagtctcaagggaaattttacaaaatatattgcattaaataaaactaaagtgaacatatcaaa

SEQ ID NO: 33559 - DNA, 2223 bp, Bovine  19866881270885
  misc_feature (1)..(1): n is a, c, g, or t
ntttgattatcattgattacctagtaagtttacaagtcaatacctccgtggtcaaatatttcaacctgcaggatagaaatctgcccctcatagccttgaacttatcaggaattacaaagtaaaaatatttacctttgaaagtttattaactttttcagtccatttatttgtaattaggaatttcctaaatgatatccaagacttcagagtattaactaaagtttgcaaggttaaccatttatttcttctccatcatcaagttcaggggcctatcactataatacgaatggcaaagagaaaagtatatagtatatacgttatgaaccgggaaaacaggcagtatagatttttattagcccagtaagtacgcttttccctctttttaaaagacattacatataaaacacattaaagaaacaaaaattaaaaacttctttttaccattaagttccttcttggtatcccagagacatccatggtttcaggatcattgaccttaaaattacgatactaagaccattcaaataaaagccccagaatctacagcttgcaagagttcagaggaaatttacacagcccatgaagcaatgctggctcatgcagaacttggtttgactacacatctgaccactgctctttaggacataaacctagagacgactccaagttcatctgattccaaaggaggacagactataaaactgtgagaaaaaacgttatacaatttgccctggcacatgcacagaagggaccaagctcctctgaacacctctacgcacagagaccagttgtttggctgatatataactgcattctgggaagccacttctaccgatactatcttaataaagatgatctgggctataacccaacgtgccacactatttcattatggaaaaaggagatgcacatcgacagttaagtgattacagctgctgctcattattagcccacagctcactcctagctggattgtcaccactcgagagaacatgttttaatttttcaatcaaaactacacggcagggatgattttaggtttcccaggcatggcatattagaccccacgcaagtttcatggtaacaggaaaggaagggaagaaaagagatgggaaataacaaaatcccagaaatcatttaagaaaagaaagatagtcttagaaactatctggagcagcttggggcatttctcgtcaaaacccaaccaaagcgaatgagaaacgcagaggcgagccgagcaaacggcttgtttagagaaagcattttataaacggtgaattaatgatatgcctaggcaagaaaacactaaatgcccattttcaactttgacttttccattcagacggaatgttttcacatgaaatgtagcagaatttcagtatcggaagaaaaaaactctgcttcgacactttattgtagtaacaacagaacatttaatatttaaaaatccgccaatatattttccccttcctacaactgtgtaagtatttctaaaatatcctaaaactttaagtactgctcatgggatgtgttgatctgctaaattaatgagaagagtaaggaataaaagcaaagcaaaaaactctgaagattaaaataaaaagttctttacttaacagtttatggtttgtatttgacccactccaatattcttgcctggagaatcccgtggacagaggagcctggcgggctaccgtccataggatcgcaaagaatcggacacgactgaagcaacttaatccacaacacacacaacattccagaaaacatttctctgttgatgaaccagagtgtagacagtcacgttctgctgtggccgccttcaggcacactaacactcttgtaaaggggtcgtcaaatcgcatcctgtgactgcctggggtttctacaacctaagtgtctggtaaatatcttgctgttactcattaggtaaagcctattagaatccaaggagctgttggattatctgggtttaaaattaaatactctacataattcatcaagcattaattgatttacataattcatctaccattactgatttacagaaaaagtcaacttacagcttaaatatggaaatgctcactggatttcaagataaactatttcagtcctaccacaaagaacaagcatgtttaaatgtttattctttcagaagattaaagttttaatagtttatttgaattcctaaagaaaataaagattacaaccaaaaaacagttt

SEQ ID NO: 33560 - DNA, 1687 bp, Bovine  19866881270973
  misc_feature (1)..(1): n is a, c, g, or t
ncttatggagctgaagttccactctttttaaagtgattgatagaatcgtggcaggagggatttcttcatcacgagtgaacttggtgatagagccctcttagggctaatttaaatggaagagcagggaatagttcacttgggctcattttccagtttttagaatgttactcttttctagcccaatccatttttaagctattgacccagctctcaccagacattcttcttgtggtttggtttattctggttatcacttaattctcccccaaaggaaaacacccggagatcatgagaacatgctgcagcctctgctgttggcaccccagagtctggccaagggtggggcgtcacagggacaggagaggccagggaggtacacaggcctgtgtactcgggccccacatccgaccatgtgaactggaggatgaggtctcctccgtacaaaggtgtaagagaagaagcttcaacagcttggcctaggaagcataaacaccctccaccagcgctggtgcgagtgtgaattagcgtcgccttgcgggagggcaatctggcactagatcagaatagaaaatgcccacatccttgacctacagttctacttctaggaatttagaagatttactacagatttacatatgtgttcaaagtgacctatgcacaaggactgtcactgcagcatcacttgtaatggtaaaacatttgcaaacaaatcaatagagggttgtagcacatccatgcgaactaatgatctgtacctttaaatagaagtgagacaactctgtaagaagtggtttggaaagcgctcctagatggcctattaaggaagacaactagatgcagaccagtagctgtatgaatatgctatttgtgtaaaaaaaaaaaaagataatatgtataaaaccaactatgtaggcacagaatctcttcggaagattatactgcaggagagacaaaactgcctctacctccttagagtctctatttaggctacaacattgagttgacagaagacagatcgagagaagtgcagacagattttattcttacaggtacatgggggcctgccaaggaaaatgaagctgcctaaggccctcaggatctgagcatgcctgctttccagcttcaccagccacactgacctctcttctgctcccagatctgcccttcctgcctctatgctctgagatggatattcctgttccatgaagtttcttctcccagccttgccatgactactcatttccacccttcaggtctcagagtttgtctgagatcatgtcccctccaagtttctctctgccttatatcgttatcaacctgttttttttttcttctttcaatgcatatcacagtttttgataatgtattggtgggtgtctcccccactggatttcaggtcccacgagggtagggttctcgtttatcttgtttgcccctcactctggctagctcccatttgcagtcgggtgtgaggactggtgcgccgggctgctttccaggttccaccactgctgccccatcgttgctcccaaaggtgagcagggagcctggcttcaaccccggctcttccatttacccacctttggtgagattcttatctctgcatcctttctttttcatctctaaatatggactagtaaaatttttcttttcccagttgtaaggattatgcgtaaaaggcttataa

SEQ ID NO: 33561 - DNA, 903 bp, Bovine  19866881286951
  misc_feature (1)..(1): n is a, c, g, or t
ntacaaacgctatcacgcataatgattataaaagaaatccttccaaagattcaactttccccccatgaatagactttgtacttactgtaatgctcacctggtctcctgccagaacaaaatattttaatgtaaaatttaataaatggaactaaaggtattatgtctaatttaaaattccatattgtgtaaactattgatattaacataattgagtttgtaaacaatccatttgcagaagctaaccttagacactgtattgacccaaaatatctagtggggctcatctgcaaaacgaagcatcaatgcctggaattcattagcagtgttacatgtttaatttctcctgccctacagctccactgtctcgtaaaaatttccctttgatgtcccccctaaaagaattaaaggaatattgtaattgaaatgtcatcaataattcacaagaccctcctccacagcaatacatctgatgaaatattaattgagctccacagactgacagtctgcagaggagcacttgcctgtaatttgaaccacgagtcctgatcttgctgtagctcagacctgccaagaaggcaattatctggatggtcttgcccaatcccatttcgtctcccagaattcctcctgcctgctggcagtgcaattcccacagccacctaacacctgtctgctggtacctacaacaacaaacaccaacaagaaaaagaaaatggcaaatggtgggtaatacagatcataacgcaaagtactcatgaattaatcatttagcgaggttctagcaccagtcagagaagcatgccggatgtgtgttttacatgagtattatattcataaggtcatacattttgattacctaaagcataaaatcacacatttttctttacagaacattaacacatt

SEQ ID NO: 33562 - DNA, 1223 bp, Bovine  19866881333650
  misc_feature (1)..(1): n is a, c, g, or t
ngccgagttatcaggaggcagaggcggaaaggctcctcctttgagatggcttccaatacggacctgcgctgggaactggaagccagcaagaacaacaccagctcagagccagaggacgcggagctgctggcgcccctggagtgctgcctgcaggagctgcgggacaccccggactggctggtcaccaccaactgcgggctgcggtgcgtggcctgctgccgggtcttccccaccctggaggcactgctggagcacgcccagtatggcatccaggagggcttcagctgccagatctttttcgaggagatgctggagagaaggagggcccgggaccaagggcaggaacaagagccagaggaggagcaagagagcgcttcggacagcagcaaaggtccaaggccccgcgtcaaggtgccttcgtcacagtcacagtcgcagaagcattgagccggaggtatgtgccctgccctgtcctcacctccggcacctcggtcgctcctttcccggccatcaggaccagagccaccagggcagggagaaaggaagagggccggggaaggaggcgagcggagtgtagagctgggagggccgtgaagacgtcggggaagtcaccctcccaaagggcacagcctttcaaccagaatccatttcaaactgtgaatcaagtgtttcttacagtgggtgcaaggcccgaaagcccgcaagcttgtggccaccgggatttctatttttgctggcgggtcaagcaggtcatgactcgcaggagagacaactacaaacaaaatttcagccctattttttcattgttaggaactcatcataggccctaattctatagcttattttattggaattaaacttgaataacccaaagtttaaggcaatggctaatggagtgaatcatgttattgggttggacccacaggatgctgccatttctgcaggttacccactggcacagacatcttgagaatggcaggttcccagggtagaggtggggctgactaagtcctgctgagcctgagctcagctacgccaactgttttaaatactgctgtgaaatttgcctctgccctttcatgtgttctttcaagaaaatactcggtgcccgctgtgtgttgggcatgctgatgggcatgcactccagctctcagtgagaggcagctagggcaggcaattgcaaagggaaggggagggctcccaggggaaggctcccaagctca

SEQ ID NO: 33563 - DNA, 1641 bp, Bovine  19866881360946
  misc_feature (1)..(1): n is a, c, g, or t
natcaacgtcctggaagatctttgatcatagaatgaaaacccactttatagagaggaggatctaagtggaaacaagtttccctgagaatgctttctcatatctaaggcacagctctgagattgggtgactctgttattccaggactcttcagattagaatccaactcaacctggcttgccaaaaaaaaaaaaaagaatattgggggctattaaccaggaagtctgaggtttacagcttcatgcctggcttgattcaggtgttgaacgatatcaagtgtccatggcgtccttgctatgagtctactgtactcatccaaagataacctggagaggtggttagtgcaaacactggacaatacctggccacctgcatttcctagtaattcctggggcatatatatctaaggtagtatttatttaccatcttctgtttctttttcctttcacagtgagacactatttggtgaaatgccctcagaacaggtaggaatattttcttcctttttccatgtaaagtctttgctattttactttcttttgatattaccaagaaattggttaaattcatatctttatctgaaggtctgcatattagtttacagattgacctaaaaacatgtattctgcatgcactcacatgtttccggatttcatattctggttctcactctcagaggggccagtgaacgtgtgactcatactggcccagcgtgcatgccggaggaggcttggcgcatgctcctggaggactgttccctggtgtgggaggactggcagatggactgaaccaccgggatgccttctgaccacaaacactgccgatccccttccaccaatgccttcttgtcctgtgccctactgtccagaatgtgtccattagtgatgggtgtgctgagaggctagccttttagctgatgggacacacccagcgggtaacaatggttatagtagatattgcaaactcaggagtatttagagacttgagacttttttttccagagaggatgggtaagatcaatttctccctgctcttcttccctgccaaaaagcataactatcagttctggaaataatataagagaccaacaaaggaggactctgaaaggtagtaagaagaaaattacgaaagacaaaggcaaaaaaaaaaaatcttaaagacaaccaaagagaaacaatttattacctacaaggaaacacagatttgaacgacagtgcatttttttcatctaaatccatgaagggcagaaagaagcagcacattttcccatacaaacagtaacaagagaggtggtagttaatatcaaataagaaatcacgtaagacgagaaatatgactaaagatgaagaaggaagttttttattataaaagatgaactcatcaggttgatatgacacattacctgggcctagctacagaacctcaacatatgtaaagcaaaaaacagaaaatagaaagattttcaattattctagaacaaaagctggaagtgtcagtgctccactctcaggaattgatagagtacctgggcacaaaatcaaccaggacgcagaagatgaagcaattttacctgacaaataagaatgatttgcccagtgagtgcacaaaatattcttctcaagtgtattaggaacattctctag

SEQ ID NO: 33564 - DNA, 1059 bp, Bovine  19866881582418
  misc_feature (1)..(1): n is a, c, g, or t
ntgatagagtttgttaactgggaaactcacgtcaggagcacgtgggtggggagttctactgagattctcgagatgctttgggaccccaggagttatgggttttctcttagcaatccctttggaggtagaaggatagtcatatcatgacattttatgatgtgcctaatggggccaattgttcttcttatttacctgtgcccctctcaggtagggattgttgtttaagtcctgtggataaggaagctgaagcttggagagattaagagtggaagaatcgtccccccatccccgtcccatacccacatggagctaaatgccccgccttgggtttcataacagggagggatttaataaggagtccagtgcacgagtcaccctcccatatcatgaatatcagactatcatgcagaattctggtcattaaggcaggcagtgagctattcctctctccatctttcacctgtccaaacccctccattagagtcacaccctttgggcccagagatcagttggattgtggagccccagctgggaacagctcctaaactaagagtggccagcagtcagtatcaataacaggactgtttcatcttagactcattcttaatggttcataagcactttcacatccatgatcactttgatcttataagaagtggagtttcttcctcccattttacaggggaggaaactgaggcacagaggtaggggtgatttgccagagatcacacagatggccagcagtttgttctgtgtggtgtcagcaccagagtcttctcctctgcacttggtcccctgctaggggcagggctgaggtgcgggaagaagcaaacaggcgtctcctcagttcacagccctgctgagctgagctctagaaacagacaagtcccagggtagggaacagggatgggcagatggaggtagacacagggggatcagtctgcggacagacgggggccacacttaaggtcaggcacaagaacctgtgaaccttgtcttccaggggctgcccaaactccctgtgcccccactgcagcagaccctggccacctacctgcg

SEQ ID NO: 33565 - DNA, 1070 bp, Bovine  19866881609960
  misc_feature (1)..(1): n is a, c, g, or t
nttgcccagcaacaggtgcgcaggctgcctttcatggggactgctctgcctggcctggcctggtgtggcctggctctctgaacggatgggagctggcatgcagacacagcgcaccacatcttgcctccctgcggcatgcacatcactctagcctgccggccccgccatctgcttcagggaggcctgggctgggggcggtggggagacaactttctgcatggcggcttgcagttggatctaacaaagacgttggtgtctttggaagtccagctgcagacgatgaaactgcaagtgatttcggagaacaaggaagatttttagaactattttgagcgttcaggtgtttgtggtatttgaaaagctaagcccggatttggttaagtgtaggttcaacctgaagctgaaggtgaggattcagcctccggacaagcattgtttggcctggcccgagttttacaacctctgagcgaacatttataatgagagaggcgtttatataaaaggtaaaggaaaaggtgaaagatcaggcaactgcgggccagtatccagcctgagaaccgcatctggagccatactgtgtcacccgagggacactttggctctagcttgctggcaaaaaccatcctggagtcttagtcatttgtgctggcgtttccgatggctcagggtttaacctttgttttccctttgttttccgagaaagataggggaggtggttttagtgttctgagtagttccagcagggagatcgcctttctgcagcaaagggatgcttgaaaacagagggaaaaaccagcaactgggggtgctgcccaatccacagaaacctcaggtgttcctgagctttttctcctcctacaaggtgatactgtttaatgttcctgtggctttgagaatacaatagagcaggcctgatccgtgctaagcctgtgggacccacgtgagggtggctggtgcctgctggccagtgtccacagcccggagggcctgtgtgctttggcggtgcaactgagccttccagactggccagatgttttatgactctgtagccgtggctgcctgtggagagc

SEQ ID NO: 33566 - DNA, 790 bp, Bovine  19866881644329
  misc_feature (1)..(1): n is a, c, g, or t
ngcacctctgtcattccagctccctggtactggtttaacactcacctgaccagtactgataatctgccttggatgtagctgaaatagcggagacagggactggggccacagggccgcctcctcagggaggtgatgaaacggattgaagcaggccttggggaggcaggtaggaaaggcagatttgatgtaagctggatattttttaagagcttccccaaatttaaatctttatgtgaaagctcctgaattttagatatcagcaactaactgaaaacagagaaaagcatctaggccaggtgatcagtgacatcccacttgcaggggatcgtctcacaggttgcggacatgggggccacagagacccactgcatgccccaaggagggctccttcgtgaaggcagcgtgagcatagaaggggtggaggtggccggcctctctggcctgcgcatcactctggctccttgagggaagaggctgtgtgtgcgcaccccggggagtggcggtagcccttcctcattctcttcctccctgttttccctgcagaggtctgtggagccctcaacgtcaccgtgtccccggggccccgtggttgactacctggagggggaaaatgccactcttctctgccacgtctcccagaagaggcgaaaggacagcttgctggctgtgcgctggttcttcgcgcgaccagactcccaggaagccctgatggttaagatgaccaagctccggatagtgcagtactaccgggaatttcagccgcagcgcctaccggcagaggctgcgcctc

SEQ ID NO: 33567 - DNA, 809 bp, Bovine  19866881680373
  misc_feature (1)..(1): n is a, c, g, or t
ntggaatgaatttcttgccttaaattgagtcaatattaaatgtattttaagtatatcagtattttgatcaagagcagtttgttttgattgaattttaaatatgggtttaaattcatggcaataagtttttcttaataatgttaagattgtaaaactgttatatccaaagccatatcagaaagtcagtttttgctcaagttacagtagaatctcaaatgagttttagaaatatcaataactctaattgccaccaaaatactgtagctcttaaaattttatagctatagttattaaggcagctgattgttaaactgtagacatctacattagaacgtttacattgcatctcccttggtactcttgggcttgggggatgttaaaagaaacgaaaatgctcaggattgagaagcatatgaaggatattttaaaactgccagtcactctatattttgttatttcttgttgttgatctttgtagacagattgaaattgtaatggtaaccccttgagtgaagaaaaagattaggatttcttatcttattaatagcatggtttgatgattgatgatcagaataaagccccatatagtttacaaggggcttccctggtgtctcagtggtaaaggaaccgcaggaaatgcaggttccatccttgggttgggaagatcccctggagaggaaaatggcaacccactcgagaattcttgccaggaggacccaacggacagagaatcctacagtctgtggggactgcaaagagtaggacttagcaactgagcaacaacaccacccagtttacaacacagaaag

SEQ ID NO: 33568 - DNA, 1089 bp, Bovine  19866881803745
  misc_feature (1)..(1): n is a, c, g, or t
ntggccttgtgttttatttttattctggccttgattaaagtgtttaaaattttatgatgctgccttttgtatttaatcatttcactgctgtttttttgtattcaccatttaccatttaaggaacaacagctgaagaagatcacggcaaaacaaaaacgactccaggccgtcctcggaggagcagaggtgcaagtggaactcggtctcggcgggctggaggaggaggatgctggtgaggtcctggggggtggggtctctgttccgaactgccgcctgatgcctctgctctgtggagggtgtctcttcagtcccagcctgggtgtttggacaaatacgtttatttgcttagtgtcaaaacaaacgcaggccattgtattctctacacctatagaacctagcctaaccctaactcgaaccctaacctgggtctaccagtctgactcgtttgtattttcctatctttctttagcagctctttgatgtttagatagagactgttcagagagagagaaactgtgagatggaacgaattagaagtctttgggggcttcagagaatgaaagtaaatttttaactcagcctaatagaggctcctggtgcccatttagtattatgtttaataaattagaaatcttaacattttgtataattaacttcataaaggcacctaacatcttgattgaattatgttttgttgacccagtatcatcagtcagcattcatagaattgcttttacaaatctttttggaacctatttgacaggctttctaaccatcaattctgttgttaaggcatcttaattcaggttatttagttcatggccatgattttgcttatatcactgccctggatgggtgtcttttggaaaaccttttgggaagatacgtaagctctgaaacgaaatgccttgagtgtcagtgtgtgtgtgtgtgtgtttagaaattgttggtagctgttcagttatttactagttgaaatacagatttaagcccttcaagcaaacattttgtgctggctccattcagtaagacaagagaattgtgaagactcaactgaggtgacggaaaaagatactagctgtgctgtga

SEQ ID NO: 33569 - DNA, 1216 bp, Bovine  19866880473657
  misc_feature (1)..(1): n is a, c, g, or t
nttttggcaagttgatattacaaaagaatttaagttaatggagcactaagatcaaaaggcaaagaggccttaaagggtatgatgtatcacaaagaaagttacatatcatggagatgggttgtgggtaagcatgaaatggtaagttgtaataggcctttgaatgctgtactgcacaggacatgattaagtgcttaaagtacatactgagaagaaagagatttgggctgagaaacattttgtggtcagtttatcataattcagtaaaagaaaggaactatacttacatttgtttataaagctctgtttcagagggatcaacaaatactaaagatgaagatcctttttttttttttttaattaaatgccaaagaataaaagctgcaataatccctctaaaacgtattagtgatgaacaatcccatggggttagactgagacaaatttgatagggttagaaaaatcgtagagaaaagaagctatatataaactgtgaggaacgcactagggaaaacgccttagaaaattaataaagattggcttggtttaaagatgataaacaaagactaatgcaagaggctaatgaattcagtcatgaagaaagtttatactaaagtgctctcaaaaagaattgctgctggcctggtttttattaagcatttttcccttaaattagagggaaaatataagtaacccattaataaaatttgcaatttatactgaattaggcgatactgtctctgttaataaaatgatggaaattctgataataataattactgtaagttggatatagaaggtcaaaatagtgtttaaaataagataagctatatgtttcccatttttaaacccacatagaagcagcaggtagcatttgagaaatgtctccatttccaggagatattcttggtttaagggttttaagaactgaatggtaggacctccctggtggtccagtagttgagaatccaccttgatatatagaggacataggtttgatccttagcctgggaagagtccacactgcagggcaagtaagcccatgtgccacagctaatgaagcctgcgtgcctagagcccatgttctacaacaagagaagccgcagcaatgaggatcccattcacctcaattacagagtagcccccactcgccacaactagaaaaaagcccatgcacagcagcaaagacccagcatagccataaataaccacttaattt

SEQ ID NO: 33570 - DNA, 2446 bp, Bovine  19866880625431
  misc_feature (1)..(1): n is a, c, g, or t
ntgtgtggatttcttagtagtcccatgaaagtgaaagtgaacttgctcagtcgtgtccaactctttgcgaccctgtggactgtagcccaccaggctcctccgtccgtgggattctccaagcaggaatactggagtgggttgccattcccttctccaggggatcttcccaacccagggatcgaacccagggctcccccattgcaggcagaggctttaacctctgagccaccagggaagccgtaggtacgggtgattctttgcagcttttcaaacttggaggtgttttacttcttaccttgtattcatgctgaaatttagtatccattgaggaagggcattgaggtgcattgaggaagtaccaatgtattggtagaagtaccaagtctggtagaatacagacatacaaataatcaattgctatattacaattgctattataaagggatcagtaaataaaggcaatgggccatgggtaaggaggctcagaagtccaggcaaggcttcatgaaactgaaattggatgatagataaggcgtttgctagatcataaagggatgggtacatagagagcccttcctaagcacatggaacagaatgggcaaaccatggtatgagggagccccatgtttcatggggcatgtcagtatccctgaagcatagaattagcagaaatgatgtggcagatgagcctagacttggacaggtaagtaggaaccagatcaggaaaggccttgcatctcctgtaaaatagtttccattgtagcctgtaggttgtaggaagccactgaattcttttgaatagtgtattttgaaggttccaggctcgtttgcatatattgtaattcttatccagcatggggaccaagttcgacacagttctataaagaaaggttgcatttattttctctggcaatggttgaggcaactgcacattagctttttgttttctttgaggaaatttttttattgtgtttatatatatatatatacacacacatatatatgtatacacacacacattcatacatacatacatacatacatatttagagcttccctggtggctcagtggtagagaatctgcctgccagtgcaggagacgggttcaatccctgatctgggaagatcccacacgctgtggagctactaagttcatgtgccacaactaccgagcctatgctctggagcggggacccccaactactgagcccatgtgccacaacctattaatactgaagtcagtgcaccctccagtatctacagtccttttctcttctgcaggttttccacggagaggaatttgttcccttgcttggaggattggggctggtatgactggggatgggaagttagtctggctacttaaggaagggagcttgaagtcttgtgatcagtccatagatttatagttaatcaccttgaaaatacaatgaaacacgcccctttgttctcatctgggaatggtgtccccgagtccagagaccctcccatcaactatgttcgagaaccaactacctgtcttcagttgcagtagaacaggtcttaaatagatttttaaccagttctcccatatttagcttctatctataccctgtcttgagagatgcttaatgcctcttgttttgaaagtttttctggagcaccgcagtaccaataaactcacctcttaggcgctgctagtccttaatctcacaataggcacttagctttctactttacaaattttcattattatcactgcttctgccttcattggattattgggaaccaccatctctgctttttcctgtttgttttttagtgaagcattgtaaggaaattgtcaaatgtgttttcaatatctcaaatttattttgatgcaatgttttctaaagtgcagtatacatgtttttccttttttttcgggatataatttaattttccttcataattcagagtcattactatgaacacagactattacactggacaaggtaatgacctcagggactactgagaaattaaaggcagttaagcctgagattgatgtggcttttccataatttatgtgtgctttttacagtgcttctgtttcctcccttgttattatggttattagctatctctcctcacatgtaagtgggcctacctctaaaagcatctgtttcctaattttttgtttatgatgtgctgaagctcttggaattgtgtcaagtaagcttgacacaacaaagatcactgtgaaagtgattaggaatgttcccaagggaaaaccatagagtaatggggaaatgagatcaggaaggcaaggaagcaaggcaagggtgaaacatcaagcaaacctctgtggtaaactcaggcaagggcaactttggctcagttctgtggggaacctgggagacagtgcaggtccaacctaaaagctgttcctaacttgggcaaagagaaataaatacatatacccaac

SEQ ID NO: 33571 - DNA, 3084 bp, Bovine  19866880646252
  misc_feature (1)..(1): n is a, c, g, or t
nccccgatagtgagaaaggctgagggcaggaggagaagggggagacagagaatgagatggatggatggcatcaccgacttaatggacatgagcaaactcgaggagatagagaaaggacagcagggaagcctagtgtgctgcagttcatggagcagagtcggacacgactgagggactgaatgacaaagaagaaaatagcagtaaaacagaacgttaggggaaagaagagacagctgaacacaacagcacaataacctcctcccttcaagcagtttgggatctaagtgcttcagggtggggcttggaagccaggcaatctgctcatcttttaagtatgacaactgctctactcctctgaaacaagaacaggtaaagaacaacaagcattcacaaaatgtgcaccaaaaacttggggaaagaaatttaagactgctgtagaactcaagctagtccaagcaaatcagaaagcatctctggccacagaactctttcctcagaaggccagtatccacccagagccctagagaactgaggggaaagacatgcggccacggtggggaggagttgagccacggctttatgcacaacgtgaggagattatccaggaaggatgtgggagtccagttctggcttaacgctaacccaaatctgagaagtgcagcctggtatctagccaataaagaactaaacagggaataattctgcacaatcaagaggataaactccaaaactgatttgagggaacaggcctggcctcatttacatactaacaaggccaagatggccacctcttatttcacttttcaggtttcttgtgtccccactactgactactgggcttcccagggagcactagtggtaaggaatctgcctgccagtgtgggacacgcaagagacatgggtttgttccctgggtggggaagatcccccagagaaggaaatgacaacctgctccagtattctcacctggaaaattccgtggacagaggaccctggcgagctacagtccattaggttacaaagtcgaacatgactgagtgactgagcccagcacaaatgactaccaccccctaacctcatcgtatgcatactgtggatattgtgatttaaaaaccttggttcagagtccaaaaaacgagagcagttgggggagaatttgcagttgatttggggaagacgatacaaagcagaatctgagttgctgtgggttaaaaccctgaggtctaccagaggaaggatatacataaatcacaaaaaatatgtaaaaaggaactacgaacttatattaaggatttaagtgacagaaagttatttaaactagaagaatatataaacaaaaccaaacagagtcaggaggaatacactgggttgatccatataaaatcgctattttcacagatccaaaaaagtgcagtgtcagcaattttataaggttcgcatgtactttgcatcgaaaaattcacggaaactgcactggagagcaccagaatgaagaggaatttcagacccaatattaaggaagcacctctgacaaacagagcaaccagtgtgcaaacagaacagggtaatcccctctcaagaggtttctgtgttaagttgcttctaagatcccttctcttgcccacttagtctaagcaatttctggtggattcatttccatctgtagtaagagtcgagaagacaggtgactatgaaacaaatgtatcctgaaaagaaaatgggacaagagaagttcaggaaggcaacagtgaccatttccaacccattcagccccctctctgcagaacccagggatcatcctgctctgaccacagtgagatcttcaggcaggggaaaaaatgagtcctataaacaaatgctataaatttaaaagaaggtttaggaccaggaaaaagcaataaagagatctggaaaggaaggcttcactgatgcaaagagacttgacctgcagaactgtgacttaggtagcttgggacacagagcagagagcacaccaggggctgaagcccaagaagcagtccagcagagctggacagaacgtatgtaagtgagcagagagtctggggtgatgagttagagaaagggtggtgcggccaagactagggacacggaccatcttgattgccaagctcaggctggcactgtaagtctaagtatggtttacagacaaaacgtaagactgaagtcataagtgaagggacagttcatgtcttcatgcacaagttgtaagtattataatgttagggactcagacaaagaaaaaagcaaagctatgttttgatttcagtactgcttcattttttccgttattcaggtcagattctgctacattttgttcttaatggtttataaactgtattcaaaatgccttattatttttattacaacaatttttttacactctacgatcacaaatgttattagtccatgttcacctagcaattcctctctaatgaaaacacctaccttggctcaaatgtgagaaaagcagtaaacattttgggggcatttactggctaggcagtggtggcatttcaaggggctggatggaaggagtactccacccagggtgcaggcaataatggggtatcttgtctgcagagaatttaaaaacagtaataaactgacgaaagtcagtctgctttttattatcactctgcactggcaattctaaaccattctagccctccctgctgggactgatggctcccatctcagccatctctcctgggcccaccaccagtactagcgctcagcatcataggaagtgttttacatgaactctcttttacccctcattttacagacagggaaagagaggctcgggagacagaggtaaatagagaatgagggtttaccccaggcagcctgattcccagggctgcatgtttaacctacaatctactccactcagggaaaaatgagcaaaacagcagaaatccccagttcagctcagctgagagtcaatagccgagtctcaatgtcgtgtttcattagcctgccgcctaccttttcatcagtgaatcaacaactgactgcctatagctcagagaacacttcttacttactaattcattgcccatt

SEQ ID NO: 33572 - DNA, 1673 bp, Bovine  19866880681870
  misc_feature (1)..(1): n is a, c, g, or t
nacttgagtgccagatattgtatataaaattttttagagttaaatttattgataagtctatactgtcttcccaaagagagatctgatatctcttttggcaagttgttaagggatttaacaatctggggtcactttaatacaattttagaaactgaaattatttcagattaggtttccgtctctgcaggatctgcttcatttctggttcactactgaagctgtggtactataataaagaagaaaagaagataagaaagagaagaactaacactgaatggagagggtcccaactcaaagcagaaggattctaccatttcttacttttcttaataggccctgctctccaacattttgagaaaccacaggagcctaaattgaatacactatcatccagagaagaattaaatttgttgagagtcagttagcactactgacttgagaacagtctagcccattccaagatccacagcttaatctgggagttctcctatcagccactcaacttggttacatacctaaggcttggtctccttatctcagctttggcaatacaaccagtgtaaccctgcttttttcaaagatgtgtattcattcctctgattttacatcataggttattttttctttgttttcttcttcacgtgtatgtgtgtttgggggatctttgggatttttctgtcttcctgcaagctcagtgatgcaataaaaatatcttaacacaagatttatggagaattttcttatcatatggtggaaagtccagagcaaaggtttctgccttctttcttccaagttatcattttgtgagggttttaaagaagataacaaagaaccctgggttttaacgagagcccaggtgattctaatgaaagtggcacaaagaccactttgagaaacactttgtttgactaagtaaacatcaaaacttgcatttagttgctgcactttgccaaacctaccaaggtttcctatataaactcaactcttgttttgaaagagtggatcaattcagatctacagggtcttgtgaggcaaagttaaatcagaaagcagcagtgatacacgtgtttttaaaccacttctggttttaagcaatctagttataaatattcctgcagagtaaaagagaatgaagtgcaatatggcctaaaagtgtgacaacagcaatcgtcaaactttcttttcaccttcaaagcaatgaaataactgctgcttaggagcaaaagcccatcgctgtggtttaccttaagcacctcctggtgaggagaaagaataaaaaatcaagcaaatgtccctattcttcttcagtatccaaagacaacagacagaagatccacaaactttgtcagttctttaattttttctttactatgccttaatccttgttgcttatatattttatattacagtactgtggtgtgtatctgttaattccatactcttaatttattctcacccttcctttctcacacacatacttcccctttgctaaccataagtttgttttctatgtctgtgagtctgtttttctgttgtaaataaatcaatttatattgctttttagagttcacactatgtcttattttttaaataatttcccctttttaattatataagaaaggagccttctcttatgcttctctttcttttttaagaaaaaattcttcccttta

SEQ ID NO: 33573 - DNA, 1772 bp, Bovine  19866880682010
  misc_feature (1)..(1): n is a, c, g, or t
nttcccaacagtggtcaagcttttgtgcacacagaccacctagacaagcccattgctcttaaactcacacccccagacaccctccttttggggaatacatcgaacattctgaggcttaattacctcccctctgcagtgagcccctcacctccctggagcccctacccccacccggagctgcataccaataagctattcagctcatattggctttccaaaaatatggccgcattaaggtgtgaaatgttcatgggatcgaggggtgcagggctatttctccagtggagttaggacttggcactggtactgtgtttattaggaggccaacactattcagctacagccctgaggttggtggggaggccaggctggctacccagggtagctgtggccttgggcagggcttcaggcgagtgagtccccaggtctttctgactgctactgtttctgaaagaacattctgaatagtcagcttgaccagaaagaatatagcatcccttctgcagtcaggcagagggcctcttcattcctaagaatctccttagtgctctctcatgtccagtctgtacgcaaatagtacacacagtccccggctggacaagggctcatgggcctaatactgataagtaagggcctgctctgtacctagatttatggggacaccaagaagtttaagacctgtccctgccttcaaggtactgatgatctaactagggaaaaggacacatgtctgaaaagaaattagcagtcaggatgcatagggtttaagagtcccctgagtgacatatgtgagggatacaagttcccttataagttttctcaggaaaaggaaaagataccaccattaagaagaaggggagggaagtaaaaacccctgcccgagaggaatcctgatggagatctgctgtgtgctagaggtggtaactgatggacagaggagcctggctggtgacagtccatggggtcagatacaactgagcacctttcactttcagaagtggtaaggacctctcaaagtggaaaaaacaggacttgggtctttactgcaaaaagcgcgagtgtgtgtgtgcatgcgtgcacgtgaacacgtgtgtgttcactcagtcatgtctttgcgactccatggactatagcccagccagctcctctgcccataggattttttaggcaagaacactggagcagattgccatttcctactacaggggatcttcccgacccagggatcgcacctgattctcttaggtctcctgcaccagcaggtgggttctttaccactgtgccacctggaagcccaaaaagctcatagtaggtgttcaattcacattggcttttgaataccctgaaaacaacgattgttctcattagcgcttcaattcttggcaagtacttttgatcttctaatatgccctttgttttatagaataatattaacactaataacaattaattgagaaattatatcaggccctgtgctaagcacttaattatctcactgaatcttaaaatgactcaaaaagggaagtacctttatgattcctttcgaggaataataatgaggaagcgagtctcagagtgggacttgcccgagggagtgagggctgggatgtaaccagatctctctgcctccatagttcatcctatacagtctgcccctccagatctaggaagcagaggtcagaggaattaggaaccatactgaaggacacacagcaattgggggtgatcgagggagggcctctggcttcaggccatgctgccttctgcactcc

SEQ ID NO: 33574 - DNA, 1079 bp, Bovine  19866880695341
  misc_feature (1)..(1): n is a, c, g, or t
ncgtgtttcttttttcgtttgtatttatttaaatttgttttgtcttaaatacctgacaagtttaggtaatcttaaaaaattttttaatacttacttaaaaaaaaaaactaaaaaacgagtttggacacttagattttgcagatactcagtactcactgatttcactgttgacaatttgagttgacacatactggtcacaaggtaaaaatacgatcactgcaagtatctgggttaaaagtatctggttttatctacctaaaaaagtagataaaactgtgtgaaaacatcacagtccaggagactgccagacctttctctctcccatgactccagaattggagttatctcttgaaaactggaagggtacccttgacagatttgcaggaccaatactttgcagatattgtagaaataatatttttagtagagttatctagagtaagaatagaggatgcttgtagctggcagttaacagcactgagataggtgggtacacagacgccttttactgtatggaagacatagtaccaaaaccatgattgtgccagaaaaatgatgattaccatatctatatttggttgaaataggtttgtttttgttttgttttttgtaattgttaaataacatggtttggtgaagtgtttgactagccacgtctcatatgttgttttataactttttatgcagttacaggtttacaaagttgttggcttttcaaaacaaagttttaatcaggtatttctagtctaaatgggtatcttaacagtttaatcttaatgagatgataatttacttattgcagctagttactaaattagtgtatgtgtatacactatatgtcatattttcaaatgctcagtggactgataattatttcttcaaaggagagatgaattcttagccttgcttttagctattgttaaaaaattagctcctttttctttaaattaatatagttgagaaagtgtatatactgttgtttatttgtttgtttaccctcactaaactgagattctctagagatcttatcttcatacttagctctaaataaaagtcttggcatgtaaaaatttgctgca

SEQ ID NO: 33575 - DNA, 953 bp, Bovine  19866880706325
  misc_feature (1)..(1): n is a, c, g, or t
nacacacgacggtacacaagactagcccctcattccccatctcacaggaattcaggaccaatgaaaaggaaagaagaaagagtacttgaagaaagaattactctgcagacaacattagagtcatgtactggtggcctgcaaggatgagggcagctgataattttacaaaatattttaacatggacggcatctaaagaaaatgtaaagacatgtggaatgtatcttacttatgtaagatataacaattttttctaattgcattagaggttggcacaaatgactttccataattgaaaacataaaatattttttccaagaaagatgtactcaatgatacaaaatccaagtataagaataacaggtagatttgctgctaagatgtaatctgtcaataatgggtctgaaaaattactgaaagtacattgcaaagacgagtacaaaatgcttgattaaaactcaaactctaggtaaactatatccaagaattacggagtctcacatttttaactgtccggatgttcactgaagtgcacatataaattttgatagtcatattctgtattttagtatttatgattattaatcccttcagtcagcctgcactctctaatccattagaattttcccaaacgtgggtttagccaatatgcagaactggttttctttaggttgagtccttttgtgtgatggtaggcacttaacacgccatggataattctgggttttgttatttttgaagcaaacttcttttgttatatacataatacatggatacacgttccttgtagaaaccaaaatatgattcagaagcctaaagtccactctgtgggatgctcttcttgtgcctgccccagctgcccttccacttaaacacagtcaggttcagacgatggagcaccaaccaccctgggagtcagaacagcaggggctttgacagaagccacacagcgggg

SEQ ID NO: 33576 - DNA, 1237 bp, Bovine  19866880752253
  misc_feature (1)..(1): n is a, c, g, or t
naatcaacataagcctggtaattattctatttggaaaatatacccatcagcccaggattagtttcaatatgtttataaaattcattaacagaatattacaagtaggaaaactaggaaaacaaaagcaattaattatcctcatgctaaatgattgctgtaccgaagatgcatcagactttaaagggatatgtgtaatctcatgacaggcttatctgaagcatttccttccacagtcatttttaaaaagaatgctctccttcacactattcttttttaaaaaaactaatttctctttcatttacttaaggttggggtggactagcttttgaaacttccctaagaaaaatcagttgccttaatcattatcactcaaaagcaaacaagtgcctacacatgcatgtgggactctgttgcgtatggaactctggtgcttttaaacaaagaccaaaccactaacgccttcaggaggtgtgcagaaacaaatgctgtagtgcacttccccacctctattgaaacccttgcctcaccagccaagattttgttcaacttaatgtgtttcgtattttataatacgtaattttcattttctaaaagagaaatgatattctgaatgtttttctaaactatgtaactatgcaagtgaatgcagatgtgtgcacacatatgcatatatgtatatacacatatatatacatactgtgtagatatacagatatattaatagggtgtgttcttcattctcttcccctgttaaaaaaaataaaagctaatatttattgcatgcaaacctgccagatactgtgtgaggtatttacattatttcaacaaactcagcgaggtgttcttatggttccaaacttattaaggaggaaactgcagcccagaaaggttaaataatggaccccaaggagtccacagctgcaagcggcagagctcagattccgtgttaggaggccgacctcagagcctgccttcttctcccgagtgagtctctaaattaggaacagtaactagagcaggatgggatacacacataagtcaagggcaagggtcattctggaagtgggaagcaagaggtaagtttataacagggatggatattagaggaagaagccactcaaggtcttttattgtcagaggagatgaagaggagaccattggcaattctctacttaattcaaaatgacttttacagaagattggctttcaggagttatttagaactgaaggaaaaagg

SEQ ID NO: 33577 - DNA, 2239 bp, Bovine  19866880757838
  misc_feature (1)..(1): n is a, c, g, or t
ngtgatggacagggaggcctgctgctgctgctgctaagttgcttcagtcgtgtccgagtctgtgcgagcccataggcggcagcccaccaggatccgccgtccctgggattctccaggcaagaacactggagtgggtttccatttccttctccaatgcatgaaagtgaaatgtgaagagtgaagtcgctcagtcgtgtccgacttttagccaccccatggactgcagcctaccaggctcttctagccatgggattttccaggcaagagtactcgagtggggtgccattgccttctccgacagggagctttgaggggcccttgaacaaagtttccaacaccaggggcctctggagagggtaggggagagggcttcctggctccacagcggtgacaaggggttggctcctgatttcctgtggaaagggtctaggcctcagccccagtcaagctggttaataacctcatctgagataactgaggcccttctgaagcatcccagtggcacctgggcaatgcacatgcctgggcctccatgtcagctggacccacctgtggggagcctgccccttgccactgcagtgtccactctgttctaggatggactcgctgcagaagcaggacctccggaggcccaagatccatgggtcagtccgggtgtccccctaccagccacccacgctggcctcgctgcagcgcttactgtgggtccgtcgggctgccatgttgaaccacatcaatgaagtctggcccaacctcttcctgggagacgcgtaagtacgagccacggtgggggctggggggagcagaaggggacccttgcccggagcctgtgaggagcagagttggcaccctctttgcctccgaccatctcttttcacatatttatttccttttacactgttactactttggggaactagaacatatccaagaaagtgcacaaagcctcagtttcagaccccaggtcaagaaataagacattacttgtgccccggaagcctccactgaacccttctcggcataaccttttcccctgtagataaccactgagtactgaaatagttatttccttgcttttctttacagtttcaccacttgtgttagttttgcccagcttttaaagtgataggaatcgaggcatgttgggtattttgtacctggcgtcgtctgctcaaaattgggagatgccagcagtatgtgtagcatacagttcattgctatatattattcatttgcatgtaaataccacagtttatccactctgtttgaattgtttccactttggggctattataaacagaaattctaaaagcattctagtacatgtaccctgggaaccacacatgtttctctaggatatatatatagacacagtgtgcaatatgagtcattttccctaaaagttgtcttaaaatctagaacatatggatgaatatatgtggatgttataagttttctttaatatttagaaaatatagatcaatatcttattaacaatatgacaaatatgtatctcccctacatgcacagataaccagttataaaatccttgacttaaaaaaaaaatgcatacacacatacatacataaatgctttttcacagttcttttttttacaaaaatggtatcattttataatctcattttgtaatctgctttatataggaaactttttaaatggaaccacacaacatactttaaatgcacttttaagcgacattctattttgttatcctgttcttttcataggttctcaggatagtaccaacaccttttcttgctcccctgcatctatctgccacattttagtgggtgtgcggtatttcattcagctgtatcaatagtcagtctcctcttacaggctatttagtgattctccctgccccccaattttctctatcttaaatgtcactagatacagtttacatttgtctgtgagcacatttggaattctttaagttcctaggaggctggggcaagtgcgtgtttttgaggcttctaatgcatgtggctgaactgccctccagaaaagttggcctgagtgaaatggagccccttcatttctgaatcagaccagttcactgattccaggttctacccttggaagaggtcagcagaggaggccaaggggtgaattccagcacagccggggcagactcagtgagctctaccccacctcctcctgtgtccctccaggtacgcagcccgggacaagaacaagttgacccagctgggcatca

SEQ ID NO: 33578 - DNA, 1190 bp, Bovine  19866880804541
  misc_feature (1)..(1): n is a, c, g, or t
naaatgtattgctgctcactattgtactctaggaaattgagaccccatctctagcagtgtcaccagctcacaaagccattaccctgaatgaaccggcagaattacattccattctgtgaggctcatgctcattagcaccaaaagaggcaattatttgtgattaaagccagaggaagtgttatttaaaaggattttcagctttctgaaattctgcctataatcttgtgcagtacagagcagaaacagggatttttctgtttagaaaaacaattctataggtagcctatccttggagcctctctagtagaaataaatatcttgttttgtttatttcccttgtctgttagggaaattactatggaaatgtttgtatttagaggttgcccaagtaatactttttatacacattgtatctgctgagtctcctcgatgaaaatcggaatactactttaaagtatgcataaaataatgtttaaagaaagttggttgtttatttcctcctttgtttatattagattggatgtgtaaatacagtattaaggctgcatttggagattttattcaaactatccgggtaacaggaagaccaggtatcttatgatagtaatcacttctgaccatgtgaaaatctgttgctaggaactgtgtgcttcttcattaccagagttaaactgaaagaaggaaaacacagcaaatcatgtaatcttcataaggtacatcagatgcaaaaccaaaatgtaaatatactcaaggaaaaccacgaagtgacatgttgagtctaaatctatattattagatgttgaaatatgaaattttgggtgtaaaaaataactatatagcagtgttgggctgatttgtataatttattgacattgaaagatggtattcttctttgaagtattttaattgattatttttatattttcagatgatatttctagtcattaattcattaccttagtcttactcttctttcttgatctagttatcccacgaaaggtcgtcttaccagaagttcaccattttattttacagccccagttgtaatgtgttctacaggcaaatccagttgttttattttggagctttttgtggccactgttcacaagttgtccctaataattttgggtatgcctcgcagccgtttgagccttgaattttggatagcatttgcatgcttacagagtaag

SEQ ID NO: 33579 - DNA, 1057 bp, Bovine  19866880848460
  misc_feature (1)..(1): n is a, c, g, or t
ngaatactggctgctgtagggctactttaaaaatcaatgatgcaaaaatgatgtgagcttcttaagacatttaactgggataaactgtctgatcctaataataggaacaaggcaacagttaagtctgcatttaaataaatttttcatattaaatgtaaaaacactttattccttttaactgagggaaaatttagctgttcaattatctgaattatacttatctgctacccttccaaagatctttatctgagccaaaaacttgcatgtggtgtttaagccaaaataaaattttgccgccaagttataatgttctgaaaactgaattttggtgtctaactgaactgcagaaaaataacttactgggtataatcaataattactctgaaaaatatttggtaatatacttcttaggtaaatatccatttgtatactttcaagagctttaaattatagaaattgattatatatagtcttaaaacacaacagatatattctctaagaattatttaagctaacgtctatctatctagggcttcccaagtgactctaaggtaaagaatccgcctgccaatgcaggagacacaaaagacatgggttcaatccctgggtcaggaaatgacaacccactccagtattactgtctgaaaaattccaaggacagaggagcctggtaggctacagtccacagggttgtaaagagtcgtacatgatagagtgactgagctcactatctatctatcagtgtgtagctaaacatacccattcacatacatgaaatgcatttatatgtacacactctttttcatcagaatgttttctagctctaagaggttctaactaaagagtattggagggtatttgggagaaactctaaaaaacatagtatggactagttcatacacagatgctttcttagattaaggggcccctgggtgtattcctacatgaagatttattgttattgatcttacagttaagtgtgtaatggggaaggagacagtgatcatttaaataaacattctgaggtacactgtagccagggtttttccaaaccggg

SEQ ID NO: 33580 - DNA, 1225 bp, Bovine  19866880848779
  misc_feature (1)..(1): n is a, c, g, or t
ntgtctctactcatgagttatttatttgtagggtatctctttttccagagaattaatagcaggaattcaggttgtcccatgaaacacttcccttattgtatttgccgccacatcatgtaatactacaaaccaaaagctgagaaagcacctgataaaccccacaccatgcagcaaaattagggagtgtggggaatctgcatctctcagttggatttaatgatctattgttaggccaagaaacctgtttccctgatcagcatgtgaaacaatagaggataaaatggtgtgtaagcagaaagtctccccttgtaagctgcaaattacctaaaggttttatttctaattatggtcatataattgcagacactttaaggagaagagcctgtttgttctccctggtgtgagcaactctgatccaagctctcctgaagccagcagccaagtggcagtggcacaggtccaggagtcctggagaaggacagacggacagctatcctaaaaaagagctcctgatgtcacccagcaatgagacgtgagagcctgataacgctcccatcctcactcaggtgttacgtgtataaagtgaaagggctcacaacattaagtagatattttttcactgggtagtggtcagcaccatgcttgatctcccattctctcattttctgaccaggccttcccaaggccttccttcttagcataaattggcttcccctaagaattagttctccatttggtttggttaagaaaataatcatatttcattaaattctcaaaacttgttacagaagatttctgaaagcctgttgacacgcactgtagtaaagaaatttaaggcctagaatctggaatggactccctgcgtttgagccccagctctcccgttttctggttgtgtgaacgtagccaagaatttgactcctcctttaggttctacatctgtaaaatgggaataacaaaagttgcatgaattaacgagaccacatatataaagtactacagcatgtagtgactgcttggaagacactgagttgctgttgtatttggtataggcattttggccactcaacattttttcagcacctgcttcttatttcagttgtacaagagcacagagtctctatccactgtgccatagaaaattcaaagaaggagaacatatgacctgtgcttttggaaggtttacaaattacagggaaaaaagcatacacgcacgattcaagaa

SEQ ID NO: 33581 - DNA, 1041 bp, Bovine  19866880886098
  misc_feature (1)..(1): n is a, c, g, or t
ntacattcccgctagtggtatacaagtgttcccatttctcccatcctcttcagtgcttgctatttctctctctctctcttttttttgataactatctatcctaagggggctgaagtggtatcccattgtggtttcgatggggttgcaaagagtcggacacaactgagctgaactgaatgttatttatgttgagcgtgtttttacgtgctttttggtgatttgtatttctcctttggtgagatgtcaatttaagtgtttttcagactatatagaatttaattgatagcaataataatataactactactaacacccattcatttgacaattttttatttgacttcatctgtgccagagcttactctaggcatcagagatacagcacaaggaaaaatcaacaaaaattcatcctctcaaggagctgacatttaaaataaatgagtaaaaaatagaatgtattagggcttccctggtggctcagacagtaaagaatctgcctgcaatatgggagaccaaggttccatcactgggtcggaaagatcccctggagaagcgaatggcaacccattccagtattcttgcctggagaatcccatggacaaaggagcctggtgggctacagttcatgggggttgcaaagaattggacacgactgagcgtataacacacacacacacacacacacacccacccacacacacacccacatgctcccctttgctttacaccatctaagttaagaattcaagtcccaaaagaatcagattatctatagattccaaatgtatcatgaagaaatgtctaaattcctagtcagattgattcagaccatcaaagctaagctcctaaagggaaatctattcaactatctgttgggtccttttctaagatggtatctgctaaaatgctccggtaaagagcaaacttgtatgtttttctagttaagttgttttttttttttttgaacacccagtctgcctgcatgcctgtctgtctttttccttcctacctaacttccttccttgttttcttttagaagtg

SEQ ID NO: 33582 - DNA, 943 bp, Bovine  19866880918935
  misc_feature (1)..(1): n is a, c, g, or t
ntagcagcaatccagtgcagaccccaccccttatgtctctggttacttgggagtttgtaaggatgagaattccagatggctgtggcccacagaaggcacttagaccccgacaaccgggcagctcatctcaagccccgtttttctgctgcttacagggctggtcctcaggctcccatcccttcccaccttcaggtgcttgaaggtcagagcccagctctggagttaaggagcctgggctatgaactgacccttgttggcacttccctgctgaatgcactgatgcctcttgggcgctggggcctcattcatggaaagtccctattttacataggaggaagctgaaggtcagagagaataattggttaagtgatgctcaaagttgtatggtcactaaggaacaaggctagggtttcagtcccattcttatgccttcaggtccacccccagccttcgcattacccactttgaggactccagagtggttgctaacccatctttctctacaggggagcctgctgtagctgttccatgtctgcctataggccctgggattttcctccttacccctgtgactcaggccagtgctgcaggtcaggcctcaccgcggtggggtggctcgtatcaggagtcagctggctgagggaatccgagaccctgcagagctgggatgtcagtggcaccagaacctgggcctggtgctgggctgggaaggagtgcctctcttggctaactggccctggccccttcaaccagtaactagggaaggtacaaactgggaagaacttctttgttctgtggttggcggtgccaggaccaggaagagaaatgggcacccaggaggccactggcttggccaggctcacccagcgggcagtgggagggcagggcggaagcgaagacccggctttccctttcatcccactgtgacctctcagggcaggca

SEQ ID NO: 33583 - DNA, 1024 bp, Bovine  19866880938393
  misc_feature (1)..(1): n is a, c, g, or t
nctacatgaatcagacgccccagtaccctatgcagatgcagatgggcatgatggggacccagccatatgcccagcagccaatgcagaccccgccccacagtaacatgatgtacacggcccccggacaccatggctacatgaacacaggcatgtccaaacagtctctcaatgggtcctacatgagacggtaggcaacatgggctgtcacaaaacccctgggcatctctcggattgatctgcacaaataccttctaagagtacgatttcaaaaccagcaattggtgtgaatgcaaaaacatttgttggcaccatttattattaaaaaaaaaaaaaaagctgtatgcagcagaaagccttataaagttgtttttctttttatcttttttttttcctttttcttttttggtacctttgtttctgttacttttatatgaaattctctgcaaaggaaggcctctctttggactacatatggaggcagccactagctgtgactgcttccattaaacaatgtggatatcaagccccgccccaccccaaattatctgttttaatactgaacctagagcatttttttttctcccctgtccactccatgtaaatgccttgaccgttttcagttcttgtatatttcgttgaggtgacacttcagcatgccgctaatgtctttgttagtgacagtgcatttggtagtactgtacgagtgttgtgctaacagtaagccatttcttaagttttttgccttgattagggtgccctaatttgagggtttaaaaaaaaaactatatttttgttaattataaaactgtaaagagctataaaagctattcccatttggttagtcaaaagggttttattgctaaatgtttggtgtaaagttgagacccttttccattttggtgacagatttctttggggaaaaaaaggcagctttctgttttataaatgcagacttctgtttattgaatgaagcatatctcagtgtttatctgtcaggttttaaacatttcatatagtccaaata

SEQ ID NO: 33584 - DNA, 1610 bp, Bovine  19866880961474
  misc_feature (1)..(1): n is a, c, g, or t
nccttgctttgagaaactatttccaggaataatcaaaattgggatccctcgttaatcctgactccatgtcagatttttcagtggtacagcttgtgtttgattaaaggtttcccttgccagtgaagaagggctaaagctgaatttagaaatataattttgacaccatgatttgactttatgtaaaaaaaaatttttatggaatttaggattaacataagcacatgactctatacaaagtagataaccagggacctaccatatagcacaggaaactatgctctatgtcttataataatctataagggaaagaatctgaaaaaaaatgtatatatgtatattcttttatataactgaatcacggtactgtacacctaaaactaacaatattgtaaatcaagtatacttcaattaaaaaaactttatattttatatatatatatatatatatatatatatttttttttttttttttaactagggaaaaaatcaccaaatactgtaaacaagtagcaggactcagaaagatatttttgtgtgtcttctattttgggattctttataaataatcatattttataagaaataaccacatctgtattttttcactgtgctggccaaatagaacagtctgggctggaagctacttgtgacttttgatttatgatttccacttcatctgacttgcctccagggcctggctgtttcctggggctcctctacctctctgtccctctctccccacattcactggctggtggccctcctgtactctcacagcctcagcagtcactgaggactcgaatctacatgtctcatccttcctgagctttgccttctttgataaaatggaactgtaacaagagggtgaagatgcttcaaaaacaaacacttaacctggattcttttgctttctaaggtggaggatggaaggagcatcattcatttcagcaggaaacttgagtatctaagtggacccccttgagcctgcagagattggccaggtagccatgtccaggagtgagagccacagaataggcctcccgattaaccaaaaaacaccattgaaggatccttttgatggggaaaaggtgagtcctaaagcatatttcagaaagtgatggagtgaacaaaaagctaaattattctgtacaagaaagcaaggggagttctgagcctctagaacatcccccagagcgggtgtgaggggactgctgtaggctgtgggaggcagggcttgggagccaggtgaggagcatccagggcacacagccacaggattcctcagaacagggatccccatgctaaactctgtggttgcagagtcggacatggctgagtgactgaatagcaactgactatatcagtcttcccagtggctcagtgctaaagagtcctcctccaatgctggagacgtgggtttcatccatgggtcaggaagaccccctggagaaggaaatggcacctcactccagtattcttgcctgggagatgccaggggcagaggaacctggcaggctacagtctatgggatcgcaaaagagttggacatgactcagcgactaaacaaccactggctctgtcagccctctcgttgtcaccctaaacttcag

SEQ ID NO: 33585 - DNA, 1192 bp, Bovine  19866881036797
  misc_feature (1)..(1): n is a, c, g, or t
ngacatgccaagccaaagaaatagtccaacttaagggatggaggctggagataattaaagccgttcaggaaatgaatctcctgtgtgccaagcactgtcctgggtactgatgctgcagcaatgagcaggtagtcaaggtccctctggaaagcaaataaatgaatggtccatttcagatagcagtaagctgtgcagaatcactgtggtcctgctttaggtaaggtggtcagggaaggtccctgccgggagatggcattgaaactaagacaaccaggtgataggggcctgggcaagggaagagggggaaggaacgtgttttcttcaggcagaggcaacagcaagtgccaagaacagaagggagacttgcgtggctgtaatcgcgagggtggtagtggcacaagaggaaaccgaaagcgggggctgggtcacggtggaccctggaggtcatggggagagtctggattttatgctcggtatggtaggatgccacatgctacagaggcgtttaaggaaggggtgagtgttgtttactttttaaagatcggtgtggctgatgcatggagatggattgaaaggaagcaaaaaatagaagtggggatctcttttggaggtgtcacagtcatgtggtcaagggaggaaggtggttggactgaggcacagcagacttgttgatggattggaaataggggcaggaaggaagggactggtttgggcagagcataagatgtgagaggagaggagagaaaggtctggagagggagtgtgggatctgaccatggagtgcttacaagtcagaatgtgcctttgggggttaagaagagctttttgcgtttgaaagaggtttttctgtttgaggcgggtgggtcccatctgagatttgagatgacatctccctcaacagtgcaaagtccagttctgcagcttagggaagaggtgacaaggtctggaaccgtaacaataagagaccaaaaagtggcagtgtgctccagctgagggctcatctcaaggccattggtaagaggatctggacagaagtgagcatattgaatgccagcatggaccaacaccctgcacctccatgcagcagaaacacatgccaagggccccgcatctatcactggtttcctggggctttttgttggtcttgagaggagccacagtgagcttttagaaacgtgcaaacagcccatgg

SEQ ID NO: 33586 - DNA, 1875 bp, Bovine  19866881104575
  misc_feature (1)..(1): n is a, c, g, or t
ntcaatctttcccagcatcagtcttttctaatgagttggctctttgcatcaggtggccaaagtagtggagcttcaacttcagcatcagtccttctgataaatattcaggattgatttcctttaggattgactggtgtgatctccttgcagtccaagggactctcaagagtcttctcccaacaccacagttcaaaagcatcaattctttggtggtcagccttctttatggtccagttttcatatccatacgtgactaccgaaaaaccatggcttattaggaggttttccctccatccttttcccaatccctgactttggccaggatgcttcatgtctcagggctcagtgtttcttctttttctgtttctatttctaactttacttcttccgtttcttctcccttacctttattatttaaaagcacaaatgatgtcaccctacttgtgttctctgcagagtctgccgtatacatcaacaatattcagtaaatattggctacattaacacatcttcagagctttttctttcactgtccccaactttgctactgagccttctttctaccacggggctcttctgccacattctcccaagttttgcttgtagagtcaaaggccttgccatgtcttcagtttccctgccctgcttcttcagaagaaaagggagcctttttgccatttgctggtgggggactggccttttcagcaaggatggtggggtgtgggggtgagaagtggaagcagtggcctgaggagctggctgatgtgtggagacttgtcctccaccaggcttgagaggtggggaaattggggattctggtgaggattagctttgctggatcatcagcagcatcttcagcctctttccctttctaactagccaccaagttgtgcagattgattttccctttgacatgggggcttcacaagcacttctggaatgaatgaatgagctatctcttgcagaactgaagtgtgaaataagtcagtaaacatgccaaaaggaggccggaggctatggaaaccgatgtagattggctcaaaatgtcatgaaaatgaaaaagttgagggacaaggcctttctagggagaatgctggtccccctgcccctaggtgcttctgcttcagtccgcctcaccttcatctagtagcctcctgaagtgtctcctctcaggcccacttccccaaaactgctttaatcggaccttctgttgcctcaagccctcctgggtgacctgtgttctgccaaaaaaaaaaaaagaaaaaagtttcatatgccttagctcctccccttccaccttcttactgtgagagcatctactgcccacgcagactggccatccagccagagtgggatcttctccctcataccaggacaccctccttggtctcatctttgcttctgaggctctgttttgtagtatctggcttcccctcccctacctccatcggagtagatcatagtgcttgagtgtggtgggtgccccgggtccactgcttgattccacactgccacacttcctagatgtgtgacttagggcagggttcttaacctctctgaggtttcagtttcctcctgtgcaaaatggatgtaataatggtacctacctcttaagtcactgggtaaatgaaatgcaacaatgcatgtgtgtgcctggcacacagaaagtgctcaaagtggttattactgttatcccccgggttctttcttacctctgaattcctggagtactgtctaggccactcatctggcacttaattgtctacttattgatgatatcttttataagccattcatatcgtttatcttttgtatgtgtgtgttcaacttcccaattagattttaagctcctctagggctgaaccagatggcttc

SEQ ID NO: 33587 - DNA, 2580 bp, Bovine  19866881142969
  misc_feature (1)..(1): n is a, c, g, or t
nagatatatgtactgtctcttatcttttcttctcatgtatgctcttaaattctaaactcgagattctcagtcctcttttatagttacagtgtttctctagttgttctcctattactattcaaaatgtttttgtgatgtattgggattttcttcagtgtttgaggttctctaacactgaactgaactgaacgtgtccttttattttcatgcatcagaccaattgctactatatttatatgggttctcatataattttttttaatgaggaaagtattgagcagcatcaggattttattattccttactctaaaatataacatttatttaataatgagatgaaaatacaggctttatgagatataattcctgtgtcaaaaagctgtaagtgcttctactgttttgtgacaccctgaatgatgtctgctttctttgtgttaaatctaatagtaaatgatcccaaggactatcataaaatcccctgtcattagctctagaaatgccttgatgagtaacttgcttgatgggataaaagcttcagtaaactgatgtccccacctgagtgattaattccaaaatattatttgtctaacacattgttgtcaatgacaactgaataagaacttttaggagcagttggctgtccaacgatcgcaaatttcaaggctatgcaaattgtgccagttcagcccagctcttttctctattatcatatcaattgagtcagttcatagtagacaaagcaaggttatgggaaccacctagagcatcatgcaccatttaacatcaatgcagcatacaagaacatctgcaacttcaatcttattaacagtggagagaatggaaggcaataaacagctttcttcaccatttaattgcaaaatagtatttcctaatgtttgcattgtttatcaacaggaacttcatccaataattgtataattatggttgcctagattacatagggcaaccctcatgcatcttgtcatttatcacagagaggtctgaattcaatctgaatttgaacacacaattcaagactaataatgtaagtcctttgaaatgtgagttgtataatatagataatttgtgcagtaggagaatggcagtttatgatttttcagtcactttggggattaagttaacacagaaaagactgaaaggcagtgaaaaatgaggggaagccactagttagattctaacatagatccattgaacatgaaagtaggttatgttctttagaattaatcacgagtaattagatgtttgctttaggccaaaattgggctgaattaaaacagaattattatgctgaggtcttcctctcagtctctatacttaaagggagaaatggcagaaaactacaagtatactgagaaaaaaactatggtggccaaagttagaaattgtaaatgcagaggaagacttgacatatctgttcagtcttcgcctttgttgctttttgaagccatataacatcactatccctaatgagcaaaatttgagtgtttgtagcaagcaaccaagtgcattcttcaagctctgcggaagcagggagtttcttttggcacacactgcaaaatagccaagaaaaatgagaggaaataatataagtccggtaacagttattggtgtggtcagtgggagttgtctcataataaaacacgagcaggaaaatgtgaaaaataagaggtacatttgaagtaagtcaggcaagggactggtctgaaaagtttatatcttttaaacaagaaaatctcatatttttacttagatttattttgtatatgaggaaaaccagaagcctattcatgaaattaggtctgaaacatttcaatatttagaatattttctccccctgataagtctgtatttatacctttaatattcttcattcatcttctatcacttctttttaaagattgcaagaggaagaaaaaaaaattgctatagtgaagtatccacagagtagaagaatatatagagtttttgtcccattttttggttggtctgggtatagtgaacataactgaagctttcttaacatgacagttgacctatcatttcctccacctgagggattccaagaacggatgtgctggaggtaatgctttgacctgtaattacataacattatgcctagaaacttttttttttttttaaagttttaagtagttacaacctctgctataaactttgaaaaagttctagctctgaagaatgagagtggagattttatacgcatgcatatatatatagatatacatgcatatccatatatatatgtctctcacttaaaatacctcagggaaaacatctgtctatgctggggctttgtgtaaatatgtagtgccaattcatgacacttgcacacctttcctttaaagaacttatatgcaaacattattcaggaaccttttctaggggctatttatcaaaactgctatgataataactctatcataatgagtcctggtctctgtttagggagtaatcgataaactaaaaattaatgttccataattcacattacaatgcacatgtgattatttgagatgaggcaaaccctgtgcatttatttca

SEQ ID NO: 33588 - DNA, 831 bp, Bovine  19866881148141
  misc_feature (1)..(1): n is a, c, g, or t
ncaaaagcattgccaagtttataccctataacacagtagtatttgcttgcctgttcttgccagtaagaaacaggctatgacagagataatggctaccattcaatatccactttcccttcttcagtagtaacagttctaaaatcaattagaagaggtgatgaattcaactataacactgcatttctcatcattccttgcagctaggagtggctaagagactaagttttgtacagtaagatggaaagtggaagtctagaagatttctgggaaggctacttatcaatgaaagagacaacagcttggaggaagtcttctttacctttctttcttccagcctacaactcagacatgacagttaaagctctggcagtcaccatgactacaaagtgtccttgaggatgcaagccaagtgttaggacaagagagcagaaagccagaagaatcatggatttttgataactccataaaattattaaacacctgacgtgaagtacctattttcagacttctcttacgacagagaataaatcattgcttgtttattaaactatagccaccataaagttcctgttattagtagccaaatctaatcccaacccccacacataaaacttaaaagagcaatccattttgaggaagagtttgagcaatggtcactttttttaaaaggcatttaacacatcagatcagatcagtcgctcagtcgcgtccgactctttgtgaccccatgaatcgcagcatgccaggcctccctttccatcaccaactcccggagttcactcagactcacgttcatgagtcaggatgtcatccagccatctcatcctctgt

SEQ ID NO: 33589 - DNA, 949 bp, Bovine  19866881152146
  misc_feature (1)..(1): n is a, c, g, or t
ngccttgatggcagatggcaagttacccccgagaggtgataccaatctatgctaccaggaatatttgaatatccattgtcccaaactcttcctttaactctttttttgcttgcttgttttttccttttgaggtttcatattttacttctctgatcaatacagagaatcctctgccgtcaccagtgctggttccttcatcaaggaaaagagaacttggtaatagcttgttgcagctttcattttgcttctccctggactgggaaaggacagtgttctctctggtggcccgtttctctctcccatgggccctgagtaggttgcccgctgagcttgtgaacacagtgggcagagcagagttcccacggcacacaaacacacctatgtcaatatgacaatgaacttgagagggcttaattggtctatggaaacaggaagcttacattttaaaaattattggcagttgcatcttacttagcatcactctggtaaatgtactagatgggagaattgcttaggagatgtcttaggtgagagcttgctgcttctctgactttgtcaaggatgacagtgatgactggggagttgggcagctccagtaaaatcgtgggctctgttcttcccaccaggcagagaggtggccactgggtgcactggcagatctttgaggatgaacataccaccacatcgatgcctgtttactaacagcggggcagaactgggcctattagcttgcttcccagttgggagaatgggcagtgtaatgaaaagaaccaaggcttcgtggtcagaccatcctgtcttgaaatcttatgactgtcactagttgtttaactgcccttgggctagttagaaaaatattgaatgtgtaactgtgtaaagtggcggtttagtcactcagtcatgtctgagtctttgcgacctatggactgtagccgcctggctcctctgt

SEQ ID NO: 33590 - DNA, 1705 bp, Bovine  19866881178611
  misc_feature (1)..(1): n is a, c, g, or t
ntgaacttgcccaacaaggtagggttggatttggctgtgagagacagaaaaatctaaaagagaagttaatctctgttttgtgtagatgcaacttagaggtggcaaggaggttccagggtcaactgggactcaggcttctcctccgccgtgctgtcttcctcatcttgtggtgtcttctcactgaacaggatgactgcctgaactccagccatcacaccttccatccagttttcaggaaaaaggaagggacaaaatgtaacctccttcctttaaggaaacttcttcaaagtttcataggctattgtactcggatccttctgatcaacacttagtcacatggccacacttgagcctggaaatagtctatattccagaggataatatgtttattgagaaatcagttctatcattaaacttaaaagagagactggatattgactcagcaccatcactgtgttgtttacagataaagaaactaaaactcaatgagatgaatgacctgctggaggtaacacagccaggaagaggtggagcttggatcttctgtccctgggccctttggagcaggtagggctctgaagatacactctgccggtttcctaggtggtgaggagaactatgggtatgtacatgattcccttcccaggccccaggaacacccagcgcccaggtcctgccagccaagcagctttgtgcctgcaagccctggcagcctctctgggtgcagatccatcaccccggcaccaaccatgccctgggcctgactccatccatccctctaatactgcatcgactgtgctcgggcacgttcctcaggcagcctcaagagcgctgaataattcaggtctgtgtaatgggataatgaattcactgacaactcagtgtggtcttggtacttacatttcaagaaatactgactccccaggcccgctctgcaggctggagacgtacacacgccaagaaactgttgcctttacctgcctcgtggggttcaggcctgattgagtggatgccctactttggtctcactcactgttcaactgcttgggcgagtggggaatctggggggcagggggcctgtctggttggaactgtggggcgaggtggaagtggaatcacagaagctcagacatgcagagccggaaaggaccctttggttctgcacacccatcttatgaaccgggaaaatgaggttatgacagggacaggcctctgctcctgcacgctgcgctctgtggctgggaacgccgggaatggatcaggaatctggggaggagatctgctttttttccttcctaactctctggtttcctcgtccctcagctgtagagagttgttgttaatgactcccagctgccccttctgtggagatgggacctcagcctaacaagagccgtttctggaaggcccggcctctctgcacgacctggacagactgtggccatgaccggctgatgtggtgccaaaggccaccccgagcctcaaggtaggatgaacgctgatgcttttaagggtccagaacccttggagggccgggctgtggctcagccccagctgagaccctgttctggcctagcttttactgctcccctgtccggcttccctcactcccctgttcctcagagcctcttcccgtccccaccaactcccaccctacatgccccccattgctataaatcatctgaatgggaatgccagactcagg

SEQ ID NO: 33591 - DNA, 1275 bp, Bovine  19866881198856
  misc_feature (1)..(1): n is a, c, g, or t
ncttaatttcacatttgtctccacccaaaaagttgtcgcttgaatcttattttccttaaatttagtacaattttaaattgctttcctgggaaattaagcgcacatcattattggggtgctttccttcacctacccagagttcttacaccaagtatagtactcagggaattaccaccaatctccaccctctatcctctgtccacattggctctgctgagatccctagccgttagctatggaagttcagcggctctgctgcttcctctgcatgaaagttttagctaaggttggtagctttagtagcttatatttaattttctctgttggatatttcctgttgacccttcaagattgactttttactctttcccttccctattttgtgcccaaggatccttagaaaattgctgagtattggtagcatggagagaaaaggtccttgtgaggccctgaattttttaaaatatggttttaaatccctgggagccccaagatcaggtgaaagtagaggagttcaaaaagaagagggggcaggttagagcctggaaagtcaaatgatgggtcttagaatatagcctaactccaggaacattactgtatcctttctatgggcttgttgagttctatactattcccagctaactgaaggagagagttaaatattttaacaattcaagattgctgattatgagactggcgatttttaaacaagtgatcatatcaacaataaagcataaatcttgtcttaataaggcaccacttgtaattctatttttcagattaatgaatatgattaaaaataagataaaaactttagaaaatggttaactaaaatccaaattggatgtgaaataaaggccaaattgttattttcagtcatgtggtgcatatttccatatgttctaaaaatccttaagaacttggcataaagttctgctaaaataatttctgcttcttaaatgacaggtgtcccatcttttattgtagtgttaactcagaatccatacagtatgaaaatgcatagtacaaaagataaatttgtaagcatttgcctcagtgtactacagtgtacattcacttgcagcctatttctacatccttactctccttcacctggcctccttatgtctttactttcaccttcttttcattttaaccaccatcacttctctatcagatggttcttgtttctacttctgaatacatttaaatgccattcatgcagtcataaattcttattaaatttatgtttaaacctaggggattcagcagtca

SEQ ID NO: 33592 - DNA, 1197 bp, Bovine  19866881291072
  misc_feature (1)..(1): n is a, c, g, or t
ncctgggactcctctctgggacagtcccctcccctgggacaagagggtcaagctgctcttggagacatgacctcagagatgtgcagcaagggcccaggcccaatctatcaccacggggctataattaggtttgttaacatacagtcgagtgtagtcttgttgactaggaacttaatcacgttactattgagttcctgtacgcattgctccgggtgactgttttacttgtagagttatagccaagcccaacgggaggaaattagctttggacacaagtttggaggggggttctttttcctcctgactttgtctccctctccccacttccatgtgaaaatatttagcaaacagtgacaatgatgaaaaacagtaggaaacaaaatgttctacattagtataaaacatgaaaaatgcagcaaggacccttagcggtacaacatgtgttatgctggctggcagtccattagctctgatagacatttcacttacctaagtcaaatataacagtctagtattcattaatataagaaggggctgtggaatcagagctaccatctggctgggccgacagaataatctacaactcatgattaggtctaaggagtggggtttcactttaatctttctcattgctcgaaatttccatctgcgcagttcggcacatcatttttcttcaagacaaatgtgctgtttttcatgttccaaaattagatcagaagaaaacgattaatcatgtcacggcctgggaaaggaaacaaagctccgatattcagctctccccctcacccctccccacccgccgctccccgggcccccggacggttgcaagtttccctttttttcccccaacctctgggttttcagcacaacttttggagacccaccgctagcggagagaagggtgggactgaagggagagggcgccgccggctggacttgaccggagagcaggaggcgagcggggcgggacctgggcccctagtcggggtgctcctcggcccccttcctgtgaccgccaggggagggggcgttgtgcgggtctgcacctatggccccgggagccgcagagcccgggcgctgggcgctgccatggacccagagtgacaaaaagggctgcgcggctgcctcccccctctgtcccctcccacggccgccacagccctgtctgtcagccggctcgcaagtcataacaaatcc

SEQ ID NO: 33593 - DNA, 1073 bp, Bovine  19866881413267
  misc_feature (1)..(1): n is a, c, g, or t
ncctttgacattttctttctcttcacatttgacagcttccaagttctgccaagtacattttataagcacaatgcctatacagtcttgtcattcttacccacagaaacctaggtcaggcctgtattatctcttgcctagattactgctatagtctcttaaatgtgtatttgaatgcatccttaaacccaatcattagatccaccttcctaaatatcaactctaattagcctttgttcaaaaagctacctactgcctcctgataaagtactgataaaagttccaaagcctgactttcaaaggtcctccataaagtgtccctactttttctttctagcctgatcttttactattcccttgtacatgtaccagatgccactcaaactagaatacttgttactctctgaacatgcctcaggcttttttgccttcatgctactttgcacatgtaggcactaaatgaattagaatacccttcaaccacccttgtcaaaatcctaccaatccctccagggttagttcaaccatcttcttaatggaagccttcttgaattgttcatggtctttccttcccatctccagaagtggctttctgcactgcagaaaagttttgctaaaattgtaaaggtttctttttttggcagttatgtacagactggaaatagttatttgtatagacagcttatctatcttactagattataaattcttggcacagaaacttctttactttatctcctcaaaacatctagtatattgctctgcccagaacagataataaatctttgttgatttaccaaatgataaggacagagcactcacctacattaagcaaagaagaactacctctacattaaatcaatgacttgatttgttgtgcttcatacttctgttttagagatcttggtgctctgtatgtttctctgttatttcttacactgctttacaatttatttacctggtgtattttctctcctagcttatgagtttcttaagaactaatttttatatcgtatcttagaattatgcctcacacagagtatgaattaaataaatgagagctggaatgagttaag

SEQ ID NO: 33594 - DNA, 1262 bp, Bovine  19866881549477
  misc_feature (1)..(1): n is a, c, g, or t
nctctttattttaaagtttgtaaccttagtcacatctgcaatgcccttttaccattttatataatatactcatatgttctagggattagggcgtaggcatctttgtgggattcttatgtttatcaaagttttttttttcatctctttattttctacacaggatattttggaatcatcatgtcccttgaagaagaagacaattccatccttttggaaaaaataaaactactgcccacatcatgccccaaactcgcaatagacatcatgctttcagcttattatcataaagctgtttgattctggcatcaggctcatttggtggatttaatatttgagatcaccaaatattgacacaccattaagtggcacttgattagaaagctcgctgctgtctaaatttttccaaggccgtgatctgcaagatgcagaggaaactctgatgtagatggtgggcagagttggggatggcattcttagtgatgacaggaaaatccttaaaggcacaaattatccaagacatgaatgtaatttatatatgcaagctgattttagataatttaattattgcttagcaaatgtaaatggagtatttaaaatctttcacacatatttaaaaaaaaatcctgcagtcaaaaaattccctctaatatatttttattacctatagcatttgttctgcgttaacaattgagtaaatattcatggaaaacttcatatgtaggggtagtcatataatgagcaccactatgctctcctatctacctttggcccatactttgcaccaagctgtgtttctctgaaacagcactgtccaacagaaatagaatgccagccacatatgtaatttttcacagctttttttgagacataatttacataccataaagttcacatgttaaagcagatgatttaatgtttttcagtatatttatagagttgtgcaatcatcacataatctaattttagaactttttcatcatgtccaacagaaaagttgtacccataagcagtcacttcccattctcccctacacagaggcctagtccactgttaatctactttcagtctccagagaatttcctattcttgactttccatacagatgggatcatatagtatgtggtgctctgtgatggctcttgcacttagtataatatttttaaggttcattaatattgtagcatccatcagtacttaatccctttttatggctgaataatattccagtgtgttattatagcatattgtttatccatgatcag

SEQ ID NO: 33595 - DNA, 1112 bp, Bovine  19866881622124
  misc_feature (1)..(1): n is a, c, g, or t
ncccatgacatcccctgctttaattagtttagtttattgaactcaaatgaaaattttctttgataatagagaatcttatagcacatgttaatgttattattctgaacatcaatccttattgtagttccaaacgtataagtgctttcatgaaaggcagaataaatggaatgatggcaagtacactgcattaggactcaaagggtccactgtttgagtctggttttggctcagctactttactcaacaaatacttattaagagcttatcatctgtcaggacctttgttagagagggagaatacagatgtgaataggacaaataaaatccgtgctctcacaggatctacattctagtcaggatagataatatataaataacacaaaaatgaagaagataatttgaaataacaataaattacattaaggaaacaaacaggatgaaaagtatgactggggaagagagttaatttagatgggtgctactttctcactgaggaggtgatgtttgaattgagactacagtagcaagaagtagccacatcaggggtagaatactcaatatagaggacctgggctataaaaagcttggttaccctccatgtgtggtattttgttatatcagctcaaatggactgaaatatacatattaaatgataattatcatattaaatattatattaaatatcacatacacattaaaatatgataaatgtagaagttgtcattttacactgggagaagaaagtttgttcaacaaattgtgatgcaactatttagtaacattctggaaaaaatacaaacttgtagaattatttttctatatcccatagttcatatataagttccctacctgaagtgtgctttatctacctttggattggagaagcccacttatccttaaattttaaatttcaagaccccccccccccccaccttccccttctctctcttgctgagcaactcatccttataattaggtgagattgatcaagacaggcatccatgacaagggggcttggagccatagtgggccaaagtgatattagaggtgaagtagagatgaagaggcggtgatcaagaccatttccaagagaaagaaatgtaaaaacaaaa

SEQ ID NO: 33596 - DNA, 744 bp, Bovine  19866881728204
  misc_feature (1)..(1): n is a, c, g, or t
nggtgttgtttgccgtgtctggcagtgactgcttgctgcttttaagccttttccgccaatttgaacccttcagcatggttgacttaactcccatctcaaaaagcttccagtttactgtaagggtggtccaaacatatacatggcttatcaagttggtgttcttagtaaatttggagacttggtcttcatctctctgaaataggagcaagttgtgctttgtttagttctcctgggatacagtaatgttgtttagtctttcagttatttccaacacttctgcgaccccatggattgtagcctgacaggctcctcagatttcccaggcaagaatactggagtgggttgccatttccttctcctcgacccagggattaaacccatttctcctgcttggcaggcggattctttaccgctgagccacccgggacgctctgtgatgtgaagatcatggaataaaacaagctaatggcagttttgtccgacatgctgtgagtggttgaatgcttcatggtggtaactctccttaatgtttgtttgctctgaagtggaattctacagaaaataaaagggaaccaatattcctctttctgcaggctctaatgctcttctgggacctttgacatggcatcatgaggtagttctagatctttcaactaggaagactcattttgaggccaaaacatgatgatagctatctggcatttgttgatcaagaatatccacattgtcatgtgcatatttaag

SEQ ID NO: 33597 - DNA, 1531 bp, Bovine  19866881742111
  misc_feature (1)..(1): n is a, c, g, or t
nttttggctatgaaaactttctatgcttccttatgtggaggaaaagtaaaaagctgccatttctgcattcttctagccaacacaaactattgccacaaatacttataattacctgaaaaaggcaaatactcagctacataagtactttttacaccatcaaaaatattcagccaacaagaaacatgctcattaaatgtttatattttgattactacaaagcaaacctagtttttggaaaccttacatcagtgtttccaaacaaagcttttaacagtataaagccacaacagctttccagtcttagtctttttacctacaatatagcatcaccaccccaaaggacagggaattatgatttattcacttcaactcatggagtttacacacattgatgtatataattttatatcacttattacatatatatagctccatttaaaatgatttttctatattttaatacatatagacagccagatggcttcatcctacatactacatacatatcttttccccaaggtattctctgactaaattacttcaaccctgaatatccaacaagtacatgctatgaactctgcaacaattacaatgtaaaaagtatgagaggctcatctcatacaaaataaggccagattccttctgtcattttatttctatttcactttctcatttttctaacagcttaccaccagtgggttccaagtcactcccatccttttagccttgttcttcagtagagtttcatttcatacactgctcaaaatgatctctctcatatttttttttttttctgtcttgtatcacctccaatctggctaacaatctgttctttatatcctcaatttaactaacaaacaggctttgatgccggtgtttcagctgctagaaaatatgagttgtcgtacaagaaagctccctagaagtctttgaacctgctgtggcaatgccctaaaagcatgacacattgccctgctgtacttcatcaggtcagggcatgccctttaattctctactgctacatacagttagaggcccatatttagttaacactatgaacacctgcactaaagaggtatattagaagatgataaaaggcttcaggacaacatagtatttttgttgtaccacaggacctacagggaacaggaaacttttaatgaagaatatgacagctatagatttcatacaaatatacagaatgaagaaattagtaaacatttcagaatactttcagctttaatcaataattaatatgaatcaactatcagttaaagggacttctgtttctgaccaagatgcagtaagagaaaccagatttacttttccacctgaaacagccaaaatatagacaaaatatatggagagaaaaccagtttcaaaacagtgggcacaagacagcaaggagacccttgagaggaggaaacaaggtgagccccactgcccctgccatgagtgagcggtgtaggatataatctgggtgaggcccagcagactacggagggcgaggaagtaaagtctaggggaatca

SEQ ID NO: 33598 - DNA, 745 bp, Bovine  19866881896476
  misc_feature (1)..(1): n is a, c, g, or t
nagtttcagagccaacaaagcatgtcaactgtaatgccgtctttacttggctgtgacagtttgcatttgtgaaatgtttaatctgaattaccctgtactgctgtagaggaaattgttagtaacatcaaaagtcagactgttgctacaagtgaccagtgagaaaggaaagaggttgagggatttttccttctcttttaatagctttgaatgactgaaattactatggaaataggttttggtgcccctctcacttattcctcacccccagcaaagaccaccaacttcaagtaactaaaatgtggcctattattttgcattaagttgaattaaaacatctgtgcaatctataagccataattcagcttcccccaaagttaattttttagactatggttctaccttatattagccaaggactttttctctgtgtactccatgtttatgcataaagaagttttgtacctaatatggaaggagagggagtactatgttaattttgctgttatttcagctctgtttcaatctgaactactaggttgtctgaactagtgaagcattgttaccagttagtaataccatctttaaaaggttcaattttaataattttttattcaaagaatctatgacttgttaggacaattgaagtatttctgatatgaaacaaaagaagtggagactggtacttaatgggggaagcaaaattagcttgggctaagatgggcatgttttgttctatgaattctac

SEQ ID NO: 33599 - DNA, 1447 bp, Bovine  19866880362266
  misc_feature (1)..(1): n is a, c, g, or t
natgacaccacccttatggcagaaagtgaagaactaaagagcctcttgatgaaagtgaaagaggagagtgaaaaagttggcttaaagctcaacatgcagaaaactaagatcacggcatccagtcccatcacttcatgggaaatagatggggaaacagtggaaacagcgtcagactttatttctttgggctccaaaaccactgcagatgatgactgcatccatgaaaataaaagacacttactccttggaaggcaagttatgaccaacctagatagcatattaaaaagcagagacattactttgtcaacaaaggtccgtctagtcaaggctatggtttttccagtggacatgtatggatgtaagacttggactataaagaaagctgagcaccgaaaaatggatgcttttgaactgtggtattggagaagactcttgagagtcccttggactgcaggagatccaaccagtccatcctataggagatcagatcagtcctgggtgttgattggtaggactgatattgaagctgaaactccaatactttggccacctgatgcaaagagctgactcatttgaaaagaccctgatgctgggaaagattgaggacaggaggagaaggggacaacagaggatgagatggttggatggcatcactgactcaatagacatgggtttaggtggactccaggagttggtgatggacagagaggcctggcgtgctgcgattcatggggtcgcaaagagtcggacaccactgagcgactgaacctgactgactgactgactgactgactgactagaacctcctgaatgttttaaaaatacttttgatgtgaaagaaagcagttacaaaggacaacattttgtgtgactccatttatatgaaatgtccagagtaggaaaatctactatgatagaaagtaaattagttactgcctacagagtaaggaaatgaaatggaggggataaaattgactgctaatgagtatgtatttcttttcaggatgacaaaactgttccaaaattagattgtagtgctagttatataactctgtgaatagacaaataatcagtgaattgtataccataaatgagtgaattttattgtacatgaattatatctcagtaaagatgtttaaagaaagactgaatcagagctaaaatttccaattatattactacacatttatgtttccattaatgtgagaaataattgctactatgtggtttgttgttcctttacaccttgatttgatgctaccattaattgaaatgaattctacaatgtataatactgtcaaatatataattgctatttctaaacctccatttgttcctaaaatgtaaataaatttgtcctaagatttattaaatgattaaggatggttatatgaaataataatgagtattttgctttactttttcaatgtaatatttaagtacaaaa

SEQ ID NO: 33600 - DNA, 3843 bp, Bovine  19866880706642
  misc_feature (1)..(1): n is a, c, g, or t
ngtgtttgttgagaattgaagggtcaaaaccaacttgctagaaagataatcactcctacttcacctcagttttgcacaatattcatcctctgtatttctttttaactttcattttgtttcaagtttgaaaggccaaaaaaatgtgccagcagtgttcaatgcagagagaaccatagccagagcatcagccaagctgagacagatgtaatggattgtggccctgaggaagcaaaatcattcagggtgcagagaatctgcagagtgcaaagccaggatcttcaactggatacaagttgtgagaaatgagaaaacagtaacaaacactagaaaagaaaaagaaaaaacaaaacaaaacaccttttacagcatttctgtggtaacttcagtcttaattcatattaaacagtgaatggtatatctttaacaggaaccgactgcaaacagtattgtctgttgacatttattcctaagaatcgttcctaactgaaattcttgaagaatctttcttttcatgcaggttataaaatttgatctcctgacgggttttgtttctggttagcttcagaaagttaatttggagaacattaaatggtagaggaacttagacaactactcattaagttttattttctgtctctttctcctaaagcataatggatgataagatatattcaagatgatgtttactaatttacattttcccttttctattcttttgcctttaacagttatatttcttgttgtggttaattctatgaatagaatttatgtcctatgtcttaaagttatagtttctaaaactattttaattttatttttaagtaaattactctatctcttgaatagatacattttctgcaaactagcccaaaaaagtacagtattatttaaggtaatgttccagcatttttctttataagatagtaaactcaacttatttttaagacccttaatgaaaaatgctattaaattcctatgttaaaagaaaaaattggctttaattctgtatttttatcaagtaagaggaatgaaagagaacattatgtgggtaagaaaagtcagttaatgaatgtatgtaaaaatacaaacaaccaaacacacaaatagaatatttgataactagatataaagattaatatgaaatatatatatatgaagttaaacaaggaaaaagttttgaaagaaaaagaaaagaaggaaagaaaaaaagccttcatacaattgtaaatagtcttcatcatggtcaaatttcagcacattcctcacttgaaactgtgctattaatacttgactcaggataattttatctcttcttaatattttgaatgtgcttggaagtgaatgtgttagttgctcagccatgtctgactctttgctcctccatggcctatacctgtgaggttcctctgtccttggaattctccaggcaggaatactggagtgggttgccatgcccttctccagggtatcttgctgatgcagggattgaacacaagtcttttgcattgtaggcaggttctttaccatctgagccaccagacctgccttggctaacataaaatcgttcactttgcgtttcaaaatagcatttctctctttgttaatttcggtgctgccaccagtcttgtcacatgagttttgcggtttctctgaccactctatgtaacttctggataatattatcttggttgttcatgaaaataaatccaggagcaattctgaaactgacatctgcagctcttgaaactgaatctggccctctgtaacctgacatcaaattaatatttgggagacagttctggggtgaagtagaaaagaggaatatttttagaaaaagggagccagagcaggctaaaggcctcaaggctctatgtccaaacctgaagtggattgtgaggttttataatttcttgatattcttctgactggttgatggtgaggtaattgggagtcagtgtcatcaatcttctggttctagctaatctggggtctacagtacttatgggtatctacatgtgggcagtataccattaggttcttcctcctgatggaggcttcattatctgcaaacactcaaagatattttgtatattccttgatgggaccctctgccagaggctgcactattgtttctcttaactattcatcccttgtctacaacccctcccttctctaattagcaagtgtttaaacctgatctttggaattcagggaaggtcaaggaggttcaatgaagtctatttcctgtaattaagaaactagggacacaggaaggcttttgtgcccaggagctctacagggttcatgtatggtgttactctcacatcataagagcagtccttagaagacatcatcatctgcaagtcacttagtgctcattttagctcctgcacacacagtctcatgttcctgatttaaattcagacacttacctttccttccctgaaatctcatgtcatgacttacctgaatctcttatggggttggtggtgatgacatgtcagagagccttaaccaaagagatcaacaggagacccagactagcaatttcaatccttgcaatagcaagcaaaaatttgcaaactactgcttcagatttaagcacaaagcaaagttttttaaagcgtagatggctggacagcaccaccaatgcaatgaacatgaacttgggcaaattcagaaatggtgagggacagggaggcctggcatgctgcagtccatggggtcacaaagagtcagacatgactgagtgactgaagaacaatagtactctcaaagggagagtgggctatttctgtgaggttaaaccagcccccccccccatacaggtacaggcttaaggatgtttataaggagttattctgtgagaagtcaggggtgatcatgtgtgacaggcgattgctatttgactgactgtcttgaggccataaaaagttattattgtgcatgccctcacctttcatttgttaagaaatgcccatggtggtggtggagggaaccaggtgcagattttataatactgttgttattatgagtttgggttttttagaggtgttagaggtttgttagacagactatatatctgtctagtctgggcatgagctacttagtacaaaattcagacttaaattgaagaagatagagaaaatcagtaggccattcagatataactgctaggtagttagaataggagaaaggactccaaaatggaggtggctaaaagacaaaaaaagggaaaaagcccatgaaaatggaacaaaagaatatcagtggacttgagtgagaacttcaagtgaaacaaatgcacccccttcttggctagcccaatttgcctagggcagactcagaggaaggagataaaacataaaaagaggctgctgactcctttggggtcagccccaccctcatgcctcaagggtgtactttcctttgcttgcctaataaaactctgagttatatcactggtgtgccttttcaaatctttgctgtggtgagacagaacctaggaaattacatactccctagacataacctaaatcaaatcccttataattatatagtagaagtcacaaataaattccaagggataagatctgataaagagtgtgtctgaagaactatggacaggggttcgtgacattgtacaagaggcagtaaccaaaaccatccccaagaacaagaaatgcaagaaggcaaagtggttgtctgaggagggctaacaaatagctgagaaaagaagtgaaaggcaaaggaggaaaggaaagatatacccaactgaatgcagagtttcaaagaagagcaaagagagttacgaaagccttttaaaagtgaacaatgccaaga

SEQ ID NO: 33601 - DNA, 1762 bp, Bovine  19866880707602
  misc_feature (1)..(1): n is a, c, g, or t
nctgagttttgtatataaactgttcgatgatttcaatctctggagaccttcaataatggcataggaataataaaaacatttttcaatattacaatgtgaacgcaatcaatggcactggaagcagatgttccaaattgtctttgaagcacagtgatgggaaattctctggggaaggacatttatttatccaatggaaaactttatacaaaacatttatactgtttagccagacaaaacataacatttgttaaaactttgccagagaatgtaattaaatgccaagttatttctttcattcaagagattacataatttacttcaagtagatataatcttctaaattctcagagcttaaagctctcaaataaatcacatgaacctactgggtgatagcatacattgctatgcatgccttctaatttgcttaagtcatgtctgactctttgttaccctatgaactatagcccaccaggctccgccatccatggtattctccaggtgagaatactggagtgggttgccatgccctcctccagggggatcgtcccaacccagggattgaatccaagtgccttatgtctcctgcattggcagacagttcctttaccaatagtgccacctagaaggaacctcatacattgcaatgaaaagccttaaatcagtcacacatacccagtgggtgataatacacaatattttgctatgaaaagagcaaatttaggtaagctacagtctgaaaaacatgaggtcagattgaggttttctcctaaataactgtgtgaacttaaactacttacttaactctttgaatttctgttttttcctctaaaaagagaacaaactacattccttgaaggatttttaaaaggagaagaaggaatatttcatatatagttgatagtttatgcatgatagttactcaggaatcttgaaaacactagcagtacagaaaaggtattgaatatactcattagaattatctaaattttatctgtttcctgtatgatctctaattcctccaagatcagctatttatttttgtatttatgtaattcatgatatatataacttctaaaatcaatctcatttggcaaaatagtttaatctacatcaaaatactgggcccttgacaaaaacccataaagagttgcagaaaattattttttaatgaagataaaaacagttctctgataacacatacagttattttaaagacatgattaaggaggaaatttcacaagaaaccttaaatatgggcatttattatttaaatgatttaccaagtgttttatctttgatcttcagtcttacagaaccaaacacacaatttgtctacactgagaattctttcctaaggagaaagcttacattaaccaagcttgtaaggaattttaagaaatccggtattgtgttagaatgttgaaatattaactgacagtaagaataactgctacaggacttaaaaaattatttgaaattcatatgaatggggcaacaggtctttaaaagtatatactaatacaaagagaatcatcattagccagttaagtcatttacgacaagcaactagtctcagtgacacccgaagacttcaatgtctccatcagtctcactttagaggtaattttggacataggtcctgaacactcaaatactcacatcattaagtttctgtcccccaaaggagaattattacatgggcatcaacaaatttgtatgcatacttctacccgtatgtttttaagattgcaaactctatttt

SEQ ID NO: 33602 - DNA, 2681 bp, Bovine  19866880711082
  misc_feature (1)..(1): n is a, c, g, or t
nagaaggaaagtgaatagagaagagatggaaacaatcttgtgtgcatatgtgctaatttgcttcagtcatgtccacctctttgtgaccgtatggatcattgctctccaggctcctctgtccatgggattctccaggcaagaatactagagtgagttgccatgctctcctccaggagatcttcctgacccagggattgaacacgtgtctcttatgtctcctgcattggcagtcttgtcctttaccactagtgccccctgggaagcacaagattaaatgttggagcttacttagcaaatatattgagtacaattatgagaacatcataaagattggggaaacataaatagtgaatgaaataaattattttttcatatttatggactgaagcattagtgctcctttatatttactaaaaattcaaaataaatatgaattttgttgttttgtacaaaatattaccaccccactgacatcctatagtttatgtatgaatagatgaacaaaaaaatgtctgtatagttttaagtaaaatggcattaatttataccatcaatgacaaactgtggccttggaaggtgacatattatctaagcccttaccagtggtaacacatgtaaactccaggaaaaaaaagtatatatatacatcaatatatgtagaatatatttgaaattttgtatataagtgtgtacatatgcattaacaactttactaagatataattgacatacatgtgcatgaccacattcaatttcaggacattttcatcaccctcaaataaaccctctagtactcacctccccaactcctgccaaccttagacaaccactaatctgttttccatctctaaatttttaattaagatatattctaaggtttttcccctcaatgtgaatattgtcttcatggggggaaaatagtttcaacagaattaaaatgatttaaattatatctataaaatagattaggcagaaagggagacatagggaaaacctggcaattagcatctcagtatgctgtccattatactaataagtacaccattcagaaacctaaataaaggagaaaattgctttctgtaaattggaccactgtaagcacacacagacatgcagttaatacaaagatggaaggatgtattcattaggcatttttgtgctataaaataaggtctatttttactcagagacattaatggaaaactgtttgatgcaactttttgtacacaaaagaaatattagaacttgtgaaaaatgacagtttttcatttttccatattttaaaatatataacaactgaattttaagtgattaccttatcaaattattacacaaaacagcataatacaataataatatacttttttcatggatataagtcattcttcttcataaatgtctatgtttcactcctaaacgttatcttgagtgattatctaccttggcatagatacttgtcctcatctagctgctaagctcagtcaacatatttgctctgctaagaaaatggaaataaacacatatcattatggtccacctctctgtcgatgatcatgctataaattcattttcatcctctcccagtcatccaagctaaaacctagaatggtctgtggcaggcattactactctttacctctttttagcaaaaaaaaaaatatataattttgctcacagttcttggttaaagcaaattacctggacagatctcactttaaaacacacgctgtttgtctttgccagacaatgtcttagtgtcagtatttgattttttacgttcctttttcttgcatcattgcatttccttaaaattttaaaagaaagttgtcaatactttacaccaccaccccctgtcaaatacactgaagtttgattgacattgcactgaatcaaaagacttatttgaagagaaatgacaattgtaacaaagtttagaaggccaacccaggaacatgtcatattctttcatttctctagatattttataatgatttatccatttctgtgtagaggttttatataacttttagctgatttatttataagtgtttctgttgttattgaacttttacatgtaaaaatgtgcacaagtgcatgctcagttgctcagtttctcagttgtgtccgctctttgcatctcaatggactgtagactgtcaggctcttctgtccatggaatttttcaggcagcaacactggagtgggttgtcatttccaaaaaaaagcattttctaaatctctcttgctgatatatagaaacaaaattgatttttgttgattgaagttgttttgagcaatcttgctaaattcctgaataattcaaatagtaggactgcatatttatagatttgcttcatgtatagtcattagatcttcaaatactcctttttcatgtttttacctattttttttcctcaattaattttggcctgaaaataatgggaaatggtatttctcctatgaattaggcctccagcttaaacaagagatggcacaagcagtgagaagagatttggtctgaaacttatagttcagctatagctcaggacagctatatgatactagggaagtcatttcagctttatacttactttcttcatccataaaataatgttagttaaagagatttctcaattataacattacaaattttgatctataactctttgtcagaagatttt

SEQ ID NO: 33603 - DNA, 963 bp, Bovine  19866880897161
  misc_feature (1)..(1): n is a, c, g, or t
ngaagaagcaacgatctcatgtgcagtattccccagagcatgtcttacttttctatcactttggtcttcgttgcactgatggggcagcttcacacagttctttgctttatgaaaagtgcagagggtaattgggtgcaaggaaatgaaagaattcatttcaaggctatgctcaaactacttagcattgaattccaccaatgagaaatctgctagttgaaaacaaacttgcactcggcaaaatggatgagttctttgtggtccatgatagaattcaatattggcactggaatttcatgaaaaaaacaaaaacaaaaacaaaaaaaactttatatttcaggcaagtcaggggaactgttctatttagcctaaacaatatacagtaaaattataacagccagaatcaaaacataagtatatgtcaacttgtcaataattaatatgtaataactacatgtggatcatcttttatgtgtatgaattggctatgagagattatgtatctttcctcttagataatgaacagaagcacaatgcaaaaaaaacagcaattcctgtttagataattgctttcctatcacaaatatactgttaataccagtagaagggcaagtcaatctaagaaagaagaaaacctcataattaagagaaggatatagtggtaaatcattttaatttatttgaaagagaggtactaattgcctttttcaaactctcatcaaatgtctctgattgtcatagactaaagactttatggactaaagttaatttcctgaggattaaaccaaaagatttaatgtcatttgttccatatcatctattaaaataattcaatttttaaagaatctcatcttaaactgaaatccaaatgaagacaatatttggcaggtcacataatggatagtgcaagtttacattttcagaagtaacacaagtagacttacccttggagaaatttacacagtt

SEQ ID NO: 33604 - DNA, 1696 bp, Bovine  19866880947497
  misc_feature (1)..(1): n is a, c, g, or t
ngacaaagctaggtttggcaaactatcaattcaatagatcctagaggggagggctacttactttccattgctccctgggccttttaaaaaactgttatagtgaaacgatccaaggaatgtttcctttgggtcacagttactaagctttaaagctattatttttaaaaaggaatgataaactacaggaaattatttataggctaagattgtccttctctgtaatttgtgacttgctcccctgacctgaaggttggttggttgtcttgggtcttttaaaagatacggatgaatgaatttttgagctaagaatcatattatggtaagcatctttctccttgaatacttttcattctgctctcagctctctaattcaggaaatattagattagaaacactagaaattctcaaaggttatagctgcatatgtgaagaaaaatgatcttaaagatagctaaggactaagccacatatcaaaactaacactagcactgctctgaggagcaaaatggctccccccacactctatagagcaagccatataactcacaggggagacatgatcaaggaaatcacatgtatcatggacatagcactccaaaatgtccttttaggattgccctggaaatgtgtattgtaggaatctattcttgagagttaagtcatagaaaaatatagattttgcctcttaaatttaaaaaacataatttataatatttacacatttacaatgtgtttttgtttatttcatgtttttattacatatttttaaaatttattttctttatatatatttatacagctccaatgctcaaattgctaaactagcaactagggcatctgaaaaaagatcactcatttatggaacatatattccaatgagaaagataaaaaaattagaaaagaattataattactatgataagttcccagggaaaagtaacagagaaacacatacatggacatctaatataggctattgtattcaagcaaagcttcaaagtagatataaagtttgaactaagacttgaatagtgaattgtatttagttaaatgaagaaacaagaaaaatggctcaggaaaagaatatattcaaactgaacctgaccttaggctcaactttgagatttggtagttgatttgataacatgcctagtcacatggctttcatctttcctgatttctttcttaatgcttatttattttattatagcaacactggtgtgcatactacctcttatatatcccccaaaatcctattactcttctcttcccaatgccattgctttacttgggacaatatgatttcttttttgggattaccaactaacatctagaggatgtctctgtcctatgctatgagttcctggttcctctaccttcttcctcttgggttcacccttcacactgaagctagtaaaaatatttttaaaacatatagtgaccttagctctccagtgggtaaaatgccacatcactgatatattcgtttaaaatttgaagaccttagtacaaagatcttggtcatattttttgaccaccagaaaactttgagcactttttctacttttgggggagttaataagtaaaaaaaaaaagaaaagaaaaaaaattaacataagtttactgaatttttaattgagttatacttgatttatactacggggttagtttcgggggtacagcacaataaattcat

SEQ ID NO: 33605 - DNA, 1275 bp, Bovine  19866880955760
  misc_feature (1)..(1): n is a, c, g, or t
ntttcctataggaaataatactcatgaagatccaaactcagttttttagacaatttcggggagggtagtaaaggctttaaatcatatagataagttggaaagggagtcaaatagaaactgatgaagaatagaggaggaggtgagaagaaaaggattcatgagaacactagagagcactttgttgattcagagactggtcaaccagagaatagcacatgtggcaaccaggcttccagttaacctgcctcagaatagaagcatgacctcatctgctggatgaaaagattccagccagaagctaatggtttatggagacactgctatgtgctgcgtagtttatagaggttaactctttaatgcttcccattttttctttctacccacctccagacacatacactttacatctatggaagtagaggctctgatatactgaataccagtccaaatgtctctgggtcagaaatggagcaagcccccaaatgcagttgaacatgacttcaatgatcctgttagtttctatagcacacagaatccatgactccaggtaagtttaaaagccaatacccacagggagtataaaagagaaaatcctggcaaagtatgctcatatgctctggatcagctgcttcatctttagaaaaaaaaaaatattccacattctgtttcaaagccaaaaaattctcagcccctgaggcttctgctgtgcttcttgatctgttcatcatattgctgcactgaatcaggaaagaatctcagcaactgacaacaatgtgtgtgatatttttctgtaatttaaaaatcatacatctcaatagatgtatgaaaaatatatgaaaatagaaaatagatggaaattagagagtttatattgtctacagtaaaaatttatcatctaatattaaagcatgcttcatattttaaaagttgatttttcatccaggtcagggcacaaaagtaatcacttaatttccagtgcttcagttgactttcccttaactaccttgattatgtcgccttcaatatttgttcagagctgaaatttcagggtaaatttatttttttttaaaggctaggagttaattttctggtaaactttcactgatatttttaattttgtattttagacattttccctctattattttagaagtgtgtgaattacaagttgaactcagaatgaaataatgaacagagtcctaattaagaacttgcactcaggaatcagaataaattgaaattcaagctccaccgatcattagctgtgtaattttg

SEQ ID NO: 33606 - DNA, 2159 bp, Bovine  19866880974789
  misc_feature (1)..(1): n is a, c, g, or t
ntttttgcctcctgcacacatgttatttttgggcacatagacattaaggattgttacgtcttccttgagttttgaccccttaatcatgatataatggcccttttaatccttgataacttttcttatcttgaagtctactctttagttaaaatagctacacctgctttttaaaattaatattattgtggtatatttttcttcacttatttttactctatttgtgtttttttaaagcagcatatatttatatcttgtttattgattgacactgacatatcttttaattcataaatttggaccattgactttaaagtaactatattttggaattattgagttaatgtgtataatatttgtgactgctttctcttgatggctcttgtgttttgtttctaatttgtcttccacttttttctgtcttttttgtttttaattgagcatttcatatgattttattttctctcctttcttagtatataagtttctttttttttttttattttacttttttcagtggttacataaaagtctgtataatacattttcagccaattcaggtctactttcaaataactgtacagcatgtcatgagtaatgtgagtactttataataacaaaataatgaaaattcttcccaattgtcttttgtatcattttgtccctcattttactatataaatataacatacgttttatatttctgatgcttgctctattgcttcagtttgtcttttttgctttttgtatgtcttgcaactttttattgatagttggatatgatgcactgggtaaaaggaactgttgtaaatagggcttcagtaatgttgtggtgaagtgtgaatggaggggaagtgttctgtgtcttattgttaggtctcagtctgttagtgaaccaatacctctggactatggactttattagggcttctcagagttttctctcccctcttaggtagaacaggatgactagagtggggtgctgctgctgctaagtcacttcagtcatgtccgactctgtgcgatcccatagacggcagcccaccaggctccgccgtccctgggattctccaggcaagaacactggagtgggtagagtgggctagagttgggcatctcctttctcccacatgaaaggctggagggggctgggtttaggtgcttcccttccccccaggctcattaggccctgataattgcccagcaggttggctctggttaactaattttccctgacagcaggccttgttgagaaggacacattctgtaatccaaagttgttcttttctacccactcccatagaagaatgaggaaaattttgtccaatatttattgtgagaacctggttaagctcctagaggtaaatctcaggatttcaggggtgcctctatgactgggtcctcctggattattttttaactcctagacttgtccacactaaacctctagtaatttttcagttgaggttgccattaaggttttcctgcaccagcctggtccccacagtagtttttgcttatcaagcactacttggtaagccacagtcacttgtctgtctctctaatactgggagccatggtttgcctgtgctcttccccatctaatggattcaagaagggatgttgatttttcagtcagttcagctttttacttgttagtgggacacagtggtgactttcaagctccttacctgcaaaactagaaactagtaactgggccatgtcttttccttactccttccttcttctaagaatgcagatatgatgtcttgatcatgagtagttaaccaagaccatgaaacaaaaaccatatagaagatggggggagatacaacagatagaaagaaacttggttcccaataccagggaggccattctagcctgcatttcctgattccagacttctagaacatgagaaaaaaacaaactttatttgcattcagctactgtttatcttcaggttttgcatcactcagaactgaaccatatcttaaatgttacaccaaggaggaagaaagtctgtatttcaaatcttgatttctaggagatgttgatgatatgaacatgatatacaaagttatcacaactagaatatggcttcaggaagagaaaatagacatcttatggtaatttctgaagtcctggcaggactttgaggattt

SEQ ID NO: 33607 - DNA, 2078 bp, Bovine  19866881061787
  misc_feature (1)..(1): n is a, c, g, or t
ntgactgtcctttatgctctagttacatatacattccatatgttacaaacatcacaagacagtgttttaatttttgctttaaatgttgcagtgtacactttttaaatcataagaaaaaaattgtcttgtctacttgccttttatgttttcattcttgctggatgatctgagtattcttctgcagtcatctcctttcaaccagaagaattctctttagctgatttaccaacagatattcttagtttcttattatctgaaaatgctttgtttcaccttcatccttaaagaaggattttgctgagtatagaatttggggttgacagtttttgccatactctttcaggatttttattgaaccactcctttcgccctccataatttctgatggaaaggcagcaattattttgattgccatttccctatatgtaatgtgtccttttttttttttttttcaggcatcttttaagattgtctcattattcattactttctagaaatttgaatatcatgtaccctagcgtgactttcttcatttttatcctggttgaggttttctgagcttcttgaatctgtaaattggtttcaccaatttgggaaaaatttagactgttattttcaaatatccttttcctgacttatcttctttctcttattcttctgctgcttcaatgataccttttgatattattccacagattcttgaggttctattcatttattttgtttttcttttttcttctcctgataggataatttatattgatttgttgttaagttgacttctctttcctctatcatctccattttactgtaatgtccattcaatcagtaatatttttaaattttagatattttattttccacctctaggcatgccactaggcttttatatagtttctgtttctctgctgagatttcatacatttttatttattttgatcatatatttctttgccttcttgagcagagttaatagtaactgcttcatagtattgtctgccagattatcaagtggttcatccaggggtcagtcttcactgactgtcttttctcttaagaatgggtcaattttccctagttcttttcatacagagaaatttttcattgtatcttcttggtggcttccctgggggctcagaaggtaaagaatcctcctgcaatgtgggagacctgggttcgatccctgggttgggaagataccctggagaagggaccagctacccactccagtattctggcctggagaattccattgactgtatagttcatgggttcccaaagagtcagatatgactaaacgacttttactttcactttgttaggtaatgaaatgtgttttaaaatcttaagtaattatattaaaatttatttaggaacaaacataaatatctttaccaaataaagatgtttcataattacaaaaaaatagaagttagtatttatttaaaaattaacacagatttgacaaagatatacatataaatttgtgaggcagttgctagaatatttacatatttgttactaatatttaacaataaaattggatcatctctgtaattgtgggaacaactagagcctccttccatctaataatagtaaaacatcattgtctttcctctaaacatacaaattcaattaaggttgtgtttaatttaaatatcagtgtggttttttttttaagccaaataaatccaattcattttaaagagcaatttatgtgctgggtaataagaatgacacattggctcctcaggtgaggcacaaagataaagacagctatatttaatttttaagagatgtgacataataactgaccttaaatagaaaatttttgtgattatataaatcaaagagcttcaaagatatgacttaaaacctctgggtaacaaattttctaagagttatattactgaagtggaaaaaagcaaagccccccaggcaatgagattaagtaaaggacattttgtgtacatcctaatgcttaatttcaagaggcagtgccatgtaacagaggcaccactctttcaatgaaccaaagagcctttcactattttactatttccaagtactatttcata

SEQ ID NO: 33608 - DNA, 1811 bp, Bovine  19866881155115
  misc_feature (1)..(1): n is a, c, g, or t
ntatatttcagtggaaaatttccgctttagaaaccttattatattaaaaataatcctgttgaatctaaaatctcttagatttattcatgtaggtggtttttaaatgttgtaccacaatgaacttgacaaccatatagactggaattgagaaatatagaacaatattatatctgatttgttcaattcatctatgtcataccatttggttttagtactattatttcaaagatatttgagacaaggtcatttttttaaattagttcataattctttgactcacaaatcatagaattaaatagtctgctctatttctttacatatataaataaataaatatctctataaatttattttatttgaaagcattacgaaaacaatataatttttattgaaatcgtgatgttcatgagacaaataaaaatatagcttcaaatgttcattgggatgcacatacatacatttataagaatttgatagtttctagttccctttagggttcataagacaaattaaaatgctataacaccactttttaaatatataacctcaatacaggacttctcctgatgattcagacggtaaagaatctgcctgaaatgcaggataccagggtgtgatctctgggttggaaagatccagtggagaagggaatggtaacccactcttgtattcctgcctggagaattccatggacagcggagcctggcaggccatagtccatagggccggaaagagtcagacatgactgacactttctaaatatcatggttatttatcaaaataattgtcagaaaaatcaactgctgctgctgctgctaagtcacttcagtcgtgtccgacttttaatgaccccatggactgcagcctacgaggctcctccgtctatgggattttccaggcaagagtactggagtggggtgccattgccttctccatacggtcaactaatctcttgcaaaaaaaaaaaaaaggcaaaaatatacagtgggtaaaatacatttgattcaataagtggtttggtgaaatcttcacaaccctatataaaattagaacattttctcacaccatacacaaaataaattcaaaatggatgaaagtccaggacatgagactggaaatcataaaactcctagagaaaattgctgcataatcaatacactcatttatagaaggcttagaaacattttttttaatttgtcaacataggcaaagtaaagaaaagcaaaaataaacaaatagaacataattatataaaatcttttaccacagtaaatggaactatcaaaaaaaaaaaagagagagaagacaacttactgaatgggagaaactatttgcaaatgagatgtatgataagtggttaatattcaaaatatataaatagctcatacaagtcaatatcaaaggaacaaagaacttgatttaggaaattaatatacctataaaacaaaaacagacttatagacatagaaaacagatttatagttgttaatggggaggtggggtagcagagggaaaggaatagaagtttgggattagcagaggcagcctattatatataggatgaataagcaccaaggtcctattgtatagcataggcccccgttttcagtatcccgtgacaaaccacaatgaaaaagaatgtgaaaaataatatatatatatatatatatatatatacatgctgctgctgctgctgataagtcgcttcagttgtgtccgactctgtgaccccatagacggcagcccaccaggctcccccgtccatgggattctccaggcaagaacactggagcgggtgccatttccttctc

SEQ ID NO: 33609 - DNA, 1472 bp, Bovine  19866881236616
  misc_feature (1)..(1): n is a, c, g, or t
nttaatgggaagaaactcttaatgaattgtggtaaccctactaggtgaaatctgtaacaacgtggtgctgacattgttgctgaattttatgacaaagttaccagattgaaaatcagtcatgtgtgcccagaaaatttacacagctctttgcccaacacaaaagaggcaagtcattttttaacacttggatatgatttcttgctctgccttggactggttttccgaccttgggcaagccagttatcttctctataaactcagttttttctgttcaaacaattaacaagaaacagattgcataatttctaaagtttcattcaggtttattatttctctgactggataaagacatctttcagaagggttctataaaataaacatacttttcacatatcgttatttaacataaatgtgcttgcttcattgctgtttataacaatacttataaattttaaaaagtggtaattttgagggttacagatgacagttatgggagatttatgcatagcacaacatgagataaaatatacccttttactattgacagctatattttaataaaaaatggtgatgaaattccctctgtctttactgtttcttcaagtcttcattttaattgaaaaataattgacctcaaaaaattctcttatgttattgccactaattaagttttaagatctgatttatctctaatatcaaagagtggaaaatttaatactccacagaaactgtaatttaattcttcatggctgtaatgcaattcataaaattaaatgttgccagtccatgaagattaaaaaaaattttttgagtttatttgtattttttaaataccttatacatttatttaaaactgatccaatgtataaactactatcttcttaaattagtgatatcatagatatttgaatgatagtcaacactaataaaatcatacattctgaatttttaatataaacattgataaagcagatttatttaaggcacacatgcttactgaacagcaataagacctttactaataaaaaaaatcactttcctacctagcaaggtattaaaaactaatatacaatgattttattttccaaggcctgggataataaaaaagaagcatgatgaaattctagaatcaaaatgttgatttaaatataaaattcattcattaattcatgaatttgtgatctttattcatgatttggataccctcttttattgattccctggttgttgttgttttaatatatatttcaaatcaagctgagaagcttggtaaattccatcatatactttctttttatttatttattttaattggaggctaattacagtgttgtagtggtttttgccatacattgattatcatgagctgtgaccatcatttaacataaaaacagttctgattactctacctccaattcatgtgacttctcagccctcactgttagagatcatttccctaaacttttataaat

SEQ ID NO: 33610 - DNA, 822 bp, Bovine  19866882082982
  misc_feature (1)..(1): n is a, c, g, or t
ncaaagagggtggctattttgatttacatttttgtaaagtaattttggtaggagcaatgcaggacaggatccaggtaaaaatctctataccagttaaaatgcattattgtactccatggaaaaaacaagggactgaattagggcatggagtttcaaataaagaggtgccaaaggtaaagctacttagcagattaaacagaaagaaaatggagaacattttaatgtgcaaggagagtagctaggaagaaattaaaattctgttttgagttaatggcagaatattttttttctttcgtaaatataagtaagagaagcagattttatgacacattatgagctcagcgttatttaaatttaaatcacaggaatttggggggtgggtggggcatgatctaattgaagaaaagatgaaaagagtaaatctgaccaggagcaagccaggtgcttgggtacaatgcctagaaataaaagctaatcactaaaaattagtcatttataatgtgtagacaacttatgttcctctctacagattaaaataaactatttagagtaatttttcttctattctttatgaactgaaagggtttttgttctgatctttcagaagataatacaatctagcctttggagctgtctaaaatatagttgagggttatttttagtcaacacattagacacattgctgtagtttgcatttctcatcaaagaaaatgaataggcagtaaatataaagtacaaaaactgccatggaaaagaagattaataaggaaggattgtcatttactttcaaatccaaggcacattttaaaggtcctcaaaact

SEQ ID NO: 33611 - DNA, 1410 bp, Bovine  19866880395287
  misc_feature (1)..(1): n is a, c, g, or t
natctgatatgtataactaggacatgtcctgggaattctccatggtaaatcatattaaaatagattttaaacatttctgttttataaagactgacttgggcagacctgctgcagcattcattttggaaggatgcttttgctagaaatgatcaggactcaagcactgaggattccaacgtcaggtagtacaagctgatctttgtgtggggggcatggttattaagcacttggcccattgctatgattgcagcctcagtgatgtggatttctgtgcttttcatagtagaaaatctggcatttgtttaattaagggttgcttaaagagtttagtcacgacattttgtgtgcttgactttgctcattctctggtcagttgtttattctccaggcagggttttagtcctgtggtcattagtcctgttcacctggactcccaccttgtcagcacatggtaggatctcatttccctctttgaaattaggtgcagtcctgtgacttgctgtggctgatgaaatgtgagcagaagtgatgtgttatttctgggtagaaactcaaagagccagggtgtgatttgctacctttctttctcctgatgaggtgatgatcaggaagaaaatgtccagatggagttgccttcaggctgggtctttagtgaccatgatgagcacagcattcctgcctgcctgtggtggctgtgtgcacgagtgagacataaagctaggagagtctaagtcactagtatttttggatcatgttagcacagcataacctagctcatcctgactaatatacttcattttattattaagtcttcttagcctgggacacttacaaaagtgatggtgttttgaaaagaacaaggtgaaaagtagatgagccaaagtccagataatcgactcctcctctctccacttcattcagtgataatggttgtttgattcttaattttaatcttgtcaattcagtgtactggatagagaaatctgaattctatataaggtctctctcaaactttggtttctgcgacccactgagctcagctgtttccacacttcaggctctatgaagagtacagaaactgggcgtgggtccttgtctatcagtgtcagcaagtcctcggccaccttgcaccttagtatgccatcttccttctgatctgtatgccttttctttcttactggccttgcaaggactttttttttagcatggtaatgaatgaggtaatgaaggagtggggcacgactgagcaactgaactcagtgtatgaggggtgatgacaatgaacactattgcctggtttctgattttaggatgcattcagccttcctgcattaagtacaatgggcttccctgatggtgctagtggtaaagaacctgcctgccagtgcaggagatgcaagagccatgggg

SEQ ID NO: 33612 - DNA, 1315 bp, Bovine  19866880472617
  misc_feature (1)..(1): n is a, c, g, or t
ntcaggcagaatgtttacctaggcagagaaccattgatggtgcttggtcatgcttcccctgccaacccagatttctttcaggtccagttgtcatccagctgaggtggcctgcatacagatatccttgcagagaagggactgtgtcccaccccatctgtgagatgctgctcagggacagcacgtttacctgctaagccacctacagcctccgccttccctccctaagagtggttcaccaagcaagcacatagcacttactctgggagaaaatattccttgtgatatttttagcatccacatgagaatttgcagggcaagtacaattaacttttttctcctcagaactcaaagggatttgtactttcttagtgaatacaacataacctcacacagtaagattggcagagattcagtttccaaagttgagttaacagtaaaccgccaagtcaggtagttcctgaaaacagtcaaatctggatgtgttgccttaaaatttaaagaaaattgtagagtcagtttgctgtagggaaatccccaagtgaggttcctttagagtcgtttattttttagaaagcaccatgatctttactgatgttctgatagcatcttgatcggctgggcagtattgggaggaaatgtgttaaggacttttgactgtgctgaattagctagcaagatgattcaagggaaataaatgcccctcataactgaccatgaatactggccaggcatcactggaagagaaaggaggttccaccagtgcagaatgagtgacacaaactgtgtggccaggggagggggcccagaagccatggctcatgtgggaagagactgggctcagatggctggtctttaggagagggaatccactctgctgctgctcagagaggtgagcgcctaaatcccatgagggacttgtgaagaatgaactgggcagaatgctaagaggacttgtgcacagcagggagaagttctttgatgcttaaaggttgggggggaggagctggttccctggaagatggcagcttgtagacagaccctgggcagcttcagccagtgcctgaggaacgtgagataaggagggcctacgtgggcaacacgcaaaggagcaggaggctctaacggactgttttcttgcatgatttcagtagaatgtaagggcagagtgctccattgcttctgcctcctttactccctgtgaatcagaaggactgcagtggggctatgccaagcttggggtcaagcacttctgcctcttggagaccccaggccccaccattcaccttctatagctattgaactccagctctacaga

SEQ ID NO: 33613 - DNA, 4491 bp, Bovine  19866880475921
  misc_feature (1)..(1): n is a, c, g, or t
nctcctctttactgtggaaagccaacccatgtggtttgggtgggtctataagtcccctcctcacctattccctcatgggtggggtgtggcagtaggtatgtccattctcttggctgccagtgattggtccccaaatcagcacttaacccaagcagagccaatcagagttcctctatgagacttgattgaggacttccctggtggtccagtggttaagacttcaccttccaatatatggggtcaagttcggtccctggtctgggagctaaaatcccacatgcctcccacgtggccaagaaaaaaacaaaacataaaacagaatcaatattgtaacaaagtcaataaagattttaaaaatgacccacatcaaaaaaatctcacaaaaaatagatatattactattgagggagccggcctatttttatctaggatacaataggatcagtaggggcctttgtaatcaagagccacaggtggtcacaaaaatgcaagagtctgattgagaattcagcctgtacagaggactgagggcaagagagctgggaaagagagagacagaggtaggacgaagccttgtaacacctatatccatctgtgcccgagaagaccaacacctggatttcctagtataatagtcaatacattccagttctgtgtcattttgtttgagccaggcttttgtcacattcaactcagtctgaagcttggcttctatcaagtctgtcccactttgtgaatggaggaagaaacattttttttcttggggaagaaagggtatttgtggttagaatcacagactcacaccactccaggcagctaagatataggtacgtgtcttcatcatcaattccctctgcctctaccctggagtgaaatgcaattggagcctttactctggaaggctctggcggtgttctaagatgctcagtgttctcatgttcgctcttcactgctccctcatgaagggaatggagataagggactgatggggactgatgtgggagaagccctagattctcttccccgtaacaccactgggctgctactgggaaggagacactgggtggaccccagtccacctcaacaaacacattcagaaagagagaggtttagacacggccttgagaagatcttggtggggatggtggtccatatacatgaagttgaatgtcctcctcagaatattcatctatgaaatgtccactgtgctgcctctccaatgtcacagagttgcccgtaaccagcagaactgcaagtgtagtgctctctgacaagaacaaattgcaactgacttaatttctccaagcttctttgatagagaagtggttacatgattacaggggaactaaggctgtcttatgaagtggagcttgattaggttactgttgtggtttccagctctggggactggggagacaagctattgactgaggggtctggctttgcaaatgagcaaaccaaagcttttaatttaggctggatctaaaagaagttcagatcgctaagaacttaagaggtataactaaagtacaataaataacacatacagtataccatttggtcacttttgacatatgtttacacccttgaagccatcatgacaatcaagataacaaatatttctatcccttccccctgccagagtttcctgatatctcttcccagcttccctcccaatccccaggaaaccagtgatctcttcttgtcactatagatttgtttccttttctagacttgctattaataataagagtatccaagtagagccaaggatattgagtaggtggcggggagaatgggggcagggggaagggtgtgggacagccaaggtaaaaaagtttatgatcctggtaactaagtttatactgaagcataagaaatgctaatacctcaaaacaatggcgcaatctagcagaaatggctaactagctctgggggcaattaccattatcactgatttatttatttggaattttaaaataattttaaaatatttataattttgataagtgctatatagaatgttgaaaaacattctttatacttgtaaattctatacagagctgatgaactaatatttcttaaaatcatttcctatagaactattttccttaagatctgattagaaattcatctgcttcccacaatcacctggggtcaaataataaatgcaaatgtccaagttccagagatactgaattaagtgtctcttgttggatttagaaaacatgcattttagcaagcttcagatatatcactgatttttttaaaagataaattctcatctttcagagttgaagtagctgtggtcccatctaaaggcagataaatggactacagacatcctaaattgtcatccaggtctgattaaaccataaaaagttttagtgttttacataaacatactttgaagagtagcttatcaagtgaacatttaaatgtctgagcctaagttccactttgagattatgaacagaaaaagcctttgtgttaagaaagatcagcaacaagctgatcctctgatgtagacttaggctgatcctctgatgtaaacttaggtctcttcacacacctgttcccatgtgcttacctggctgctaacttgggcctggcaagagagtaagtaagtaacatgatcccctactatcctgaagtaagctacctttggggcatcattttaggcccagagagagtaaaaagtcatcattaaaaactgataagatttatacttacaaatgaatcatgctcatttccccccacgcatcttctctcaggccattaaaacttgatagatacaattctattgttgaacaaatatcatctcccctatcttgtgactcttcaatatttcagtgctacgggtgatcaatatgtgctacctgaaaagtcattttgtttatctttcataaaaccacattgcaattacattagaaattaatgtcaaatgaattggaaatcaattcatgaggggaggtggtggggcaccggggaaagtacactgaaatcatttaaaggtgggaaatcatcctcactgtgtttttctcacattgtgaactaaatgtgtttgcacattccctccagcaggtccctaaacaaatgccatatttgttttttttcctaacctaaccctaatgtttagcacatagtaaaagctatataaatgtctatgaaatgaaggaatgaatgatccagagttactactgttaaacattcatatttctagctttttccttaaagaaggtaaaggcctaaaatatctttgtgaatttatctttttcctttaagttcattattcccttcaagtttaactccatgaattggattattggattaaaattgtcaatatctttttatcttccttatatattttaaatatttttaaaagtgaaaaagaagtgaaattgtcacactgtttgaagatgacatgatactgtatattaaaaaaatcctaaagaaaattctaagttttttagtggtccaaaaaactattagaacccatcaatgaattcagtaagttgcagaatacaaaattactatacagaaacctgttgcatttctgtatactaacaacgagctatcagaaaaagaaattaagaaaacagtcccctttgtgaggtgctaataggaaaagagtgagagcttgacacctgagatggaaacattttgatggaaaattcaacagtcttgaatccccaaattcccttgaacttccctggttggcaaaagcaaacccctccctctgcagagggggtggtgttccctcacctggagatcatgttgactcgaattggtgcttcacaaagagatactaattctcttccagatctgcccagcctgaaggagttgggaagactggatgacaaatgtcatcatgaatccctgtgagcacccatgactaaggaccaaacagaactccttttccccaatgccttggtgctgtgcaagacctaggattttggggccacctagagggtggggtttcccaggaaggactgaggttgtttttcttgtagcccagcagaatcaggacttgagtgagaaatcagagtcatggaatatacagcaagttctagttcttgaattctttatttcgtaaggtgaagcttatacttatcatgcacccaagggcattaaacttcccctctcttgtccctactccactccaccttttttccttatagatgggctgagacaggtgagctgaccacaatgctctatctgatttgcactaactcgtggacttccctggtggtccattggttaagattccacactttcactgcaggggacataggattgattgtcgttagggaagttctacatgccacatagtgtggccgagagaaaaaaaacagtgaagaagtatggtttgcagtaactcctatgtgctccctccccaccgctccaactctccctgtcctgaatagccatgtgctcagcaaagcaaggtggacgaagaagcccaacaccgtagcagagagaggctatcct

SEQ ID NO: 33614 - DNA, 1520 bp, Bovine  19866880577901
  misc_feature (1)..(1): n is a, c, g, or t
natggcagataagcactggagggcgttctgtgaaggagcagtggacctgggatgggtaccccacaacacgtctgacattgacaagtccttatccaagctacttccccaccactctcatggccctggaggccctgaggaacttctgttacagccaaattgcatcctgacccctcactgacttgcaggtggcagcagctctagggaggagggtacaaggttgccggaggtgctggtggggtctggggaaccacagctggtcctgagacgcctcgtcctgctttttgagtcattaaaggccaagaaatactttcccatggaatagtatccagtccaacacagatttggtggcctcatcagggctgaaagtccaggggctctgcttctgttgactgtgagaccctcccattctgagcccatctgtgtaataaagtttggtcccagaagatgaattagaatgagtcagaggatggagatgaaagggggttggcactttattcctgttagattggccagaccaagatgggctagcagccctgagacagaggaacaaacaagtggcttcttggctggggtgaaagaggtgttggggaggaactcaagagagatggtggtggacttccctggtggtccagtggttgggaatctgcttgccaatacagggaacgtgggttcagtccctggtccaggaagatcctacgtgctgcagggtagccgggcccgtgtgccataactactagagcccgcaagctgcagctgctgaaaaaaaagagagagcatgaggtgggtgctgccctgggctactgggtgtgaagggtgaagcccagggcaggtcctctcattcaagtgactgaaagggctgacataaagggaggggtaggctgtggatggatgggactggggtttcatcccgaggcttccagagacatgcatagggtaggagagctgatggctttgcagtgcaacaaggtaccctcaaatgtaggaggctctgacttagcggacagggcctgaggagggccagaaccaggcaggtcgttgatagatgttaactgaatatctgctgtgcgctggatccatgcaaggaactgggcagcctgcctgtctgtgctgctcaccttttggggaagccgctgtggttggaccaagaattaagctagcccttgcttaattccaggcccttgcttaattaagcccttgcttgctgctgctgcttttaagtcacttcagtcgtgtccgactctgtgcaaccccatagacagcagcccaccaggctcccccgtccctgggataggcaagaacactggagtgggttgccatttccttctccaatgcgtgaaaagtgaaaagtgaaagtgaagtcgctcagttgtgtccgaccctcagcgaccccatggactgcagccttccaggctcctccgtccatgggattctccaggcaagagtactggagtggggtgccattgccttctccaagcccttgcttaattccaggcaattcacaggtactgaaagtggcccaa

SEQ ID NO: 33615 - DNA, 1798 bp, Bovine  19866880590718
  misc_feature (1)..(1): n is a, c, g, or t
nttgataggaaaaaaaaatctgtctcagttcaaatatgatttccaaggaccctagagatgaacgagcctccctctgaacctcacgaagagctagaaagagccgaggggaaccccacctcatgccctctttacagatgagacagtcaggccccggacagggacagggctgtccgtatgccactcagctactgagctgctgaattactttattcctagagaaagactctgatgctgaggaaagtgtgacttgtttagctcctgcggcagttgggtctgtgtctccaacagcaaaagtgaaaataaaccacatctcttgctgggtcatcatcttaaaccactgctaaaagaggactcaacactgctcctgattctttcttcctgttacatacttccatgaaaatcgacacatagtcacttcttagactgttgctgtcagctctcaagtattcttagcgctgaccattgcctgctagagggtttccaaatgcagtagctgggcagctcctgtcctttatagtcacagtagagggtgtttagtggatctgcaaactctttctgagttagtaatttgctcagtaatcatcttttaatatctttacaatatgttgaacctaaacagcaaacacagtaccaaaaattagtttaaagaaagctttctcttactaaattaagtcctgccccttccctctccgtttgctacaaaggaggtacagaaaactgcactgtctggggcaagcagaatcagagaaaagaaagtgaaacacctttctccttatcctgttgcccaggtaccccctggctccccaggagtcacccgccttccccagcccaatggtagagaagagggtcaggcctggagacagaagggagggacagagaggcagcctgcgtacctttccgagcctgctggatgtacctggccagcagcgcgcccagctgtgctcggggctcgtcgtccaccctcggcaccgccctcagctgcctccgaggcgcctcctccgcctgctgcgcccgagggcccgtggggtccgcgtgaggcatcggctgcgccagggcgcccgccgccaggaccgccatcagcaagcacaggcacacgccgcggttcatggctgcggggagcagagggaaggggacgtgaacgaaaaggtggggcatccgtgggctcttgaggagggtcggacacccaaggtacagagaaggtggctcagcccaaaggcgcggggctccggatccgctaggcaggtgccagcattagggagccggtgaccgcagcacgcgcgttcggacgcaccgcgttcctctttggggtgaaccgcagtcggggcccgggagtggtgtgggggacggagagagaccctgtcctctgccctgtttagcagaaggaatgtcttctgttttcctttagtttgaggaagtgttacagcgttgtctctcttctcctaactggaaaaacaagagattaaagacaggtgaaaattatccgaaagggactactctgtaggaaaaataagaaccttgaagaaaagaggcaccttaccagagagctcagacgcttcaaacagggaaataaatggtgaaaaactgagaagcacggcttaaaatatgagaccaatacataaacgccgtatttttcaagtttcctcaaggtgctaatgggaattggcaatgaacaactatgtaaaacgcaggcagggttttaaaaaaatcagagatctgcgctcagtcctccggcgtccgccaagcaccgctgcgttttagatccgcgcagataaaacactggaggttctatcccccaaac

SEQ ID NO: 33616 - DNA, 997 bp, Bovine  19866880595140
  misc_feature (1)..(1): n is a, c, g, or t
nctgagaagcgaggggacttggcggtcccatgcagccttggtggatctgagctaagaacacttaacaggttaccttgtaaagcaggtgctggcgcttcaagtgggtcagaggctgaggttatgggtaaagaatttggagggtgcattctcttagaatctgaagtatttgaggacagaaaggcatgctgccttctggaagagttttttgttttaaatcactctgagactatgacaccaatatttcttacctccctaaaacaagtgaggtaggctgctgtccttctaaaaatgaaactccactgtcatggaattaaaacactggctgctttgtttggaaatgtgagaaggaagggatttttcttgttgagtaggatcaagttagctcttttaggaatataaattccagactagtgtttccttaaaaactgatattttgatgtgtttattctggaactgttagcacatcccattctgggctctttttaatgggctctgggtaattactggggcctcccttctcagccagtacactgagccattgaggaagacagctggtcgcttattagccaccagcgggtggcccctgacccctcctccttgaagatgatgtgaggcacaattagagagccctggaaggggcataagtggttgctggggcataaataatgcaatctaccctgtctgtctgtgaatgtgatgaggcccagctgatttgatgttcagaagtcagaacctcatattctgggtccagcatgttcaggctctgtgaccttagggaaattcttagcccatgagcctctatttttccatctgtagaataagactgtgtagtgtgtttgtgcaataaagaaggtgatgcacagaaaggtttgccttattcttgctgtgtaaaggagctctgagcctgttcctttggagctggtgaatttcaatgtattatcctcttcttcctccttctgctccaagcctctctgcctctactgggggaagacttaag

SEQ ID NO: 33617 - DNA, 1249 bp, Bovine  19866880619496
  misc_feature (1)..(1): n is a, c, g, or t
nactggagcatgccaaattccatttcttaaacagggagctctgtatttctacaaattatgggctcattagcctgtgttgagtgacagtagaatttctttttttttttttattaagaaaatcagaaagcaaggatccagtgcactttgatagtcatcagcaattgagtcttgatgttctatacacatttttgtagtcttagttcctatatttaatgggatttttaaatggggaaagccaaaaatccccaaagctacttaatattttttttttaattaattttattttatttttaaaccttacataattgtattagttttgccaaatatcaaaatgaatccgccacaggtatacatgtgttccccatcctgaaccctcctccctcctccctcaatggacacgcttttgcatctttattactgagtttttgaattcacacttttttttggtatacaattattcttataatccattggaaatgtacattttaagatcagtatgttcacattagggcttccctgaaggctcagatgataaagaatccacctgcaatgcagaagatatgagtttgatccctgggtcaggaagatcccctggggaaggaaatggcaacccactctagtattcttgtctggagaattccatggacagagaagcctgacaggctgtacagtccatggggttgcagagtcagacacgactgagcgagtaagcacataaccatcattcttaatgtctatattttaaattatttattattttattcctctgaataagttccattgttttcttatgtatttcccaggtgtgatatttaggtgtttcttaatagattcaaaggttttaagaactttttttctcagtgtgaatgctgtgtgtttttataggtccgtctcacccatgaaattaaacacaagaacattgtaacttttcatgaatggtatgaaaccagcaatcatctctggctagttgtggaactctgcacaggtaggagccaagaagtgctacgattatagtcaccgtgtattgctttgaaaaaatacgtgatgtaggttttgttatttttcacttttccttctattatgaatagaagcatactattgactacattaacttgaacatctgttgtttgatatattagggacaggaaaaaagcaaaggtgtttggtaagaggaagagatgcagtttagggttaactttattttggtataaaataatactaaatcatcttcataaaatttagacataat

SEQ ID NO: 33618 - DNA, 1838 bp, Bovine  19866880628015
  misc_feature (1)..(1): n is a, c, g, or t
ngctcagacagtaaagaatccacctgcaatgggtgaaacctgggtttgatccctgggttgagcagatcccctggaggagggcatggcaacccacttcagtgtcttgccatggagaatccctgtggacagaggagcctggtaagctacagtctgtgggtttgcaaagtgtcagacatgaatgagagactaaggaaagcacagtgatgcttagttttctgtttcattttatctgcaggtcctcttgccttgaattcagttgagatcaaagaaaaaaaaaagttaaactcctatttactaaaaaaatcaattaaatcaattttcttatttatctttaaactatcttgagtacgtctggaggtgtaggtccgccccggtctagaccaggggatctgccgggcctgaggccgagttccaccctggcttcccgggatgtcggtggctttcgtaccggactagctgagagggaaggcagaagtcaatcaggagactatccagcggctcctggaggagaatgaccagctgatccgctgtatcgtggaatatcagaacaaaggccgggcgaatgagttcgtccagtaccagcatgtgttacacagaaatctcatttatttggctaccatcgcagatgccaacccaaccagggcttcaaaagcaatggaatagtcttccagttggctgttgtgaggagtaattgaatgtgatctatttcctatgaaatggatttttgccagctcaactgcttagaatgtgaatggaacctctgtggctcttctaaaaatgtgaaaatgtaaagaaagctactaacttaaccatattctcagtataaatacttaataattaagtggattccctcaattaagttgactccaagtgtcctccatcctgaaataagtgtgtttggataacagagatataatgggcatcttcaagtcaacctttttagtttcaatctgaagaggaaactgagcaggtattgggcgatcagcagaaattggtgagactttccactgagacactgccaaatggacgtgtgactgtttctccctcctgccagtttgtggtggtggacccctgactgctgttttcatgttgccttgaaataaagcttgcctttccacaaaagcctgatattaaggtatagaaattttcatgtaatgtcttccacttggtttttgaggaaaagtgtaaggagctaaaaatacatgtaacaccccccacagtcattgctaataaaaaaatagtaattcttaagtatcatccaacatcatctactaatagaagatgtgatgccaaaggaagagtatctttttcttttctatccttttaaggttattagctaggcctctataacaaaagacagattaacagaagaaaagcatatgcatttatttaatatgtttacatgacatgggagccttcataaggaaacaaaagacccaaagaaacagttaaacctgagcatttttatatatgaagttcgatgaaaagtataaagttttagaaaaatgtgatgggacataagggtatgaactaagtgtaggaaactgggggaaatttagcaaggcctttttgttcaaaatctctgtccctctgggtgtgggagggcacctctcatctgagagtcacatgacctgctttatgggagaaggtctgagagtccctctaggatctgctgtttctcaaattcctcccttaaaatattcactatgccaaggagctgtattttggagtggcatgtcctgaattctgtgatgttcaattttcttctcttcccacaaaatgtgattttgttgatgtgtctgaaacaggatcccaacaaaattcacaccctgcatttt

SEQ ID NO: 33619 - DNA, 2675 bp, Bovine  19866880707347
  misc_feature (1)..(1): n is a, c, g, or t
ncaagagggttgttcaaaaaccaactccagccagtggaagcatctctcacctgttcaagtcccatctctttttttgaatcaagacccctattgattcatagccagcacagaatagagagacctggacccactttaagttgctttcgtattggtcatgaaagattcttaggccctgcctcaaccagctgaagttcagggcactaccgcaggctctaaggccaagtctgttggctttttgcccccaaatttgccggtagaacatgttctttcacagaatggagttactgaaccctgtggtagcccttatgcccctggaaatggtctcaggaaccatgtatgcatcacagccacactgtaacagccgaaatgataaaacttgaacagaaccacatgcttgatgtggtccatttcccttggatgcctccaagaagtgatagaagttagcaccatctgacgagaggatttgtgtggccttggcagggttgggggaagggtctgtttgactggatttcaggcttcccagagcttctggtgaaagggaaaacggtctcccacaacatggtggtgtgacccccctcagccattttctctgtggtgcgaggtgccaggatgagtggaaagtatctcacaggagggaggcgagttgggccagctcggagggagcagccaccccaaggagcaccttcaactatgaataattctccacaggtcatgtgaggaggacgacgaagcagccccaggccctgttgagctgagagcagatgtagggcagagagtgagcccacaggcaaggcagggggtgagcacaccaccagcagggcctgcctggcagggccctgtgaaggagctgtgtgtgcacgtgtggccgccactaacccgcaacgtgggcgtggatgtgtctctgtggttgtgcctggctaattcggccttgacagcagatacccctaacctgtctaaacaccccagtcaagccaagtgccaacactaatacaggtctaaccaaggttcttaccagaaggggatctctaaattttagcttgtctccatctcccttcctgcctctggagaacctggcttccccatcccccagctttatgtttgaagagattgtgttgaaaagcaatggacagagcttccccttgggagaggctggtgccctggcactcttctgatggcagctgtaggactcaacactgcacccctgccttcttctctaagtccttatggcctcatcagggatgaaaaagcctgagaagtaagtagcaggagaaggctttttgcctgagtttgaaagaatggcagcctgaaacaaaaatggaaaatctctctagaagtggttctgtgaccaagtacagattttttccaccctcgattgcttgtagatcagttttgtggaaatccacctatgccttttgaagacccaccttttaagcttcaggatctgctgtggtttctaatcccatgttcctctgagtgctccccacccaccagcatccccactcctaagcttgtgtgagacgggcctattctgggttccttaccatgtatagactgaccagcagtgaggtcacttgagtgtggagccaaatgatgctgcaacttgtacttggcttttgacctgtcctcccacaggaggagtccctgctctactcattctggggatctgccccagagcctgtccccttcctcccctttccctaagttggtgctttgtccagggtatgtggcccgtcccttgccaggctggggagagagggctctatccccgagttactggggaccacccagctgcctgttcccaggggcacccgaagcccctgctgcgtccttaggtaggtgccagggcaggtcttatgagaccgtcagaagggatgtttctgtgcccctcagttgctcatccagcaacagcttaggggctctgtgcctggggtcggggggtgcctcactccatccctgtagcagttgtgaaaagagggacccttctggtttccaggcagacagcaatgcatttcccactgctgcccttttgttacactttctgccttgattctccttactgctgaatcccagcttctagaatctagtgggccctcagtcatatataagtggacagaagaatctctccactttccctttagtaaccaggtttcaccacccagtgggcctttttctaggtggctctttagatgaagatctgatgatacatgacatgtatcatctgtccccctatctccactcatcaaagtggacttcagcacccgcaggaagagtactgaagggcagcagggtgcagaggaaacagcactgtagtgggagtcaggagcctgggatctgctgctgacttgatgtgcaccttcaagcctcagtctccccattgcccgggggccctctccacctgcttcagccacacccagaatcaactcataccgcagagccctggttaacatcttacctcaaggaaatgggtactgggaaggagtgcagaaatttgaggaaattggtagagacagagcgcctctctgctgcagggcttcctgtcttatctttggggtcactcagacttgggttcgaatccaggatcttccactgagtagctgagtgtgatgttgagtaagtcacctaatctgagccaaatttcctcacttgcaaagccaacagttgtactcaccctctag

SEQ ID NO: 33620 - DNA, 876 bp, Bovine  19866880714624
  misc_feature (1)..(1): n is a, c, g, or t
nttaaaattgatcagacagtgtatattcattgaacaaaaaatttttataatggggaaaatcagacatttgagaggaaaagaaagtactgtagccaaccaagatttgacagcatacattttcttatactttcatttctcttgcctttttatcctttgagaagattcttaaaattctaggtatgctgccttattattattattattttcagtgacttaactaaaaaagtgtgtgtaatggcagtgaacagaaactacaatctaaacatttgctcattaactcataatgtatagtagtctgatgtgatatgtaaccaacaaaggtttcaaatgtagaaacatgaaaggttccttaattatctgaagtgaattagtaaaaagtattctctggaattttgttttgaagtctcttaactcagttttttccattgagatttttgtttttgtacctctagtaactgctcctgggtattcagatttttatatttatgtatgtactccagatacattattatctttttgagaaggatgttagttgacttagccagtttctaggaatataaaaggaaatataatattttgtttctaactattattcacactgtgatgttacaaatattagggacctgagcagattcccacttcaaccacagtgcttttcttaagcatagttcatctctacatacatatcctatgtgaaagaaaatttagagccctcctttttaaaaagctttcttgctttgcataaaacttgaaagtatttaatttcaaagttatattgatattaaaacatagattcagtcttgtcttaaaagtgtattacaatttatttcttgccatttttgtgtaaaatttacagaaagagtgttacaccgtgcg

SEQ ID NO: 33621 - DNA, 1311 bp, Bovine  19866880765359
  misc_feature (1)..(1): n is a, c, g, or t
natgtaaacaaaatttatctatgttatacctataaaccactttttaagttaattcaccctgtgctgaccctcttaaaaaaaaaactcaccaaagtcacatttagactgaaaagctgatacagatgtttaagtggttccttggagacaactgccaattacttaaaactaccgatactgaatctactggtttattgcatcactcaacgtaaaagaccaaaatcattccatgttggtcttccagtaatgtgctttctgactgggctcccagattctgctgtccaaagtgctgaactggagattctgcagtaactctcacacaaaactgagaccagatgtccagcaacttcgtgcttcccactgcaccagtgaaaaaaatcttggtttgaaggatcagtctgctttggttgaaaggaacttcgaggatggaaacttgaggtgaagccaagaagtaaaaggggaaacgccgatgaccctcaaaggaaaatcaaaggatccgtccatcccatggcctcagcctcacactccgcagtcagactgcttgtcctgaagctgcctcgtcagtatctgatgagaagacaggaaagccactcctatgtggaagaggatttgccagaggttcctcagcccatgcaggtacacgttgcccaggcaaatgaagagcagcatcagcaccaccttcatagtcctggctggactgtagaacaggtacagataacactgaaatgacaccagaagagggaggcccatcagagatagcaagatggccgaggtcagacgccaggtccactgatagtacctgccctgcagtggcgtttcatacacgttggcttagtaaactgaaatttgttacagtggagcttggactcactggatcagttgttgtcaatcagtggatgaaagtggggatttggaagagataagaaagtgaaatagaaggttacaggaggaatgagaacacagccctcttgaaagaaattaagaaatacagacagacatgtccaggctgtgctgtacataaagaagagatgtgggtcgggggcagacagccaggtggggataccctaacaagagcaactggcctaaaggaacttttcctttgggggagttataacaggtgagaaagttggtgagagaaagctgtgcttttactatgttagtttttcctgagttacaactacataggggaccactgttccctagacagcctccctattacatcttcagaagcatctctgactcagggaaaggtcttccagaatgatgcttcctgtagggctatcacacagaaagaggacattcttgctctgcaaa

SEQ ID NO: 33622 - DNA, 1366 bp, Bovine  19866880912805
  misc_feature (1)..(1): n is a, c, g, or t
ntagcacatttaaggatgaagtagttgccaaaaatctaagtaatcaagataaacagtattttagttcagtatttctaaaaaaaaaaaagtaaactaatgcaaagaaatctttaaaaaaaataaaaaatttaaataaagacagaattggtattactgagttttgttttgcctgatgccctaatatggttcggccagctgtactgttgtgggcctgaagatgagccgggggagtctctaagacctgagaaccataggcttgaccttggctgtatgacataaaaagtatgaaggtgaaagaacaaggttgatgaagactaaattgattctgttaatgcttttagtgctttgtgaatagaaacaactcttatttttggaaaggattctcagtatattaaacatttcaacaaaagagaataatgtataaaagtacttatgatagtccttaaaataccacaattattatttaaagttttgtggattttgccgtattaacttacagcaggcatggcattggtgttttaaatcgaaacaggaagctgtcaaggcttagataacttattcatggcattaacaaggtataatttggtgtgtaacagtgttgaacagtaggaaaagttaatgattgcccacctttcagctaatcatgtgattgctgttgatataattacctggtaggcagggatagaatcatgtaatttgctagcctggcgctgcatacttacaaacattcgtgctgttgtgtgtccccaagcgcggtttctgaaatgtggccctctttgtctttttctgctgaagaagccccatgtatcatgttcatttggctctttgttatggtcaggatgtgttgcttggactgagagagataccagatttttcagcttctcttccaattgctatggatactgtgtcagtgctattgaggtctccttttgtcaatttcagataggtttccccttgggcgctgaaatccatgtccatcctgatattaaggggccatttgttcaagtgcgagagggcttttgaaagtgtaccgtgatgagaattagtttcaaaaaattataccagagagggttaaaacttgctgaacttgtaaagcctcacttctttgctcacccccagcacccacctttctgattttgctgtttcgggaaagtcaagctggcttagagtctccctgtcccagagagtgatttgccagggctcctaaaggggcctgtaccctggcaggaaagcccacttggtggcatcctggttgttccttggatgtggaatggtttcttattaggagtcccatttccttagtaggcttttcagatctttttatttgcctctggtgttagttttggcaagatgcatatttcaggga

SEQ ID NO: 33623 - DNA, 3123 bp, Bovine  19866880996644
  misc_feature (1)..(1): n is a, c, g, or t
ncatgcagatctgcgaccagtgcggcaagcgcttcctgctagagagcgagctgctgctgcaccggcagacagactgcgaacgcaacatccaggtgggcctccaaggggcctgcagggggcagccatccaggctgagccaggccggaactgggccctgggcacccagtgtcctgctgcctgtgttgtctgcacagtctgcagagagcaggctcagccccccaccccccaaccccgccccagggacagtgggaccagccccagcccaagggtgagcccagagtggtgagagctcaggggatgacgtcagggagagcttcctggaggaggcagatagagctgggcttccgcaagagtgcagaaaggattggaacaaacaggacccttgccagagaggcagaggggagcagggactcaggagaatgagaggagagagttgtctgagcatgtgaggctgggggacagccagctctgaggagggatgagtcagtgtttttggactgctgcaaggccagcagggcccccaggtatatagtttggtagattgagcagtgcaggaaagcacagaggggaggaggggttttcccggaagggggcgccattttccacttattgcaagggctgagtggagcaaggggcagccaggcgggaggaaacccctgcattcagctctttggaggtaccagctggcctgggcatggggaagagggactggatgagcagttcgggaagtgcagggggcccaacaggaaggctgctggggccaaacaggggatctgggctgactgccaagcattgagccagcctgcatctgggccagcctggcctttcagggtgaagacggcacaaggccagccaagtgattttttgccttctctggctgagagtgaggttgaggggcagtaggtaggcgatgctaattgcctgaactaattgctaattggagaaagtgttacctgagggttacctggattcctgccccaccctcaggcacatgctcccacctgcctgcctgctggcctgccctgtgactctccacatgcacacccccgagcttccctcctgaaagggaaagacgcttgtacttctaccctgggtaccctgacccaatttctgcctaagccctggcctactgcaggggtaagggcccaggagacgaggaggaggggagtgtggtccccagggttcccactaccatctcgtgtccaaaaggcccttgcacctcctgcagtcccccagccctttggaacctgttcccttggggatctatctctgtggtgtcaaggtatgggccccagcaggggaggcagcagaaataatgtctcagctttgccagaacttgttatccgaggggctcccccttgaactgtagcctcctcacccactgtggcccttcagccagttatgtgtctctcctctgtagaaagatgtcttgttgaaatgagcacagaggagggacttcgtggaagaggtggcccatgaccctagtgagttcaggatgaggagggagggccccaggctgcaaccctgggcgggtgggcaggtgggtaacattagggatttaccacccctgactcagaatatcaaacgtagctggtccttggccaccaagatctctctctcgagcacagttcaggtggggaaactgaggcctagagaggcagtgacttgtcctaggtcacatggtcctgacccagggcctaaagtcttttcattccacagtgtgtgacatgtggcaaagcttttaagaagctctggtccctccacgagcacaataaaattgtgcacggctacgcagaaaagaagttctcctgtgaaatttgtgagaagaagttctacaccatggctcacgtgcgcaagcatatggttggtaagtctaggcctgtggcggaacgggcccaaggtccaagctgggccagctgctgggtgtgctaggaagtctttcacatccagggacaatataaagggatgagaaagcaccaagtagctgggaggtggggcagggacagtggatggggcagtggggccgaggagggggtagggctagtctggggccagggctgccatgtacggttgggcacgttgcacatggcacaagggctcatgacaggagggcaggtggagaccagaatccagctagcacactgctacccaggctggcagcccaacatggggctaggtccacaagagcaccttctgctaaattacacagagtgcttactgtgtgggctgacacagcccctgtctcagtctgaggacagctatgcccctgacagggcttcagacttctctgaatgcaaccctcctcccaggagtcatacctggacacaagtgtgtcttgggccacttcgctgccttgggcatggctgtccctcccctctaggtgggcctggctgagagtctggctgttgtctgggtggccctcctttctttgcccacttgggggctggagctctccccactgtctagccagggagacagtgagccctggccagagatgccctttctctaccagacagtactggaggcttccgatatgaactgactgggagctgggaacctggggtgtaggtatcagccaggagcatgctaggtaacccaggattggtggtccttcctgggcttggattccccagctctgaactgtgaggggggccctccgtgtctccagatgcttcctcccacatcttccttggagtttgttttggcagggagtgcagataactccttctggatggcaggggacccaaggctgaggcctttacaggtgccatcctctgtaaagcccagccaccttggagacccaggaccactcttcctgtttttatagaagaggatgctgaaactcactgaggctcacagcagccatacagagaaccagtggctaggccaggatttgagccgaggctaaggaaccatgaaggcctctgtgcttgtctgagcagacagagacctagcggggggtgtgggagggagggacagggagggagggggaaggacctcgcctgggggacagaggccacggggcaggtcccagggtagatggtgccccaggaggtgggttcaaggctcagcgtggggtcggtccagcaggggtcccctgggagaagccagatggtccctgag

SEQ ID NO: 33624 - DNA, 1642 bp, Bovine  19866881072256
  misc_feature (1)..(1): n is a, c, g, or t
ntgacctttaggcccttggcgtagtctcttagctctgctgggctagggaactgggtgggtgtgggtgggggaaggctgtagaccccagtggcctagagccaggggttggcacacttctccctaaagagccagagagtaaatgtttcaggtttgttggttctgtggtctttgttgttgtagttgacagcagccacagacagtaccttaaggaatgggtgtagctctgttccagtggaatttttatttatgaaatcagacaggggactgaattttcagtggaccatggtttggtagactcctggtcgacaccttcatgccctgatctatatcaggatgtcaacttaacaagagagaaatatccctttttagttgagaagccaaataaataaattgaaagggcttctggtgggtctagtaataccccacccactcagcattgttaagccacgaacagttggtccatatggttggattctccaggcagccagagcttattgtttttaagcatgagctcttatttcacttgacccgttttcagtagaaatggctagaagggtattagaaattccttgggctttgctagaatggtgggaaaggtgattaaccttttaggtagagtcagatgcatcttttatgaacactgtttggtagaagatttggagatgtgtccaaagatggtagatgtgcctagtgccctttttaaacattctttgtggttacattttttgtgtgtgagtaaccgcttcattgagatagaattcacataccatataattcacccatttatagcatataatttgatggtttttagtatgttcacagggttgtgcagtcatcaccacagtcaattttggaacattttcatcgccctaaaaagacactccatgccctatagctgtcacccaccaatgcactcacatgtcccccagtgggactgcatttttaatgagctttcaggaagtcacttcttggtttctgctgtccttgtttttctttgctcatccctggccttggagagcagaacaagatatcttcttgagcagtcatctgtgctattcaagtgcacgcttaacagaaactttaactgctcatggtacttgtgtatcataccaacgtcacctgataagataacttaaaattttttcctttattatatttatcaaagctttatatttctttatttgtattctgctttgtaaaaagttatcttctgtaattttctattaatgcattttgaatttatgtttgtgttggtttgaaacctggttcaagtaacatggaattgtttcatgcttaggttttattgttttgtctatttgcttattatcaggctgtagtgaactgtttagggatgagtttgaagtcttttaatatccacatgatctcatgtggtgttttgaaaaactaaccattgttcatttataaacagaatttcctgttcaggaagttaatttagattaacaataaaacagttgactgcattgaatggtagaggcactgtaggtattttgggatcacaaaattttgttctattaataaagtctctgtgatctggcacataattctttatctcaaagtttatcacctatgctaactgacttccattgtcccctggtaaagggctgactttgggaaggagaag

SEQ ID NO: 33625 - DNA, 966 bp, Bovine  19866881107335
  misc_feature (1)..(1): n is a, c, g, or t
naaccctgctttagagttctttctgacctttcctcccccttttggggcaaggattagtgtatccgtgaccattattattgggtttatgggcagcagcttagcaaccatttcatggcactcggctgtctcgtttggtctttgctcttagcgctcctcctgcctgttcttctctctcctgtaccccatcccccatcttccgcctcgcccctctcctatttttctcccatttctctccgtcttgtcccctccccatggcctctcctgcgggtccctccctcatcccctcttccctccccacttctctcctggccccttcttttctctccctagtcccttcctcctgacccctgccctcccccttcacccttggcttggaaatcctttgttcctgtgacccagcccccctcttctgccccaagcccccagccctgtcagcgaatccagctttaggtggatgttgtctttggctttttgcctgtagatttctccaacttgagaccccatgtcctattttctccatggaggtggggagtaaaggggatcccagcattcatgagctcagataggctgtgtctgcaggacgtggccatttctgagctaatccctggctttgctccttgctgtccccggttctcacgatggcctgtttagggagaaggagccctgctccctctgtccccaggggactgggatgtggaagaggacaatgctttgacctcttagggctcttgatgacttgatggacagccttcttcctggccctttaaaataactttggttagcaggaggcagtatagtttaaataaagcaaaatgatgattgtgatcatagtttaatattttgaaaatggaatctcgaatgttcgttgccctccggttgtggttccttgtcctgatctccggaagtggattgctttgggatggaaagggtggcccgtgaccagctagttctcttcacttgttggag

SEQ ID NO: 33626 - DNA, 885 bp, Bovine  19866881181254
  misc_feature (1)..(1): n is a, c, g, or t
naataaggtcaacatgtactgctggactttgcagatggcagaggccagggagtttattactgaggtcagtcccaccttctcaataacattctggaaggcagtaggtgaatggcgggtgattctacacaaggcctgcagcgagaagaaaacagacacgttagaagactgcaatggcacaagccaacccccagaaagagagcaaatacttctgtgaaaaggagaaaaaggtgcttaacttgctcctccatcacttatcttggcataagtaatttgaacaatttagacacatttaaaacaataatccaacttccaataaaaatttaagttgggaaacacagggcagagagggaagtgggaagggggtttaggatggagaggacatgtgtatacctatggctgattcataccgatgcatggcaaaaaccatcacaatattgaaaggtacttatccttcaattaaaatagaaaattaataaattttaaaaatttaagtcataaaacattagaaaatcctacaagtatcatgtacgttatgctgctgctgctaagtcacttcagtcgtgtctgactctgtgcaaccccacagacggcagcccaccaggctcctctgtccctgggattctccaggcaagaatactggagtgggttgccatttccttctcctatgtacattatgagttaactgaaatgataaaaagtttttctgtatagactcatcaattattttaagcaatgaaaacattaagataagccttctatacgtagacactaagttaaaggctgaagaaattgtcataaaagtaaatatttaatatttattgtttagtatgtgaagaacacgatctgagaatatctaaagcctatctcacttaattctcccaaata

SEQ ID NO: 33627 - DNA, 1020 bp, Bovine  19866881183722
  misc_feature (1)..(1): n is a, c, g, or t
ntttgccccttctgcaggaatggggcgcccacctgtacccaaccgtgtcagtggaagagcaacgaggagctcttccccccaccagccaggaaggcatcagagaaggtggtggaagcctggcttcccacccctgcccagcaggaaggaggagctctgccgcatccctggggtgtcagcagaagcccacagggcaatctgggtttccacaccaacaggggaggaacaaagcaacgccatccttcctctgccagttcagtgtcagaggagacccgccaaaacgggagatttcaattaaacccagagtcttaaaacataacacccaaaatatacggttgatacagagcttccatttaacaagatgacagagttctggagctctgtttcacaacaatgcaaatatacttaacactactaactacacgtaagaatggttaagaataaattttatgttttttaccacaattttaaaattttaagtaacaatactaattaaatgcaaaagattatttctcaattaacaggtaattattcaatcattaagatatatgaaatattagttaaacataaaataaatataaaatcatttaattaatgcatattattttactacctttgtgaaataccatgttttaaactcaatcaatccatacctgtgtgaagaaaaataaactgcgaaactctcagcctctcttaccacaatttacacagcaaaactactcaaatggtactctttctaatacaatgataacaaccttcagtgacttggtaaattaaatatcaaaaattagatacacaaactatacgttccgtgaggctcaaatttcttagcagaatcgaaatcagactaataaaagccaagaactggtttactctctattttgatttttaagatcaagtttactatgtaaacataacaattattaaccatagaaattttcagctttataaaaaatcaaatttaacacactgcatttcatggataagaaccacgacaagcactatattttaagtggccccatt

SEQ ID NO: 33628 - DNA, 1149 bp, Bovine  19866881236412
  misc_feature (1)..(1): n is a, c, g, or t
ncatgtgggttgttgcgaaagctgaactaagtcttttactcttaaaagaattgtttgttagagtccttagttatgaggaattactagcaagttattatttggcccctaaatggctggtgtcaaaaaattcttatgctctggctctaaatccatttgctttcacttcttcctcctcagaatgaaagccacgctacctcacggtgtttggactacaaatcatttccttgccattgatttaaaataaaacaaccctgagatttttctggagatgaaagccttctttcagtgcacaccctttttctccaatggagaaacaaagacatagtcctgaagtggcctggaggcagcctcttaagatctcttaagcaaatggcatatgttatgaaataccatgtgtatgactgtgtgtgtgtggattaaaaaaaaaaatctgtcacctcggttttcatggtttggaaactagttgcagagacttagaatttaggccatttggggaagaggaggctgggccattatgaaattatcagttaatttaagactgtttaataattaatattaagaactgctttggaaaggacccactgggtctgtgcagaacgtggggtctagatcctagggctctttctggcggtttatatatcactctctgtgctgctgatccacttcggtttgctgaccggatatgaagccagacccctttccactccagcgccttgccctcagcaacacccccgagtgtgcacgtgcggatgtgcacgcacacatgcacacacactatgcagtgtcaagactttgcagtaattagtagacccctgtcccctcaccccacacagcttggggcttttctctggaatcaaacccagtaaggctgaacctggccagactttgtctggcagacttgtagcatcagtagtgacatggtcatttttatttcttgcagttttatgtgctgaacgagttggccagatgactaaaacatataatgacatagatgctgtaactcggcttcttgaggaggtaagtgattcggggaaaggcaaagagtcatttatacttgactgattataatttatattgcttaaagcagacattactatttttcttggtgaagaatgtcagaaattgagccctctcaaagtagattcaggg

SEQ ID NO: 33629 - DNA, 1202 bp, Bovine  19866881303011
  misc_feature (1)..(1): n is a, c, g, or t
naaaacggattagtcagtcgccaggggcgggaaggaagagcatgagatagagggaagtgggtatggctataaagggcaataagggtgatccttgtggtgatgacactgttctgttcattaactatctcaacatcgacattctgactgtgatactgcctgacagttcttcaagatgtcaccatcagggaaaattagatgaagtaccatatatacccagcatctctctgcactatttattacaactgaatgtgaatctacaattacctcaaaatcaaattttaattttttcaagttaacctcattctaaattcaaaacccagatccaactttctgtttcccaatattcatagcagggacatatagctctgttccattttatcatccactggccatttggtatcagtaaacatcacaggaaattaaaacattttaatgctacagacccttaaagatataaaactgtctgaactgcctccagcataacagaaactgctttgaaactgagtgcattatagacagacaaacatcatatgacctatgctagaaaagtcacagcagcccaacatctcacttgcaaaacttaaccttggacaccattttacaatgcacaacaaataagtttccctgcgatattactgtatagattttcaactcattccgtaaaaatttcaagaaacattaatattaaaaaggaaaactataagaataaacacataaatgactaacatcaagcaggaaaaataactttattgatgtaagcatgacactaaaatatgccaatactaaacagaacaaaaaccgtaaacaagattgtttagttcttccaactcagaaatccaagtaataggtggatattgttcttaggcatgtttctcctatagtgtataaaaatttatctggccttttaacaatgaagctaaaatagatttttttaatgggatggatattcatgtattatgctactattttatgtattttttggaaaatctaaggaaaatgaggagaatggaagggtgtcttacttctaggattattatgctttaaggcatatctacacaatcactgattctattaccctaaaagaaactatgcttctgtaactatagccatgactggttgcttgattacttcaaataacaattattatttataattataaataataataattattataataacaaccagatacaataatagga

SEQ ID NO: 33630 - DNA, 2471 bp, Bovine  19866881320320
  misc_feature (1)..(1): n is a, c, g, or t
natgtgatttttatgttttaaatgtttgtggaaaaaaatcgaagaataataatattttgtgatatgtgaaaattgtatgaaattcaaatttcagtgtccattaaattttactggaacacagccatatccatttgttcactattttcttgggccgtttttatgctatagcagcaggattgaggagttgcagagagtttgtatgtggtgctgtcattggtatatatgctgttcagtgcactacacatcacagtgtattatatttcaaatttcattgataaaacatttgtgaaaacttgttttctttttgttacataatcatctttaattttcttcttggcctagaaatcctaaaatactttctcttcgacttttaagaaaaagtttgctgacccctattatctggtattttttttaagtagtttataccactgtcttgtatttatggttgaatatcattggtgagtttatttggtcattgcttctctttggttacataatatctttggaagttatatcctgcagaataattttgaatcataattggtaaatagttgtgtcataacaaagatagcaagttgatctatttcattagaatgcttgagatttgatcagtcacttgggagctaaaattaatgtgctaagaatgcaagatatgcaatatgaaaggataagaaacagggactgacagccttatagagcttgccatcttactgaatttgccagcagttaagttctttatcggagaaggcaatggcacccccactccagtactcttgcctggaaaatcccatggatggaggaggctggtgcactgcagtccatggggtcgctaggagttggacacaactgagcgacttcactttcacttttcactttcatgcattggagaaggaaatggcaacccactccagtgtttttgcctggagaatcccagggacaaggggagcctggtgggctgccgtctatggagttgcacagagtcggacacgactgatgcgacttagcagcagcagcaagctcattaccacttatactttgtttagcagaagctggattctacacttgctctaattcatttgttctcatgttcagctgcacttcagtgtaatttggcaagcttttaaaaataccagtttctgggccatacaacagagtaaattggaatgttgtggggaaggaggtggagagtggcaacgttggatcagccatgtaaaagataccagatgaacattaattcatgctgaacagttagaggcaggtcatttggttcagtgatgtgttcttcatgaggaaaatgaggtaaacagttgtctaccaagagtaccggcttctttcattgtgagaatcaaatgatatcatgaatatgaaataaccgaaaaaactataatatactttttagttaaggttttcttatagtggcattgtatgtttatctggagccagattcctggctgggaaaaccctgttatatcatggttgtaaaagtcatgtttcattcctctatgtgacgttggacaacattcttaactgtaatcttaaaattctttatttttaaaaaggagttgataatagtacctacctcatagtattgttatgagaattaaatgaactaataatgcctttaatgatatctgttaacatttatttaaaggatttttttgatgagaacctacttatagcacaggaaactcactcagtattttctgtaatggcctatctgggaaaagaatttcaaaaaagagtggatatatgtatatataaataactgattcactttgctgtacacctgagactagcaaaacattgtaaatcatctgtactccaataaagatttaaaaaataacagaggatttgcttagaaaattaggtcatgtggagtgcctcattctataaaagtgttagatctaagtgaactgttattgtattaaaggaacataaattctccgtttacacactgagaaaactgcctagcatttgtttatttttaattttcaatcttcttttccaggaaaattcctgatgttacacccactgtaagtgaccagaaaccatctgtgtcaaagtctggacggaagattaaaggaaggggcacaattgtatgtgtgttaaaacttaatttttttcaaattagttatctgagcagtaaaatgtttttacctgtaggcaaatcctagctttaatcttaggcatagtccaaagtctgtccagggagctagttgtattctcttaaattaatatgtagctatgcgaaggcactgctgttagatcagtgtttattgctatgtttgaatgggtttaaatattgaaatgaatgtgaaatagtatgttcagaaatcttagtatattgaataagctaatgagtataaccattaggacttctaagggaaagtttatgtgtgattacaggtgaatatctgcctttcctatttcttttagttgatttaactttataccatcattaggtacttcag

SEQ ID NO: 33631 - DNA, 591 bp, Bovine  19866881887636
  misc_feature (1)..(1): n is a, c, g, or t
nccctctgcgggcccagccctgcactgggctgtaggggacatgggagggtgagagaccttaggccttgattccatgggatggtcaaaaagccccaggctagggttgaagagtgaggtcagagtgggaagggcacagtgggttggaataatcagggcaggctgtctgcaggaggagctggagttgggaactaaccaaataagatgtggaaagacaggggagggtaggcatggcaagaccaaggcttgaactgtctcatgaggtgggggacagaagttgctggagaggggaccccactgaaaccagtctgcccctagactgagaagcctccagcaatgggagaatgtggtgccagtggtggtcccaagatccctggttcatccatggaaaatttgagtggtcagagctcaggggtgggagagccagagggttgctggtgaggcctggaagctctgtgaccctgagaggctgtaagtgttgccagagtatgcctttagggccagaacttggtggggctttgagagctcagaaggtgggtctcaccatagctatcagtgagagaagaattatgccaattgtcataatgtctgctt

SEQ ID NO: 33632 - DNA, 1625 bp, Bovine  19866880347345
  misc_feature (1)..(1): n is a, c, g, or t
nctcccaggtgacaaggacagaatcatgtaaactcacctgatgcaccttcaagtgggttcaggagctgccctgcctttcaccaagaaggaagcttccaaacaggaaggaggagaatctgtccatcttccaatgggagggtcccaggagaggtgcagctaaaaatgggatcaggctccctggagaagtgagaaaagtcgtgccgtcgtatttcagggctggtaattggaactccattaggaccagtctacttccacctgtgtgcgcatgtgtgtgtttgggggcgggaggggtgggagggtgtggggagtggaaagccagggaatcaggagaggaactaaaaacaagattgaggtgaaggtgagtgagggagagagggaagagagaaccaagcaaaagctggagaaagaaaagcaggaactcgtggagcgaaagcagaaactccagtatctgttactgtcccttatttacacccttgcttggcttggctacacattttgctatacaaaatggaaatttcaggccatcctagaggtggcgatttgagctaaacaaagatattcttagtgcacagtatgagatggagaaaagcgttccagtctctgttcttaagttggcttgctaattctctctgtgcccccttctcccgggtgtgagaaggaacagtgacattaaccttcacaccgcctcttggaaacccttaaagcctccaaagatggcctttggtttctctgaaaaaggcattatgttaaatgccaagactcaacaccttagtaaggacagggaagtgtgacttttggattttaacatcaacctattatggaacagaaagcataaaaagtacttcttaggtgttcattagggttactcctctatttgctcacactgagcgccgacaccacagtgcctgggcccaccccttgcctggaatccagcgcgtctgtaatgaggttgggatagcccatcacacgccacggcatccatggcgtggagggagcccaggtactgctctctgcccctgccagggctagccatgacactatcacccacattgctgtgttccagatctctccacgcctcaagggctccgattcaagacgatcacagagaccaccgtggaggtgcagtgggagcccttctcattctccttcgatgggtgggagatcagcttcattccaaaggtaacccccacctgtcagatggccaaacagcctgatgtggcatacccacaccctcgacttaggattggggcagcaaaaaagccaccctcccccccccccacacacacaatctctgtctctctctccatgccattaaggacacaagggggcacttggcgggctacagaacatttctttcacaaaggcgtggtaatgactgattaacaagaatggccccaagcctggtacccaggccttggatgacaggagaatgagggagcagccatggcccagctctctgctcaaaaagctttacatttttagcaagctgcaacttcagtgagtctgaaaacctagactttcaaaaagttggggcttctctctaggacacaagaaaagctaaagccaatcagtctcatagtcaacccacagcttcattctgtgcaggcagaggccccagaagtcag

SEQ ID NO: 33633 - DNA, 3104 bp, Bovine  19866880348558
  misc_feature (1)..(1): n is a, c, g, or t
naattaatacttatcagtcatttagataaagtagttttttgagttttttaatgttataaacacactattagtcatcatttttaatagaaaaatgatgatcatatttataatcaatataaaatatgtacaaatgccagacatgaacatctttaaaatttctccttcctggaaaggatctactttaaacatgcctcaactgtctggcaggcagttttgtcctcactgtgttaaattatcatggatttcttagttaatttttacatttccatgtaagctttaagatttatatttttccagttctagaaaaattcttctggtattctcatctgaattaccctatatttattagttaattttggaaccagtggtattaagatagttcatcttactatagttacatgggatatctttttgtttgtttggattattttctatctttcaaagagatttttagttttagttttttttgcttaggttttaggtctttctggttaatttttttctgtttctataattttgttgttatttttttccattcctttaactactgtttgctgagagtaaaaaacaaaaaactgttgatatttgaatatttgtattatatctaggcattgttcttattaaatctggtaactttttattaccagatagcctttgggctatctgtttatatttggtagtagccaaaaatgatgattgtatttttttcttttgtaatgattttttacattctcttttgttaaaaggcatgttatatgatacaattataggtacttttcccatgtatttcctttagttgaatcagctttagtggttttctgttcatgatatccccttttgaagaatagttttgtgggtttttaaaagttttttggccttgctacatgccttgcaggatcttacttccctgagcaggaattgaacccaggcctttgacagtagaagtgcagagtcctaaccattggactgccagggaattccctgaagaatagcattcattaaattcaaatcatttatttaactgtttcttagttaagagcaaattcagtatattatcaggtgccttttcagcatcatgttatataatcatatggtttaatttgttgagatatgcttatacattttctgataccttatttgtgtttctagagtaaacctaaaaatttaggtttagcattaatgtggaattcttttgataaattgctagactttttggcttatatttttaatacctgtaaacataaattggtctataatcctctgtctcctttttaaccatttttaacatctgtattttataactttcaggtatgtaagtcttgaacttcttttgttaaatttactcctaaatgttttattactgaatggcattgttgtcttaattttatttttggattgttggttgcgaggcttcagaaatacaatcagttttttgcatattgattttgcatcctgtaatcttggtactcatgttttgttttgttttttcatagttttaaggtgaatttcttgagattttctatatttaggattgtatcatctgtgaataagaataattttaattcttcttttactatgttaatgcttttttgctttattgtatgaattaaaagctcttatataatactgaatgaaactggcagaaaggatttctttatcttgggggaaagtattcattcacaatgaagtgtgatgttagctgtgagtttttgtagataccctttatcaggttaagtttccttctattcctagttgtgaaaagtatgtattattatattattagatattgtctaaggtttttctacctatattgagatgatcttgtgatttatgttatttattataataatatgaggtgggtggggtgttgttttttatgttatttattataataatatgaagtgggggagttgttgttttaatgttaaagcaactttccattcctgggaaaaatccgtcttgatcacattgtgaaattctttttacttgttgctggatttagtttgctaaagtactattggcctcatagaatgacttggaaattgtttcctcatttgcttactgaatgagtttgttaaggattattattatttcttctttaaatacttggcagagtgtatcagtgaaaccctctggacttggacttttctttgtggaaaaattttatattacctagttcagtttctttactttttataagtctattcagattgtctatttcttcttgaagttctttttggtagtcattgcctttctaggaacttgtaaatttaatttttctaattagtgggcgtaaagttgttcataacattctcttgtgatctaattcctttaaatttcctcttcctttagtgttctgtagtttcagttgtaatattccttctttcattcttgattggtcatttctgtcttctgtcttttttcttcttcgttgttctagctaaatatttgttaccttcttcaaagtgcatgtatgtgtgtgtgtttatgttgggttgtgtgtggtgggtggtgcttcaggggccagaacaccacacattcccactgtttttaatgttcttatgcaaatttgattattagaagagttggagatatgcaaactgaaccttctagaatgactcttaactcactctcagtatacgtaagctaggagaactgttctttctttcttggccattggaactgttgtgatcaacgtttgttgagatcgagaatgtgatgccatggctgtaatcaaaggatcaaaaattcactgtaattgccacagagccgcagactctgtagcagacactgtaattgccacagtattgcatctgttccagagaacatccacatctttacagtgatgcttgcaacagatatttccaacgcagaatgaccacagaattccaacctttcaaatcatacataagtgcatcccattgtgaaatctgattcacatctagaagcatagctacatgagaatctgggcaatatagtttttactttccatcttccattggctgtaaattctataaggtgctgggaacggatactaaatgtcatctgccccatccttcataatgctgaatagttgatgtgagttaaggacttacttttcctgg

SEQ ID NO: 33634 - DNA, 1687 bp, Bovine  19866880391081
  misc_feature (1)..(1): n is a, c, g, or t
naaccgctggagggatgggattcgtggaactttttaatgttactgtctgattggggaaaaagaaaaccagaacatcactgtagaaacaagcaaagagctgccgcaaagaagagaggattaggctattcattaattccacaggaagggctaagaccttgggagaggttagtgagaggcagattctagccccaagtagcatatcctgcctcaagacatggtgagctccgtcactggaggtgttcaagaaacaacctttctaaaatatcagacaaatttcaaaatgaaaaataaatttgaggagactccaaatccaattgagatttttttaatggagttgaaggaatggatggataagtgtggaaacggagggagacttgagcacagggatttcttgttattttttcagagttccaagtctctgtcctctggttcttcccaactttcagaaagcatggggctccagaaggattaagacagtgtgcccatgccagggccctgagggaagatgaactgagggaagactggggcctcttaagcatctgtgaatctgtcaagaaaaaaaaaaaggtcacccaagagataagaaaaatactccaaatcattcccagactgaatatttaacaaaattgggttttgattttttttaataaggcatcagtggctctttttaagcaacaaagagactgttttatgcaaatttcccctcagggctttcattaagatgttaacatctttcttgtcacaatatctactttagtacaatgaatcataggacttctctattctcttgctgagatatctttgtaagataaactctctggactgagagcaaggcctttttctttttttaagtgaaaaagttgagagttctaaggaaagggttgggagacagaagattaaatgtaaaaaaaaaaagaaaaaatggcctctggtgtgggcgacactcctctagtgtgggctactgggcacaaaagctgttttgtcctccatatcttgtaggcaagactccagcatccatgaccttccctgacttccaaagggcagatttgaatagttcctagtcaaggaaggagcagccaagaaaccacctgaaccaagatttaaagggaccagagaagatcatcaaggtcaggaaaggagatgagcgtgctctgcacacatcctatcttgtcatcagcctcacccttgaactattgctataaaagtaaacttagtgaaagtgtccgtcactcagtcctgtaaggctgtttgtgaccccatggactgtagcccaccaggctcctgtgtccctggaatcaggaaagaatactggagtgggtagccattcccttctccagggatcctccccacccagggattgaactcggtctcgtgcattgcaggcagattctttatcgtcttagccaccagggaggccctcatcaaatccttccaagagaggacacagagttttcgagggtggaagtcagctatgtccccttttgcctggcaaagctataaagctatttttttatgtttcacccgaaactctgtctctgagattcaattcagcactggtgcacagaggtgaagcttttgacatcaagaccagcggggaaatctggacaccattctgatgaagaaaatgggctggcttgcactgaggtcaggttcaactcccacggacatcaagacttgtgtctctgag

SEQ ID NO: 33635 - DNA, 940 bp, Bovine  19866880396449
  misc_feature (1)..(1): n is a, c, g, or t
ntttccccttccttcactatctcccagagtttgctcagactcatgtccattgagtcaatgatgccatccaaccagctcatcctctgtcgcccccatctcctcctgccctcaatctttcccagcatcagggtcttgtccaatgaattggctcttcccagaagcccactaggctcctctgtccatggaatttcccaggcaagaatactggagtgggttgccatttcctcctccagtggatcttcccaacccagggatcaaacccacgtctcctgcactggcaggcagattccttaccactgagccacctgggatgccctcgtgtcccccttggagggaaagaaatggaagtaagggattagattgaataggagtctggtgataagaaagcaaatcatagaaaagcacatatcctgagtaagtggttccaccttccctgaagttctgagtggatggtaaaaaaagaaaaagaaaaatgtttgcatgccccaggagtatttgcaaatccaagccactagctagtctatttcaaccccctcagcttgttgtacccactgttctcacagatcccatttatcctccagaagagaggacaaagaggaagtcataaacccgctctcaaatggtgcttttaaaagggctctttgagaagattccataatgacctgttgtcccttaatctatggctcggttctgggactggattttgaaagtataaatgtgattaaagattgcttggtttggcactgaactcattggcaacccttggttcttcacatttgtctttgaaataacagcttcactgtgcagagagctgctggcttcccaggtgggagggcataggtgctgggtgtcttacatactccatgagtagtggagtggggatctggtagatgaagggtagggggattaaactattactggggattttgctttgcatttt

SEQ ID NO: 33636 - DNA, 1602 bp, Bovine  19866880454545
  misc_feature (1)..(1): n is a, c, g, or t
ngagagtctgagggcatgaaacagcgcaacctgtgtgaacaggaccaagagtagtgagcagtcacgttggcctagctccctggggctctgggcaggggtgtggcgacagagttgctcacagggacagacagagcactgtgagatcccaaggccaacaggcagaggcttttctccacatctccatattaaaagggagacacagagtggacgttaaaagggggacagattcccagccttggaaataataataatttttttttaaatgtttatttctcctagccttttccaggtaccagcaggcctgtcctcaaccctggggccatgtgagaaacaggaacaaaatcccagcttccagtcacatgacaatttgccctggatggtggcaacccactccagtattcttgcctgggaaattccattggcagaaggggtcccaaagagttaggcacgactgagcacagatgcaggaaggcagacaccctacagagaggacagagcacttttcttagcctttccctgtgcctcatttcctaaaaatcagatttctgtaatatcagacaagagaggcccctttttaaataagccacatttctggatcctattttaaataagccactccccaaatccatatgtcagaattatgttaccagaggagggatctttatagtatttggataaaacccatccatgaaatctcattctgaatgttatctgggaaaaagagaccaaagagatatagggataaagggatacagtggaaatcaaaggcatctcaagaatttgtatttattcctgaagaggctgaatgcaaagctatgttctagcttaaatgagcataattcactgattgcttaagacctctgggtacattgacaaccatctgaacacagatttaatcactgctgtgttgtgggaatgaagaactgccacgggtgaaatttaaaagtgggttattaagcaagagaaatgttggcaacattagtaatcggtgcaattaccaaaaacatgacctaaagccagtagcatcttctccccgctaatgatcccagcagtgatctctgccaggcagcagtaaggcacatcagggtggagtaagagcccaaggggtccgtatctcacctcacgtgtgaaatgtacaagagtctccattgcccaggatttcagttcagttcagttcagttcagtcgctcagtcatgtccgactctttgccaccccattaactgtagcactccaggcctccctgaccatcaccaactcctggagtttacccaaactcatgtccattgagtcactgaaggcatctaaccatctcatcctctgttgtccccttctcctcctgccttcaatctttcccaacatcagggtcttttcaaatgagtcagctcttcgcatcaggtggccaaaatattgcagtttcagctttgacatcagtccttccaatgaacacccaggactgatttcctttaggatggactgattggatctccttgcagttcaagggactctcaagagtcttctccaacaccacagttcaaaagcatcaattcttcggtgctcagctttctttatagtccaactctcacatccatacatgactactg

SEQ ID NO: 33637 - DNA, 794 bp, Bovine  19866880490293
  misc_feature (1)..(1): n is a, c, g, or t
ncacacacacactcttccagaggccagcccatccacttggccgctcccaccgccccaggcttctggagcgggaggtctgagatcagctgggccaccccaggatgggaggaagggaaaagggaggagagaacgctgcatcagacccaaaatcaagtctttaaatatacactgctgaatagctgggctaagcatcagccagggtgacatgacaacactctccaaatatttagaatgtgtgagtcctcaggaaggggaattgtttttttttgtctgaaatgaggaggtggggctgggggagcggctgctgacgagcaatggcacaggattcagaaggagaaggaactcgaatgtcggcccagaacccttttctctggctctgcctcagtttctccctcgtaaagtcggggctgaatgttctctgaggtcagcccaactctggaaaaaaattaaggcttttacatctgacatccaggtgccacctgtccctcaggggaaacagagaaaagaatggtccctgaggaatccccattgccccgagggttccagacctcaggtgtcacagccaccactgaagtgtttcctgtttttcctggctctcctacggcacaggctgtgtgagctggaatgttacctaggactgcaggtgagggaattcacctaaagagggagcaggtaggatggggagatggtgagagctttccgtaagggtttcgtcctggttctggaaaggccattgcctaaagcccagttttccgaactgagacccactgatcgcaagcccagggccccagcct

SEQ ID NO: 33638 - DNA, 2107 bp, Bovine  19866880570946
  misc_feature (1)..(1): n is a, c, g, or t
nttgtacagtgaccctcaatctaatattctttcaactttatcttaatggctttcccaactaagaagaaattttaacatggagtgagagcctggactcctcatgcaccagtgggagaacagtagtgcagggcttaggagggagcttgtggggcaaaaatgcagaatctgggccccatagacccatggagttactctgcactttcacgggatccccaagtgactcctctacatattaaagtaggagaagcactgatcccaggaccttcaggcctgtctcccaattccaagactgtgacttcacttgccagactagaggctccagaacacaggtatctggcagtcaatctacagtgcagcacagtgagctctctgtaacacaaaagatgtgaaatcaattttgtttactgacagcctgattaaacactcctaccccttaattatttttgtcttctaaaaatggcaagtcaagcggctcaccttccagggaaattttcaaaggaagacacactaggggtgactccaaatcaccctttgcggctattacatcttccatgtgcgctaaatggcccggcactgggaccccacggtgcaggtcaggaggcgcccgcggtgagaagaataaatacaggtgcctcacagaccctgttctcagcgccactccacccactgacgccagcacagtggctcaggcgattctcagactgacgtgccacctctggggtgtcacccagccagctttctttgtactctaaagaaagggagtccctggaaacactgatttgaggacccttgagcaccatccttcctccagatcagcagactggaagaagggcatctttggcaaaagaccgggcagcctggaccgagcctcttggtagatgaggggggcgggaaacgaaaacagagagggaggcggtgtctggctagctcatgctgaattgaggtaaagggtcagaaatacacttgctataatcctacctctaggcacagcaggtgcgtgcgcacgcagagtgcttactgaaaaagagcttccaggaaaaaaaaaaaatcctatatgaatggcagcgtgtgcgccgcagtcccggaagatttcgggtttgaatttggatgcacctgcccaatacacacagataaacatctggagccgttaaatgttctgcatttcagggctgttctggatcaatcccaaatgagggtgtcgcttttttctttcttcttgggagtaaaaacacgcttgaaagatgtagactcctttggatctgctctcatttaaaaagcacagttatccctaaagtgttcagttctctaccacagacagtttcctgctcaaatatagtaattcaaaatatacatccagaattcttagcatctgctctgtacagagcaacatattttgacattccaggaaagtttttttaaaaaaataaggcaggaaaggaaaaaaaaaaaggaaaaaggaaggaaagaagagaggattaaaatatatattctctgagaataatttcctctctgaaaggctaataatatatcaactttaatatttacattgacaggttcttatttggctaattgacagtctctgtatttttagtagagggccattggcaaaagtaggtgaaaacaattagtaatgcattcattatagatcaacttactgaaaaaggttaatagctccttgttttgaatgagatgtctactaaagcttctgtgatatgtgtttttcctttgtacagtgcaatttaaaaagttagtcaatgaaagaataattgaatgttcacgtttgtatggaaatttcttgagtgtctacaggaatgtttgaatttcatttaccctgcctttcactcaggttgataatgtctaggctcagttaacacttggctttctgatcattttaattaaggtacaaataataatccttcaccaaagatatcggacagaaccatttcttaaactacaataaaccacccaatagaaaaaagcaacagataggaacaggcaacacacaaaaagagaaaattcagctggctaataaacatatgaaaagacagtccctctcgcgtccgattctgtgcgaccccatagacagcagcccaccaggctcccccgt

SEQ ID NO: 33639 - DNA, 1258 bp, Bovine  19866880664528
  misc_feature (1)..(1): n is a, c, g, or t
ncccccacccccaaccacccacacacatatactttctttattccaaaggggagctggaccaaagcccagaagaggttccatgaaccttttttttaattctcctgagtcatccagcatatctcttcttaagcttaataataagaagaggaaagaaaattcagcttgaggaaggagcaaaccatcagcgggaggcagtgcttatttcccgtgccatggaggtgagcaggcagcagcctagcacttctggatgaaatgcctgaagtgactgcggggcaggcagccccaagggcacccccagaagacaagtggggaagtgtcagggcccaaggttcccataggccaggcggaaagggatagtgcccttaaacaacagtggtattaagagggtttgactgcaatctagaaagcagtgaaaagatatctttaaaatccatcttatgccctaccatcaaaaaccaaattatctggtatcaagagcaactaattagatagaaagtacagacaagcaaaggggtgggcggtagagtgagaaatccagggcagaaagaacatgccagtcaacaggtgggacagagaaagagcaggttaaacagaatgtacaaaaagggcccaggagagaaaacaaggtgtttgaacagagctgggctgtgggatgggggtggaaacagcactggcttccttagcaagcgtggctgggggcgtcagctctcctggcagatcagctgacagggacccccgagccttcaggatgatggactgcgtcctctgtttctccagctctgggactctgtgccttggggaagggctgtctcagggccacagtatcccgtgatgggagacacgagtgtgacactcccgacactccccttgggaatggaagtagaaatgacagttataaaaaatgaaaaaaaaattatttttgtttctctcccaccccaagtccctatgtctaacaattggatcacccatttctcaaacatgctggaagccaggtgtcttctcagttctgaggcttggagagtggacgaaatatgcaacctgaagctagatttttaagtctgctcctccaaagagctcacattccaaatctgtcactaactattttttgtcttataaattgcttatgttgtaagaggctcagggctccaaacaagtgaagagagcactgcgtatgtaattcaggcagagccccaagccaggagcttgccactcttaactgagagaacacaggggctctgagcattactatgtgtacgtt

SEQ ID NO: 33640 - DNA, 1020 bp, Bovine  19866880698277
  misc_feature (1)..(1): n is a, c, g, or t
ntggtttcttttgcggaggagagcacatgtcttaagacaggaaattaccctggtgattgatgtctagaaaatgcaattaggtcctagttaagcattctccaaggggcacccttccagtgtggcattccaagtttggtgatcacttaatgaccatgcatttgggtcctccgggtaatgaagcatttgtctctgtcaggctttgagcaacggaacttccagtgcccttatgatgcagaagaggtggggatggaaggtagagcagggaagaggcagagcatatgctggataggggacctcagaacaagaacagccagcttggccaaggacgtgccatggttatgggcttccctggcagctccatggtaaagaatccacctgccaaggtagaagatgtgagttttatccctgggtcaggaagatcccctggagaaggaaatggcaacccactccagtattcttgcctgggaaatcccatggacagaggaacctggttggttacagtacatggggtcacagaagagtcagacacaacttagcaactaaacaacaactaccgagtgaggttgcaacatgagttgaggggcaccggttgccttcaatggctgtaattctataatatttgtatttgctaatcaattcactgcttggaatttttttttttttcaattttttgaccaggagggccccctacagtggaagtacagagtcttaatcactggaacaccagagaagtccctggaatattattctttaattccattaccctggggactttggaggaataaataaagtgaccctgcccctgcccttgaggtatttgcactgtagtagggaagatcaaacacaccttatcaaccttccaggcaacaaatttccatttggctcgggtgtggggggaagggcacacaaacacaggaggtagtgcattcaatatggacccactggggcaactgaggcaaggtaaagacggtcaggtacatcctgcttttctgaactcaaatcggctctgccacttaaaag

SEQ ID NO: 33641 - DNA, 1358 bp, Bovine  19866880707387
  misc_feature (1)..(1): n is a, c, g, or t
ngtcccctaaggcaccacttcttttccaactgtattgtacttgttatggacacatgttatcttccggactagactgaatgtttcttgtggacagaattctcatcagatgaatcttttggcacccagcacactgtcttacaattcttacagaactcaggagacattgtctgaaagaacaggaattgatgtgaagaacagtataacatggaagggtcatcagtgatggagttaaggttcaaactgaactccaggacttgtatctgctaggcagacaagcataagttaacctctttgcaaccctcttttctcatctgtaaaattgaaatagtactaattaacaattttgtgagattttcctaaggtaagtgaggtattatacttagagggattgtgaacatttcaaacacactgcagccaattatggagaaggcaatggcaccccactccagtactcgtgcctggcaaatcctatggatggaagagcctggtaggctgcagtccatgggctcactaagattcagacatgactgagcgacttcactttcacctctcactttcatgcattggagaaggaaatggcaacccactccagtgttcttgcctggagaatcccagggatgggggagcctggtgggctgccgtctctggggtcgcacagagtcggccacgactgaagtgacttagcagcagcagcagccaattaactaaaactgattgctgtagagctcagtcagctctatagtcagagaaaagatggcagaagccctcatcccagccacgatgcctccctgggaagtgccaaggagctttgctgtctgcacaagctttcccttaggtaacagctcactctgaagttttagaagcctttgtcattcctattttcaagaaatcttctgaagtcttattactctcttacaagtgaatctaatcagtaaactttctgagagtacacagtgctatggaaatgtactgtatgataaagatgacactagagatcagtggggagatggtagattgcttagaagatggtgctgaaaaaccagccaatttcaggaacttatttaactcagacatttgctgcagatatctttctggagaaaaacacaaccgggttcctttaagtgagcatcacatacatagcacaatgtgcacagattaaagaagcaaatgctgtgattgacagaaggttagtagaagaagatgcaagagaatcactttgtgaccttggggtggggagagactgcttaaatgaaacttcaaaagcctaaagcataatgtaaaaaaagttgaatttgattgaaaactaaggatttatggacaatgtggataaatttgacagatgatatggaaggaaatat

SEQ ID NO: 33642 - DNA, 2234 bp, Bovine  19866880764194
  misc_feature (1)..(1): n is a, c, g, or t
natagaatactgctgctgctgctgctgctaagtcgcttcagtcatgtcctactctgtgcgaccccatagacatcagcccaccaggcttccccgtccctgggattctccaagcaagaacactggagtgggttgccatttccttcttcaatgcatgaaagtgaaaagtgaaagggaagtcgctcagtcgtgtccgtctttagcgaccccatggactgcagcctatcaggctcctttccaggcaagagtactggagtggggtaccattgccttctccccatggatattacctttctcaattttcacaaaatgttaaaagctaccatgttcctcatcttagagtcagggaaacagagattcaggaaggttaagtgagctcaccaagagtgtagagctgggcagaaccaggatcaaagctcaagtccactgtcttcagaactgatacaatttctccctgactctgtgtcctcctgcctatgggtggttggctcaagcttgggatggattctcatccctgaataacctcattcagagcttggggttcgcatttcccctgagttgcgcctctcagccccaatgcaagaactaaacacacctctaaccaagcctgcattggggtgcccaggtctcctggtgcccagtccccctaccctgggataaacctgtctcttggcttggtgggccactgtgtcaggaacatcgagggtcggttctaaggcactgcacagccctcttgctcctttggctgatattctgccactgtctccatctctgacctcacagcagggtaggcttaagctacactgaacttccctttggctccagccaatactactgcatcccttgaaatcttctggtggtcctggctgccccagtgttcaatttatgtcctcacagctgaacaagaaccctaagtaggagcaaattgagctttactgcattttcctaccatattcctcccagctggaccaagcatttgagaatccatcacaggaattttattttgcatggtggcagattcgagttaaaagaagtggcccacaagtgaatgggtagttttaactgtggcccagataatccacaaagtggataaaccacaaagtgaatgaggcttttatgggtacatgagaattgacaccaccttgtgagatcggatgaaggaaaatccatttaagaaaactcacttgcatggagctggattcttttctcatcctgaaagagttagatgtggctttgttgaaaatacagaagaactccccaaaggagtggtagtggaagaattgacagcactaagcccccgagagaaatggtgactgatctgatcttatttttaaactcatctttgtgattcaaaccaaccttgtgagagctatgattctccagtctttgcatctctctagccaccaggaacttgcgtagtttctgagtgatgctcagcacaacatggtaatttagtacacagagttcctgggtatgaatcttggctttgccatttattatgtgtcttctggcactttaaacaatctctttgtgtcttaattttttcatctgtaaaatggggacaataatagtacctccctcaaaaggtagttgtatagatttagtaagtttctgtgtgtggagtacttagatcaattgcctggcaatcatgtttataaagtagatgttagtgattatcatgctacaaaaaaatagacatgaaactatttttggctctatctggtgacttaggaaactcaggctgttagagcctaacatgctggtagccgatttccagtaaccactccatggttgctacttggcaggcttggtcaggccagtggctgagcttaactccagggaggagacctagtgcttcaaaaatgaaagagctgtttaccctttctagcaggcttttgcctttggcaaatagtccccttagcaacatttgaccttaagaacttagcaggaaaagggtaaaacatttcaaggaacaggagctgggtctcctcccaggtgtcatgtcacagcagggcaaggggatgtcaggtgggaccccctggccactctgtcaaatgtagctgcctaaggtccccaggaacctgcctgggaagtgtggaagctgtagaaggacgtgtgtgtgtgcagagagagagagaaaactctgaactggtccagtctcctccactccagctgcagtgaagaggtactggtggagcagagagagctgggaggtgacccctatggagttggaggga

SEQ ID NO: 33643 - DNA, 1069 bp, Bovine  19866880820011
  misc_feature (1)..(1): n is a, c, g, or t
nagttcttgcttaatggagggctttaggaaatttattcctgtttacacataattcctcacctgtaaatactttcatccatgtggattctagatcatttcataaattaataacttggccatatggaagctcccaaaataaccagagtgcccagtgagtctgattatcacagactatgccccatctcataaactagcattgtgaaaggagtgtcctcagaatatggcaacaggaaaggggaatatttcagagtgggtggagctctgggaagtccgctgagttagagaggggtcccttgcctaaggggtcccttgactcttcgctttcttccatcttaaggacagtgaaatgctgtctccattattaccattgactttgttccagcctcggggtaagattcagctttcatcccaaacttgaccttttctggtttccactcttctccccttcaacccatgttgtcaactgtgatcgactcaagacatcacctctctcggaaagcagaggagcacgacccatttggcaattctttggcctaaattcactttccctcctatatctcttcccgcctcctactagctggctggaccgcccttgccaacggccccgcggagcccccctccctacctgctgagcagtcagggccctggaagccctcttcacagaggcacagcccctcctggcagtgtcctcggccgctgcaggcatttggacaccgccgctggccgcagtcctcaccgacgtagccttcctggcacaggcaggtaccgttggcacagatccccttccccgaacagtccccggggcacctcagctcgctgcagtcctcgcccgtgtaggcctcttcgcagacgcattccccgtccacgcacagcccccgggagctgcagtcggttgggcaccggagttctgagcagtcgtccccgctgtactcgctgtcacagacgcactggccgtccacacacacgccccgactggagcagcccagggggcagtagggctccgagcagttcttgccaaaccagccttgatcgcagatgcacccacaggactccaggctaaagttgccat

SEQ ID NO: 33644 - DNA, 3145 bp, Bovine  19866880861266
  misc_feature (1)..(1): n is a, c, g, or t
natgcttcctattcctctccttcccccatctaactaactgctcatccttcacagctcagctccagggtcacttaaaaggtttcccagaatttgtctcatttggtgactgtttgctgtgatctttttaggattctacgcgtatctccggccctaggctttatcatgcaataactagagtggttaatttatctgtccagcatgaatcaaacaaacttattaaacgaacaccatagcagtacttgcttggcatccttctcggcacttggccttggggataggaagtcaagtaagttatgtccttgtttaattttgccacttcatgcaccccctccccccatggcctgaaaggatactatactgacattggttaacatagatcttccttatagatcttttcacatcttcccagggaacctggtgggaagctggttaaaaaaaaaaaaaaaaaaaaaaagcccacttacagaagccaccagcttcccaggcattgaagacccatgtccatggacacctgtgtctttcctgtattccccaactccactgaaaaagtgaactcactgaggaaggagagtttgaacacctggactttgtcctcagtttcagattgtttatagttttggttataaggaggaagaggtgagaaaacccaagaaatatttctcttctcaaagactacccccagtcttggtgtctcagaatgaatgtgttggacatctctctggacatgtgggccatttctccctattaaaatgcaattcctgacacctctttcatccttgggcaagtcttgagatattagaccctagagaggtaagagcttgaacccaagatagtaagacacagtccttttctcattacagactgaatcaaatgggtagaaggtactgttttgggtgagagaagctgggcacaaaagggaacacactttctgctcatggggatctgctgataataactactgaatatgaagtgcctaccagaggccgggctttcatctgagtggaggtttttatatttaatagctccttgttgttctagtctgttgaggggaaaaggaacgcatgggttaagcaacttgttcaagtcacaggctagcaaatagcagagataggacatgaagtcaggaagtctggccctgaagatgagctgacttctcccagagaggtcaagagtcattcataagtgttagtagttaggatgtgggtgaggctagatatccaagttccggattggattggggagaggcttgtaagaagctctgtgagtgcgtgtgcacgcacatgcatgcacagccccgtgttttggtggagggggcaggggctgaaacttccagcttgccagagaagatggggccaggtcctctgaggttttaatgactgtaattttctcagactggagaaaggctgagatggagtgaacagagcgcctgcattctctagtccctccagttaacatggatagatatcaattcaacagcctgtgaaaaccaaagatgaatgaagacagacatcaaattccctgcttgccacagcagttgctgtgctgaaccgatgtaccattccctgactcatcccccccaaattaggttaatgtatttcagactggctaagcgctgtagagagtccctatgccgaatcccctggggaaggaccatacttagatcttagaggcatattaacagacagctgcagaccagggcacttttttttttcccctctgtgtgaagaggtgccagatttctcaggcactggtgtaatcacccagattccctctccccatctgctcagtgccctccctcccctgcggagactggctgtaagctccagaactctacctgtggccgcactctctgggcagcagttgctggtacattggtcccgcagcacagacacctccctctccagcatctcaattcggctcagcagctcctgtagcacctgggccgagctggcacacgggcaggccttcttggggaggttgatcctgtgcgtgaaggtgacctggctctcgtggtctgaggtctggcccgtgtactccgtcagcacctcgtcttcggtgctcacctcatgctcggccgaggcctccagccctgaggagcagaggctatccaggggcacgttgatgttgtacacgtggttgaagaccaccggctgctccttgccagatgcgttgtagctggcagcgcctccttcctcctccaccgctggtctctggacccttcccatggtgacctccagctgacactccgagggctcgagcaaggagcccagaaggatcaggttgatgccaatgagcacgttcttcaagaccactgtctccctgtctgcccccatcctctcagtagagctccgggttcaagactagcctgcagcagaaagcatggaatatgcaagagaaaccaggggatgaacgagatggcctctgagacctgcccctgggcacagtgcagtgcacagtcccacaaaactaaaggatagcagtgaagctttttaaggggatgtttgggaagtgactaccagggtcatgaaagcccagggccttttgtcttctagagaaatccctgagaatggacgctgcttctgcagtaaggcattttgattttccaaaaggtttatctagaacgtatgagtctggcccctcattgggcaggtggttccaacaaagaggacctgcaaggactcgagacaggggctctgtggttaggagaactcagagcttcatttcacttctgggtgagaattaggatgctgggtaccatgaagacaggcataccctcatatttccccagatgtgtattaggatggggccccgccagccacttcaaaataacttgtaaactcaaatacaagttgactttagaataaccaagcaggcagataatcttgttccaggtaattgtgggttgttaataatccttgggtacatttgtgattatctggaactgtgtaagctgaacttttttttaatcttctcattagtacagtcccagtgcttcgtgaccgcagggtgcctttcttccgaggtcctgtttgaattgctaaaataatgaattagctcctctgctggttacctagtcaccaagaaccaggaagcatgataaatttactacaatgcaaatcagttttacagaaattatatttctttt

SEQ ID NO: 33645 - DNA, 1106 bp, Bovine  19866880938605
  misc_feature (1)..(1): n is a, c, g, or t
ntgcagttggtatcaaatgcagaaatgctgaaaatgtttaggctaaagcctgtaagttaaacactgatttgggctccctccttccaaactctcagggttactaggaccttcatggttccttgcagggacaaatcagtgaaaatttttgaggaatgaggctagaaaaaggcaggagacaaattacttttgtttattccctgatttctttacccgtctccctacctgctttcccctcccagtgggcagaggggctcagaggactgtggctataatctcagctctcttggctactttgggggatttacagggaaatcagtacttggcaacttgtatttttcactgcctggcccgaactccagacatgagcccctttctcttatttgaacaacattcatatgtaaggaatagatgtcctgggagagatctctgcatcctggtcctctcccatgttggggctgcttgggcagcagtgacatctctgtgttagacgcagcagacatcatggcttacaaaaaatgtcagccagggaagtgctgccctgccaaccctctgtccccacccgtgccctctctgttgctgaactcacaccacggccacacagagcaaggtttagaatccatacgagctaccgttaacacacagacttccctttcctatcattccaacctcaaagacactccaggccctaggaattcccagctaccctaagcaagtcaccgtgatcttgaaggagctgttacctggggctcggcagctggaacccaccccagtggtctctagactgttgttctgagaaatcacaaacaccaaatcctccagtccctccaaatttgagtttgttgttttaacctttaacagccttttcaggtaaaaaataacaaagatcgatttactcactttgtagctacactgtgcctggaaaagcatttacttaaagactagaaagactagatggaagaaaggaaaaaaacaagaacacatggagtacatactcctcaggtgttaagtgagctaaaataaaaataaatacagacagaggaagggagaggacaaaccaacttcccccatccttccatggcactgtagctcaaagactggaatctctg

SEQ ID NO: 33646 - DNA, 764 bp, Bovine  19866881032141
  misc_feature (1)..(1): n is a, c, g, or t
ntgagaggctctcactgctcccaaaccagcctgcagcctgacccactgtgcttccaccacttgctgtgggaaggagaaagcatgatctcatagagctcagactatattcctttacacattcgttcagggcctgtggaaccaaagacactcgagcagccacagataaaatgataccatctgataagcagcaaagaggaaaacttattatccacacagctgcatctgatggcccaaaggcagaaatggatcagatgggggacattcttgattgatttgtaaaaataatagaaccgagtgtcacatggaggccatctacctgactagactcatagggctgcacctgctgttctcctcagcaccactgtacctctgcgcttctgtcccttcaagcttgaagccagttccctgcctttgtccctgtagtcacccattggcaggatgtctgtactgtccagtgtggtctttttgttgtttctttgtttgctttcgggggtggacggtggtgtgctgcatggcatatgggatcttagttccccaataagggatggaccccatgcttctggctttggaagtgcagtatcctgaccaatggacctccaaggaagtccctgttgatgtggccttcttgaaagccagcctcacccaggcaaagagatgtgtgtctgggacaattttttgaaagagacctgttgctagtctgtctgcctgggagtatccatattcttttccactaatatttattgagtgcctactatgtgtcacgt

SEQ ID NO: 33647 - DNA, 1405 bp, Bovine  19866881035500
  misc_feature (1)..(1): n is a, c, g, or t
ntagatgtttttctggaactctcttgctttttccatgatccagtggatgtggcaatttggtctctggttcctctgccttttctaaaaccagcttgaacatcaggaagttcacggttcacatattgctgaagcctggcttggagaattttgagcattactttactagcgtgtgagatgagtacaattgtgtggtagtttgagctggatatataatccttcagtagaattttgaccttaaatatttgctacttccttgcaaagctctgagattgaatgaaagaaaactaatgatgtaaagcgaactctctgaagaggaaaaaaataacaataaataacagttttctttagaaacccacattatacctccaagttttttgaaatggagatgtggcagttgagatggaaagggaaacacaaactccttattttaaagccataaacatatttcttccctccccgtctctgtttcaggtggccgtatcatcattactgcacagaccaggtctctttgggcattaggattaaagaacgtgtggaaaagagaaaacaccgaggacgccatcactaaaggtaccgttttctgtgaacctttaaccatccatcattacaatggccagtctgaggctttcagttgtgactgcgtatgtgtattcccgggatttgagactctttgtcactgcaacaacagcctcagggacagactccctgccatgaggtggtcaagagcaccagctcccctgggctttatgctacctcagaaaaagctggagaaactgggcaccaaggttctgacatcttaggggatatttcagaaatgcatttcaaacatagttggtcataaaagtgtgcgactgcacacagcccctccaagaggctagacttgctccccaacctagccatgcatactttgagcctgcaggaatcagtgctaaattattcaccagcctgactctaaaattttggagttccaaaacctctaataaagtattatgaaagaatatccatctctttatctctatccataactatttatatagcttagaggaaaaatctgtcgttttatttcttttaatttaaaagctttcctaattcctttttcataccacatatatatgtctaaagaattttcaggttgaaataataacctctaaaaaatggtccatgggagaaggctctcaggattcacagagttgacaggcacgatgaatatttcgctcctttaataacttttcttggcactcagacttggtactccgaactggaaacttttcaaagaggggtggcttttttttttttttttattatacaaaacaatgacaatatacccacttgccttctctcctctattcgttcacaaaactgctaaggtttgttcaggaaaaactcatttcattcctcagattca

SEQ ID NO: 33648 - DNA, 1150 bp, Bovine  19866881077180
  misc_feature (1)..(1): n is a, c, g, or t
nctctctctctgtctctaaatacctatatacacaaacacatgatgcggttccagccattcttacccactcaggtgtctgcatgtccctacaatatggtttttcctactgccaaagtttttaacatgttcctctctgcagtgtcagccagaagaactgctactgggagtgtgtgagatgaccccgagggggccaaggacacgtttgctgctggccatcagcagtttattgttcaggtaataaatgtgctgccctccccttccaggctccctcgctgatagctccaggactgtagggcttccctcacacttattttgattactgctgcctgtcacattgtttcttcttcttgaccttggtgcctgtcagaccattcacaccccctaactgtctttacctgccacttgtccgtcttcaccgaaagcctggtttctctgattactcaggccctaacagcttctcgtggagttacttgactcttctcagaagtgaaggagtgctgtgtggccttctttgccactggacttgatgaaggttgtcggctgtgagtcggatcatagaccgtcctctccagagggccaccttagggagcttttagagaggggtcatggcctaagtgggggggaagctgccttgaagacaacatctttctgactttcctgcattttcatttactggctttctgagcttgagcaagccatgtggctgctctcagtctcagtgttcttatctgttaagtgggaattatttatagtaagaatcaagtctatgtaaaaatactgctatgtccaaacgaatcttctaggtagagctctcagctttttagaggggtttaagaattgtgtgctggcctccccggtggctcagcggtaaagaatccacctgcaatgcaggagccacaggagatgtgggtttaatccctgggtcaggaagatcccctggagaagggaatggcaacccactccaggattcttgcctggaaaaccccatggacagaggagtctggtgggctacagttcatagggttgcaaagagtcggatacaactgaagtgacttagcacacacgcaagaattgtgtgctacatagagaacacacctgggctgccaagggggaagagaagcaggggagggaggattggagttggcattag

SEQ ID NO: 33649 - DNA, 1705 bp, Bovine  19866881089949
  misc_feature (1)..(1): n is a, c, g, or t
ncaattgctggagttacaaagaagatcaaagtctatgaatatggcacagtcattcaggatgcggtggatattcattaccctgaaaatgaaatgacctgcaattccaaaatcaggtatttacattatttacttggcataatgtagtgtgtatgtagcagtatctgtgattagtttgtttgttatttttaccttttcatgtgacatcttattcgttcgagataaacattattaattatatatagaagatacatcagaatatcttttttatagatattgatcactttttccctgtgggggttagtagtttttctatttttctatttgccaaatgaaaatcttctttcattcaatcaaataaatgtctctactgtagatgatgtttcatggattactatatgcccagtgaatagtatctcaaagtctggaatttttcctctagcatgcacatatctctaactattgtaattgtttataattttaagaattcttttcacaagaatggtatgtgtctttttgtgagggcataatgtttaagtttcatgtattaagggttagagtttatagcgagtgctttttaaacctggagtactgttcaaactgcagaaactagacccaacttctgatctgcccccacaaaatctaaaaggaatgctagaatcttcatgtttaaaacaaacttcctaagctattttcataggcactggcttcaaagggagtgacatcaagaaactaatagtaaatttgtttaaaacttcgaacattttctagtcattcttatcccttttttatttggatgaatgacacataatatatatggtcactttaataatgttaataatatagcaagtactgtagtctttatttgtataactttcttttctgtttcctaattcatataaaaatggtagactgatataactggtgctcatcattgagaatgtataatggttatctacttagtttatatactttattcctaagtgaaaagaatgcagcatgagtgagacataattttattgaattcttcagtggcaggcattatcataagttctgtgtcttatgcagaccatcattaccctgttttatacacaagaaagctgaagcacagaaagggttcattaacttgttgatggttgtacagctcgtctctggagtagccaagattcaaacagaatcttgctcttaaccgtatcatgctactaatttgtaaaatagaggctctaatagtaatacctatttcataggattatacgggggaataaatccacatgatgcactcagcacaatacttgacccatatcaagaattcataataaatgttaccataatgaaaatatggattagagggtttaccttgtctgtcttgacagatataaagcaatgtggtagtattttatgcaccttggaataaagagaaggaaactgttcaaatctggaaacaatggacttggggctgaaaggggggggatgtaagcttccctgaaacccatttggagcacaccagttgtgaaagtgaactgaattacccaaagccacaactagtaagttgcagatctggaatttaagctcaggtctgactaaatccaaggctcttgactgttccatgtaatttctcccagaaattctaataagtacatctaaagttgcaaataaactcttcaaagcctaaaatgtagcacgagtacagctagaagacagcaaaaag

SEQ ID NO: 33650 - DNA, 1296 bp, Bovine  19866881130826
  misc_feature (1)..(1): n is a, c, g, or t
ntttaaattaatgattgtgtgtaaagtatgggtagtgctttctatgacacttcttgactgtatgataatagtgttattggtcttatactttagatattcctgagtatattgggaaagcaggagtaatacactgtattccatgaaaataatcccaaaggattccatgaaagcttaagtgcatttaaaaaaaaaatcaatttctaggttttttcttcctgtggtaaaacactcgtgtgtgtgtggtatgtgcatgcctgtacgctgtcaaaattcagacccagtcacacagctggtagtagcccgtttctcacaaaagggaccatattgcttataatcctactgccaaacaatgagtattttttaaggccacttgcctcattctttcgggtccaaatgaaatctccaagcaacacaaatgaaccacagtgtccaggaaaatagagataagtccattaatagaaacaaacattaggtttgtttgagtaaaaagaaatcaaagatacatgttagctatttcctgatgaattaatgacatgatttaggagaggaaggtggcttcagagatgcttgggaacctgggagaactgagtggatggctgatattgggaggaactgatacttagacacacttatgtggtgatgcctccagtcccagggcatgggcttttggatttgttttgtcttccctgcagaggtcaaaaattgaactgggccagctacactatcttttcctgttctcttcatgtccaaggacacccatctaagagaatattggccccgattcaaggtcatgggcagaatgaaactcatgggccccaaagtggtcaacttatgaacttaaccttattcccaaagttgccttttgttgttgttcagtcactcagttgtgtctggctttttgggaccccatgaactgcagcatgccaggattctctgtccttcaccatctctcagaacttgctcaaactcatgtccattgagtccgtgatgccatccaaccgtcttgtcatgtcactcccttctcctcctgccttcaatctttctcagcatcagggtcttttctaatgagtcagccctttgcatcaggtggctgaagtattggaacttcagcttcagcatcagtccttccaatgaatattcaggggttgatttctttgggattgactggtttgatctccttgcagtcccagggactctcaagagttttctcaaacaccacagctcgaaagcatcaaaagcttagccttctttatggtccaaagttccctaaccagtggaattaactagacagaaatt

SEQ ID NO: 33651 - DNA, 2068 bp, Bovine  19866881172844
  misc_feature (1)..(1): n is a, c, g, or t
natgggaggttctgaatactcgaagttccttcttggcctccttttgacaccccacatatcttcccccaccctgatcccgacttttgagggccaggctgcgctgccttctagcaccttttcccctgacaactctttacctgggaggaccaatgcgggtcaccgcctcccgcaggcactcccagactaccacttgggggatctgttcactggacatatttctttccatccctgtaaaatacacctgcagccaaacgggagccttgccctccaaagggtctggtcaagagaagtggcagaaatccctgtacagacatcacccttccgatgaggcccctttaaagttgaaaagctaataaaactttttttcctagatgaaatgtcctattgatcacaactgctgtatcagttgcctaagatgtcaacagcaccatggaagtctgggaaatgatcatgttgacttaaaactgccccatacgatagcacatatcaacccttagtgaagccttaaaaaaaaaagggggtggggagttgaaaaacagcttaaaggaggcaaacacagcatctgctgtattaactcagaatagtcctagcctctctcacactcgctaattccacagttgctttttttttaccttaacattttatttaattgcaaccactgtgtatgtactgctttatgattctgccattttcataaagtaccattttcttacatctctgcagagtcttcctaattatcattacagtgaccacacagcacagcatcttttagcctgagttcaaatccctgccttagccagcctgctgtgggtgcctgcaggccaccgctcctgtcctattccctgatcacatctccatgtgactgacccttatatctcgtcccttgttctgtcttctggcacctgtgctcttaaccatacttcatccctgcctcttggggcagagacagggtgtcatagcctttatgacactgtccatgggggaccccaagaacagctgtttgagatgttacctttgccaacaaccaccactgctcatggagcaaggctaccatgagtcatccaggggctgggcacctggtttacgttattgcagggaattctcaagacaaccatgcgatagccacacatagctctactttacagatgagaaaagtggagcccagaaaggttcagcaagttatccacgatgacacagccattacaagacagagcagggcttgaaatgcaggtttgatcacttctaagtttatgcctctgccagtgctctacggagcatgttccaggagacgtgatctggctcactggatatttgagcacttgtgaaaatgaacctcagtaaaacagagctgcagcagaccttgctgactttgtacctctcccttccaggcttagagacgtgtgtttttcctcttatggtgtgtgaaagacattcctctcaacccaccgtacagatggaactgttgaggcacagacacaggaagctgatagaccagagaggagttgaagaccagcactcagaccccacaggcccagagaacaggtggaaggtcaaggtgagcatggggtcattggggagaggatgccgacggtgggcaggcctgtctgcggttcagcccctgggcactctaggcaccagagtcaaattgtcctcttcctgccctgtgtcaggaatgccctccacttgggctggaccccacccatcaccgacccctctgcaggcccagctcacacagccctccgccccgtcttctcctgacccaacccacccacagcaatcacacgctcctctgaactcctctgcaattataatttcaataattcatttggcaattaatcatatcctgccttgcaacatctcttctatcccgtgttgagctgttatttagaagtgcaattgtttaagttcccatgagcagcatatgctgccttgctaatctagtcgggctttttggttgtttatttcccggcagtcaatcaaaccaggaggagacgctggagacccacactgagggggtgagctgggatcctcactgagagggcgatggaggcacagagtcaggacactc

SEQ ID NO: 33652 - DNA, 1067 bp, Bovine  19866881210767
  misc_feature (1)..(1): n is a, c, g, or t
nctcccctggggaatcccatggacagaaaaagtctggcaggatacagtccatagggtcgcaaagagttagacatgactgaagcgaattagtatgcaggtccttgtattggggaaacctctgtacctaagtcatggacaagaaaagggtcctaacagatgtttagttgagtaaacagttgaacaaatgaatgagttctcaaagcccaccaggcctattgcctgtccgtctgtcatctctggcagagccctagtagaaggtgtgaaataaaattcatattttatggtgagacaagaaaactttctctgccctttggtctgctctctccccatgctgtgcattgtgtatctgcaggatgcattgatccaaccacccccatgagcaggaaaacctgctcaatcataaacagcagcattctcctagcatcaagaagacaactccttcaagataacattccttcttgatcttgtatggggtcacgtaacctaccatgatgacccttaaatctggatcatgtagactgtcagtaatacgtcatttgatgtacagtcctgtctcaaaaaagatttatataactgtgctttgacttctaatgagaagaacagttttctgagatgctctttctttcagggttgtaatccttaaatttggctcaaataaaatttcccatttcttccttagatggactgattaattttttgtcgactaagataaaggcactcagtgctcacaccccaaagccaaggaattaacatcactctacatctcctgaattgatgcaaacaatgacaagcaatttcttcataattacaaagtgcttctaatgagatagcttattcttacttttaaaataacttctacatggcattgggccaaaccctttacttaaccaaatcatcatatatattaatcacacacacacacatacacgatttttaaaatgccctttttcaactgcattaattaaaggccttattcagaattaatttatcttaccagaattatgtctaatgcttttgtcctcatgcaggcaaaaatgcattctctcttcacccttgctaattcattt

SEQ ID NO: 33653 - DNA, 1880 bp, Bovine  19866881234987
  misc_feature (1)..(1): n is a, c, g, or t
ntgtgaaacgaggatgataatacatgtcttagaacattgctgtggggatttaaagtgacacatgtatcccaggaaaatagaatcccagaactccaggatccaggcatttgtaaggacacagagagaacagcttttcttttcctttcctttctacttatggaacagtgatcttagaccagatgtgtgatctggtgctcgtgcaagaaaaattgctatttcaaagctttgatgattctttgtgttgtttgggagtagagcccagggcggaagctcacataaagagccctctgtggttgttgaaggcaatgtacaggggagtgaggcagagcaccaaggggacccggaaataccctgtgtaataacacaagagaacatgtctgtttcccggccctggaatgcagaggaaagagataagggaaggctcacaaggggagactgagatcacagacgcgtggagggttagcaagagaggctgtctggcctgatgtgtgatatttcacttcagtctgctctccgatcggtgactgcctccatgaacacagactttcgggaaaagctttctgtcagtgctgtgtggaggcctaaggagaaggggccatgtccactcaacactggaaaaggagagaggacagcatctcaggaggtggatggtgaaagaggccaagaaatgagcggataacaggagtctgaagagttgcctccacctgggaaattctggaaaagataactagatttctctaacttagtatggctaggtagaagctcagattgttacactgggggaagctgagccaggaagctcgtagagttggggatattctggttatgtacataaagaactcgacccacagatgacttcccttcattggtgacttctcttacacggcattctagtaacttgctaagggaaataaagcttggcctgacaactgccattcatacccaggtctaagtctaaggtcttcagttttacaccattcagcctttccttcaagtactgtatatttgtgacttttttttttttttttttagaattctagagctaaattaaagacacagtggcagcttatagctaagttgaatggtgactcactctaggtcaccagaggcaaggcagggcattcttagggctggctgaggactgcccaagtacactttcacttgaggtcaagtctccagtgattagcaggctctaaaatccttctctgttccagctattttaaaatcttgtttatatgctaatcttactccatccttaactgaccttctatcatctgtcaggtaaataagtgaccataatgggaaaataacccagaaatgtaaatgaaaaaagacagagtgtgagtgagcagaaaccagcttagcagaaacataaattcctgttcagagccaccttgtctagtatctaagctcacacctttattttttatttactctggcatgagaaggttttcttgcattagtaatgatactgttaatgttttataggatgtgttaatagaagtcacggtcacactgaaatctttcttcattagatggaatactcttagacttattgccacgtcccctaagtttaagccagactactttctacccctaccaaggactggagaattctctgagtgtgtttaactcccttcctgctgttaacatacactattctatgtccctaaagaggtttcagaaaagtcctcaaccttcttgtcttaactgacacccgggatctcctcaaaatctcaacttcctctgcaatccccactcacagaggctgctcatccttcgatattccatgctgcaacctcccaggaaaatagttgcacttctcctgacttttacctcacatttcaaggttaattccttcacttgtgctcttaattctg

SEQ ID NO: 33654 - DNA, 827 bp, Bovine  19866881249715
  misc_feature (1)..(1): n is a, c, g, or t
nccccgatcagggatcaaacctgggcctcctgccatgggagcacggagtcttagccactagaccaccagagaagtccctgtgaccatatttttagaactaaggttgaattggtttgacaaatacaattatggtacaacacaaaagaatggttgaaagtgaaaacatcacagaaaatacataataccgatggtcatggtcaccatgaggcaaccagaaccttttctaccatctgcagagaggtttgactgcacaaatgactcagcacatttctctcctgccccccacatggtgatgatgtttgctccacgatagcctcaatcttactgagacttgaacccaatgggaacaacagcagaatcagaacaacagccctggtggagctcaaaggctgagttctcaacactggggccacaagaaggagtcaatacttcctggaggattggggagggggttgcagtttagtttttgagacacaccagtcacttgggtttctggacatggaatattgagcccgaggagttgcaggcaggttcttcacttgccagggagaaagctgaaaagtagagctcaagcctcacaagtcacattctccttttctgtttctgttttcttgagatggatgtagaatttctgagttgatctggggtttagagggcctccgaagcccagtggccctgacctagctgtagattccataagcccgggaacctgtaataggcccaggtaaattgaagttgtgtattggcaacaaaggattctgggaggaggcaggagagaaccaagcccgtgctgttgccaggtgaccttggggacaagcatgcatttg

SEQ ID NO: 33655 - DNA, 1771 bp, Bovine  19866881297839
  misc_feature (1)..(1): n is a, c, g, or t
nttattctggctcaagagtacatgttcttaaccactacacagattacccctctaaccgtagagcctgggctagggtacagcagggaacttgagaagatgttgaatgtttggaataactgctctaagtaaggagacagagaaagttcactagggagatgggaaaagattgctatccacactgagagcacaggagaggctggagagctggggctggtagagcaatggagctttccaaatcagagctttcaaggctggccatatttctagaatgttatgggaccagtctccctagtggctgttttctttgtggtgctttaaaacagaactacagagcctttatgcttgacgggttctattgccaatacttaagaggttggaggcattaaaaaagacaacaccaaaactgtaagaaatatcaagattctggaaacttacagcattcttcagggaattatcctgtttttgcctcttctcttgtgttagtaactggaaggcctgatagttctctgctctaattttccgtgtatgaaggcagacctcatcaaaccttctctctccttcagtccactgaatttttacaccagcaacttaaaaatgtcagaggtatattttttccagacaaaattttgctcagtatcctaatatataaaatatacaatggcagcattttatgggtataagcttatttaataaattcatacttataccttttcttaattattacaaagtcagtcgaaaaggacatcgaatctattctgatgaacacggaatttgaaaataacgatactggttgatgtttgcagtgttatacaagactcagcgtccaattgatttctgtaatccattttggatatacagtatcaagaaaatcctgattcaaacagacaagtagcttaccttgctatctcaagattctcttcaatcaaactgatccaaaagcattagggaggatttgtaggacttttttgtttcaaagttaaattaccaacaactgacaacaaactcacttccttattgtcaatataaaagtcattcagtagacattccacatttaacaataaatgcttagtctataaattttatgacagtaatgagacaaaaaagtgttctgattttcttgttattgcgtattaattatgactcagaacaggttgaataaatgtgtctgaaccttgttcatagctatatgaaagagctcagagaagaaccaaccacctagcagacacaaaaatcaatgtttgttgaatgaatgaatgaccaaactgaacttgcttgatctctcacagagtactggattatatatacatttttatttttactttttgatttttcatttgtgcatatttgagttttaaaaagatcagtacagagctacagacatcgtaatcaatgactcattgacaagtccttcaaatatatccccagatctgtcagtagacaattttctccaaggtctgcatgaaaacaagtcaatgtgacagaacaaagttaacccattggttggctgtcctcactataaaattagcacagagcatgtttgagattgtgttgagtcttattagcagcttccctcatagctcagttggtaaagaatttgcctgcaatgtgggagacctgggttcgatccctgggttgggaagatcccctgaagaagagaaaggccgcccattccagtattctggcctggagtattccatggactgtacagtccatgggggtggcaaagagttggccacaactgagcacctttcactttcactgagtcttacta

SEQ ID NO: 33656 - DNA, 809 bp, Bovine  19866881309603
  misc_feature (1)..(1): n is a, c, g, or t
nctttgtaaatttcataaaggttaccatgggaatccccattatcacctgctgccaagtcctccagccccacctgtggtgatggagcccacgatgggctcagaggtcactgtgccatggactgccaccagattcacaatgtactcggtagctggctgcaggcccatcaggacagcatgcctcttggtggcatccagggagacctccatcatttcttcctcttcatcccgtgggctgtagttgagaatgagtctgtctgccggaggggatgggtcactccaggtaatgttcacgctggaggaggtcacgtgagaaaagtgcaaatgggagatggggcggaagcctgaaaacagaggaaatgaatggttctggaatccacataaagtggtgggaccactggggtaaaggagatatctgaccaaagaggtctgctttccctgctagtaaggacttacacctgcacttgttaaccaccacgctgctatctcatccactctcctttctccaagccagatactgtaaaatgaatgccctcagcagcataaaaacagcatcacctcgtgtgaattattcataatactgatggaggatttaaaacttatatcctggaaggaattgaacacgatcccatggatcctctgaatgcccactgacttagtgaaggcagaaaatgaacagaattaactactctgaccagcctataggaaaccggacataatttcaggcatgcaggtagccttgttcatctctccccttcgcctccagccattctctcttaggcttcccagatgactcaatggtaaagagtctg

SEQ ID NO: 33657 - DNA, 1570 bp, Bovine  19866881331517
  misc_feature (1)..(1): n is a, c, g, or t
naactggggtgcaaagggatgaaatgacttctccagatcacatagctagtgaatagtgggggtggttttggaatgaaagccatctgactccagagcttgtgttatttaccaatatatttacaatatatacacacttcagaagcaacagcgtctgaaataaacagaagatagcacatagctctcattatttttgtttatgatatagtgtttagattgttataataattttatatgtggctcgagtttttcaaattatttacaactatggatgccaaactggaaattattattactgatgagaatcctctaagaaaactaattctcttggtgatttgaatagtttcacgtatacaaaactaactgtaaatctcaaaattggaaactgtttggcttcaatatcagtttatttatttattttttttttcaatatcagtttagaggacactttattctatttcagtatgaaaagcagactgttgcctagtgtctaaatcagggctaagaggcagccagcaatctgatgacctgaactgtcataatgcactcagctaataaaaactcaggaagccgttgacattttcttcagaattacaaaatttcttacctaacgtggcttacttttttctgactttggatcaaaagtgaatggagcaagaccaagacgggatgtgaaggttaacagagaatggtttctgtccttgtggagtttctggttcctcaaagtgagggggagggagaggaaagaccatccagttccggggtcggggagggaggagtaagtgctgagacctgggtagatgcagagtaataaataagcacattaaaaaagacagtcacctgatctttgagaactggagtacttcttgaggaatgtggcttctaagctgaggcttgaggaatgagcagttatttcagcaaaggggagggaggggaaattaagcagaaggcacagcatgtgcaagctgggaggtgagagcaccatgtgaaactttcaaggtaagcgttacccttctatttataaatggggaaactgcacctaaggacacatatctagtaggtgtaaaacccagattaaatgtgcatctgttggactctttgtgaagctccacgttgtcttctgtcattccggggaagcgcacacacaatttcactaagatgcttatagtaactgagtactgtggtggcatctataaggaagctggaagtgtgatccattactattcaatgagaaggccacaagaaggcactagtcagtactgaaaaaggaggaaattcagaatgacagaactgtttctggttggatgtgagattactaaatgtatagataagtaggaatatttcatagacacagagacattagaaacttgtgtttgaaagagaggagaaaagcaggaatgcaggcagcagcagatgagatggttagatagcaacaccagctcagtgaacatgaatttgagcaaattctaggaggtaacggaggacagggaagcctggcatgctataggccatggagccacaaaaagtcagacacaactaagcgactgaacaataacaaggaatacagaaagga

SEQ ID NO: 33658 - DNA, 1076 bp, Bovine  19866881417208
  misc_feature (1)..(1): n is a, c, g, or t
nttttttttcatggagttcagcaggggcaacatactgttaccaacattcaatcattcctgctaacatcatctgtctcgctttcacttcctttctccctcagacttttagtggactctgtctatgcaccgggcatcaggtttacagaaataattcttgtccaggttggagaaaaagctatgaaaaccaggtgacacagattaaattgttaatggtgtgtgaataagttggccaggtatttctcttgtcagagacccaagggaaggttagagctgtggagagaggcaggattgggccaaaagagggaaaggatgcaggaagagcttccccaaaaagcttgcaacttggggacttccctgtggtccagtggttaagaatccttgtttccttgcagaggatgtgggttcgatccctagtcagggaactaagatcccgcatactacactgcaaggtcaaaaaataaataaaagtaaatgaaataaaaagaaacttgcaacttggctgaaatctaatccaataggagacattgcataagaaaatcctcttaaaaaatgttcttagtccttccagtcccccagattgtgataacaaggaagatgtgggctgacggaggatgaaattttcagcagccatggaataagaggctcagaaatgggggccattgctccttgaggccagggagggggagagagcccgagaacaccagatgatggtggggtagatgggggatgtgatgccctcagtcttgcccacgcctgccccgccaggcacaaaggtcaattgctcctacaggcaaggaaggctgcttgggtgttattgtttccggtggccatgggttgtgtttatttatttactggtttattttgccagtcaaactccagtttattgacaggactcagccagcctctggtcttttccaccccaaccgaccgcagcacagagaaataattagttgctgcggtgtcgggaacggatgtccaactgacatctccccttcaccagagtcaaattcagcggtttcccagcctgctgaaaattaccagcttcatgctgccttcctctccccgctgcctacctg

SEQ ID NO: 33659 - DNA, 1451 bp, Bovine  19866881499885
  misc_feature (1)..(1): n is a, c, g, or t
ntggcacccatgaggtggactgagactggcctaaatggatgactccccaggcaataccatgtaatgagcagctctcaaacacagagcatgcttgatttctgtgtggggaaacataaatctttttgtatcgaaattgatttttttgtttttctaaaataaacgttcagggattcaaatgtggataatgctaactctcttcccagtaatctacaggcctccgtggactgtaatggttcaaaatgaatagatctattgtttgattgacgctctcctgcagcctgggtgggcacagcgtcacatgggagcaggaacaatgggatgattactgaggactcctgtggttaattccggctctatagagttaattcagtctgaagcgcacatgatcagttccatctgtatcggtgcaactgggtttgggggagtttttattaaaaattctcaaatcagttctgtacaagagaattacctccttaccactccatatctcctgccaagtacttgataaaatgtgttctacaaatgtagataagaagtcatgataagaagactcactcctgctgaatattggaattatctggctgatgcggccggcaaacgtgaaaaccgggacaaatctccactggagaattttcaaactgttagaggtcatccttcgtcttggggcaaagtttgaaggggaaaatgagagacacttcagttttacccacgtgctggtgaacccaggctgctcaaaattggatgacttccaaatatgtcaggtctaatcaagacctctgagttggcgctggcctctgaatcagcccccttgagctaggatgggcttcctgcaggatgaaccttcttgcatacctttagcttcagcaggcaggtgatctcttgttttctgtggatacgtcgtgtcaactgaagaataaggctaggatcctagccagccacgccagcaccttcagaagggcagaggagtaactgagcaggaagtagtgactgtgctaagagtagtgactataggggatcggcaggggagcgttcatttgcctttgagagagtgaggagggctgggcaacctagaacagctgtggcaatcttttcatttattcatttatttttattaaactgtttttttggccaagctgggtcttggttgctgtgagggcttttctctagttgcagtgagctggggctactctgtagttgtgatgggcaggcttctcattgtggtggcttctctagctgtggagcacgggctctagggctcggggaattcagtagttgtggcacatgagcttgggagttgtgctttccaggctccagagcataggctcaatagtcgtggagcacgggcttggttgctctgaggcatgtgggatcttcccggaccaggaatcaaacctgcgtctcctgcgttggcaggggattcttaccacgggctaccagaaaagcccaggaac

SEQ ID NO: 33660 - DNA, 1460 bp, Bovine  19866881548728
  misc_feature (1)..(1): n is a, c, g, or t
naaaaagaaaaaatagactgtgttacctttatataaaattatgtgtacacacatatgtgtataacaaactcgaattaaaggttttaattaagaaatttcaaaaatcaaaaattgagtttttctaaataaacaaaccaaagaagacatatgactttgatatctccattcccacacaactgttcctcacagctaggcaggccctgtatggatcttttgatatgtattattttttatgttttcttaaaatagattttccttattagaggtaaactgctttacaatgttgttttggtttctgccataagctatgatagttagccataattatatatatatatatcccctccctcctgaaccttctcagaaaagaaatacttactagagcaatactttgcagatttaaaatacaggagacacaaaaaaggtataaaaagtagaaaagagtcactgtcatgatgcatgttttagcatattcattaaatatgaaatttgaaaatataaaatttgagttccaaattttgtcatttaaccagctagtcagacatcaagagaatcattgtaactttgggtctcagtttccagatctgacataaatagattaaattaatatcacaggttgaggaaaacttatgaaaatactatcagttttgtcatataaggacaaggagaaatttaaaatgagagacttattcttctctgttgaaaataaggataaagaccttcttccctctgaatatttactttagaaaattcaagttatttctgtctctttgaaatacatgtaaattgtcactaaaggtaaacaatccaccagccagctttaaaacccaacaatatccttctcaattgtcctgagaactatttctttgaaatagaaccattgagaaagattgcatccatatctcccagcttctgggagagagtaggagtcagacttcagcaggtacttcctttcaagatataaaactacttcctgtcacagagacgcactgtttatttttcttttggatgaagccaattaactaaagcagatgaatatcccaactaccaaagactttaggatgcacaatgtgtgaccaagagtactactgagccctcttagttgagaactaattatttttcatattgagaaaatgaaataggttgtatctgctcagctgtgcactcgataaaaggatgagggtcctttctctctttgcaaacttttagcattttgtctgtgatgcacatcacgttctggtttagtgtttattcaataataaaaataagttttctttctcttctatctttggggagatgttttctggcttgggaagacatctaattatattttccccaaagtagtcacttaatctctctaaaacaggagagagataaggagacagagaatccgatagtgctaataatcacaactgtcatttgttcagcacatgcctccaaggaagtgtgagatggaaggc

SEQ ID NO: 33661 - DNA, 2499 bp, Bovine  19866880365704
  misc_feature (1)..(1): n is a, c, g, or t
naacttctagttgagcccaccctcataaaataaaatctctctcccaaaatgatgtaactccactaaaaattgaaattcagattaaaatgccacagaaatgttttcttttttcagcctcatagagatttagcctgctgtgagctctgcactttgcttagactaaatcttaaatgttttctcatgtgttgacttgtagccacggaaaatatgggactgtcatttaaacttcctgtgctccagtagaggccccttctgagaaatttcttcctggtgggaatttttgccagctttccgcctggcctctcttcagtctcgctataatggattcactcactctggaccatggtactacattctagaaaagcggaaacaaacgtcgagcctaatcagcatgggttctggactgacggcagcatgttcgggcagttttgagtaaaaccagggagctgcatagactgaatctcacagtcacactgacaggacctagactggcgttctggttcggacacctggagcaagtcggcctgtctgcctctttcctcgtcctcacacaagcatgatggtgtagctaggggttctgtgagatctgaacagcgtccataaagtatctagtgaggaggcactcagcacacgcttaccgatcaggaatgatatttccagaactggagtgttcatgctctccttttaccctcagtgggtctgtccaggtgtcataaatctctccctcctgcttcagcgttcatctttgaggggccactaaggccctgccttgccgagggccaggtggtcaaactgtaagatcaaggatgcagggactcagggggcaggggtatcaaggacctccccttaagtgacggctctgtgttttcccttgcaggccccccggatcccagcatctacgtggaacccatcactgaagagcgggccgcgagaacgctgtaccgcatcgagctgttgcggaaggtgcgggagcaggtgctcacgtgtcctcagctgcacgagcgcctgcagctctgcaggcccagcctgtacctgcccgtctggtgggagtgtgggaagcacgaccgcgacctgctgatcggcaccgccaagcacggcctgaaccgcaccgactactacgtcatgaccgacccccagctgtccttcctggatgcctacaggaactacgcccagcacaaaagactcgacccccaggccccagagagtctctgttgcctctaccagaccaactccaaactgtatgagtctctggcctatacgcacatgagccggacttccgagtcccttgaaaacgaacccgagaacctcatgaaaatcgaagctggagacgatcaccttggtccgcccaggggcagcttatctgacatgacctgtgaaagcttcatctctaaaactcaagatgtcctttcccttacccatgacgagagtctgctgcctgggtccttggagaccatgatgtacgggaagaaggcgctaagccaggagccaggcccttttcagggcagcacgggtgccagtactgagtccaggcaagacaccgcggccatctccgcaggcagagacggaaactgccagccccggggccacgaggcaaaaatagcctcagacccctcttttatggaaactttagaagcaggagtagctcagatgaacattaaaaatgagaaacacctgttgatatctctttcaaaggaaggggaactcggctgcagcgaggcaggaccaagacctgagagaatcgggcagctggaccccaactgctttgcctccccttccttggacccagggaatgagagcgggttcgttgacatgtgcaacctgagtgtctgtgactccagaagaaacgtgtcatcagaccagcagctaatcgacttactagaaagcaaaagcttagaaagcaaattggttttgggtccgaaccacagcgacgaggaggacgacgaggacgaaaacgaggaggaaagtctcgagctggccgcaggcaggcgggaaaggctggcagcgtcgcctctcagcgagcccaccacccgcatggcagggggagcagagcctggccggcttcctcacagaggaagccaagaaagggagcacggaggccagaagccagccttctggaccacagggccctttccttcccacagcctgtcagtgtcactgcaaacacgtggagaggtgggcacgcggcctcgagaaggacgagtttgaagtggagaaaccccaggcttaccccccagaccccttcacaagcaaagccaataatgtcacagtgaggggcgagcccactgctgtcccacctgagctgctccaggtgaagcaggaactgctgaaggaaccctggaaagagagcacagaagggaaccaaggtctccctccgtatcctgaagggagtgagctcaagccggaagacatggattatgagagtaaagaggagttcgataaagacgggaactgccagagtcaaggtaccgtgtgtgggaccttgtgtcctggatgagccag

SEQ ID NO: 33662 - DNA, 1201 bp, Bovine  19866880640746
  misc_feature (1)..(1): n is a, c, g, or t
ncctgcaggttcctctcgaggctgtccacgcgggccctgatgaaggccagctgcccgcagcagctgcccccgccagccacactcaggccctgcagccgggtacccagctgtgagagctcccggcgcagggccagctctcggccatcgaggctctggtgcagcctccggctggccgcttggccctcctcacactgctgccgcacctcctgcacatgcagatcgcacgcgctctggacgccctgcagcttctgctcgaagccgtccagcaggctgccccagagccggtgcagccgtcggtccacgtactcgtccagcagcgccagggaggtgaggggggacgggggcgcctcccgcagccgctgcaggtgagcctcgtggccgagggctagcccgtgcactttgtccagcagctgcaccttggtccggagtgtgttgctcacctcggtcaccttgctcaggatctcatccaggggcgggctgagcggttttccagctctgtctcgggggctcacgaagccctcggggatgaccccaaagcccacgggggtggcaggagccctgggtccaccagtcatcctactggggtcgtcacgcctagccaccaggccgctgagggtaccatatgcttgtgccaggcgctggacgtcaccctccaggcgttccagccgttcaccaaacagccccgggcctttccttcctgggaaagaggaggtgagaaccccaggagtatcactggcctggctcactcagcttgtcctatggcccagatgccgagagattttctgttctaagccgaccttgctgggcatggctccccgccaacagctgtggcaggggggctctggggggctcgccctcatgcccagagtgagatgcaccctcccccacccggctcgggctccgccagcctgggtcagtccccagaagcctgatcaccttggtgggggtctccgtgggcagactcaccatgggggcttggggccactctgctggaaggaaggggcctggggcccgggcccacctgcccagagggactctgggtctcaggctccggctgaggtggtgtggccccgtggtccgtgaggtgctcgggacagccttctccagcgaggccagggcaacaacgccaggcaaggtccgtcaccatcttgtagcccaccttgtatctgggtctgagcaccgagcggtacctgggccgggg

SEQ ID NO: 33663 - DNA, 2000 bp, Bovine  19866880652884
  misc_feature (1)..(1): n is a, c, g, or t
ngtgctgctacggggacgcccttgcagaactcggtggaggagctcttcagtctgctcaacttcctggagccatcacagttcccttcagagactgctttcttggaggagtttggagatctgaagacagaggagcaggtaaataggggcctgaaggattggaggagtcaaggtgatcgctaccttcaccatcaagggaaaaacaaagtcaccatggggacaggagttagccagttttcacacccctggtaaaatgagcaccgcctcctttatttaatttatgtggaggaggatcaactgatcattagcagtttctatccaaacaataaatgaatcggcatccaaaatacctaatctccagcctcttgctttcactaatctcatgtataaataactttagtgattttgttcatcgtctgccctcagggccatgcttccctcctcctctgcttccttcatccttcacccctcctcctgcaacatgtttccaggctcattttcttgaggaacagaaggcaggtgtacattagagtagttggtcggtccagttttatccagatcaactcaatttcctgttttcaaagatgtggtcctgagtcttgcttattggactcaaagctgtttcgaaacaaaccaacattaataaatatctatctatggtgggtagaaatctcgactggacattacagaaataaggcagacaggtgtaagggtcacaagaggaacaatgaacagagctgaggacttaaaaggcaagaaaggtcacatctgtttaggactttggaacaactacatggagagagtacaatttgaaaataaactttaaagggtgggtaagttttcattaggcagagatagagatgataatgactactttgcatggggaaaaaaagcaatcagcagcagccatggaatttattcagtggtaggggatcatctggctgagctggggatgaagtgtggagtatgaagccggaggagttccgcactgtattgtgggaacatcttgaaagacaggttgaaggatttgatgggcattagagaagcaacacaaggctttgatcgtggcaacgacacaattagttctgctaaattaatttagcggtggcgtgagagtgggtctgggcagagaatttgggaatggagaaagtttgggaatttcactaacagatgtcgagagtacatgctgtggttccaatctgtttgtttctacttcagcgacgagtcagactttgagagcagtgagtaatcaaacttcattccccttcttgacgtttgcagtatctattgaactttgcaaagccaactccagccctctctccgtttttggaccgttagaaatgcttcctcttctcccgttgcacttatcttgtggtatgcgttttctcttcttcctagacaatgacctccttgaggacaaggcccacatctcctcccaagttgtgtttgttgtattgaccagcacagtgtctggcatatagtatactctaaatgattcaaggtacaaaccaggtgaagggcgaacgctgaacccagcatgtggcagacttggcatttgtccctgtcttttcacaagtccctagctgtgtctttcccctttgggttcttacgtagtaattccttatccctgtggggattacatacctaagttccatggttgctaaaataaagcgttcattaaatggattagattgaagattggggtttgttggggaaaagccacaaaaatggccccaaatgtctatatattttaaatcctagtaaatagaagttttagaaagcatctggttacaaagtaaagcctattccttgttgtttaaaacctgctcaagtaactcctttaaatcaaactctctagaaatcactttatttcagcaggaagcattggcacaacccacagcttatttgtgcagaatctacccttttgaaatttttgaacagctctttataacttgatctttcgtacttgcctcttactttcccaccagcataatctcacggtc

SEQ ID NO: 33664 - DNA, 995 bp, Bovine  19866880820422
  misc_feature (1)..(1): n is a, c, g, or t
naatgaggagtgcaattgcaaacccaagtgtcctccctgcccactgaagatagccaaggatttgaaggggtgagttcttttatagcttctgacccatcattcaaacctcttctaagaatctgcatcttcagagtggcacacagaataggcatacagccagaaaatctcaacagtttgcatttagagaagtaggagcccagccgatgagggtcaaagaataaagactttccttgtcactgccccccgccccggccctgccccacgtggacgctgcagagaaggccctataccttggcgaaagtggatcctttcccctcagactggatggtgatggtatgtgtcctcctctgcaggatctggtctatgtcttcttcacagaacttggagccttcgtcctcttcatccatcaaggcgccgtaggcacctttccggagcaagtcctctacctccatctttgagagctgctgtacctggatgggtcaccaaaggctactcacgaagtgggaaatgcacaggaggaaaacggcctcaactctgaccttcaggacttagcgcccagttcctccactcattgtgcatgtcagaagaagaaagacatggacaacgagctttagaaaatgaaaacccaaagacacacaggaggatgatggggagggcgggcagacgatcctctacagggagccctggaataaaacccagcccaggacccaacggccctaacattcctcaggatgttggttattatcaaatgtcacaaactgttaaaactaggcaccaccggagagaatatgtttaaggtttattttatgttttagtttgagtctgtatctttaaaaacctccagatggaccaaactgagctaaagaataatgatttattcattattaaataaaaacaatagtattggaaatgatgtcatttcttaactaaagaaaggataccatgccaaggtgtgatctgctcaattgcttgctgaaaacaggaaatggggagtt

SEQ ID NO: 33665 - DNA, 750 bp, Bovine  19866880823021
  misc_feature (1)..(1): n is a, c, g, or t
nggataaataggaaagggtggtttactatggtttgtgggatgatggcttttttcttaaccttttcttaggattttttttccttctagttttctgccttaaacatgagttacttttgtaatttttgatgtcatcgtagaaaatttttaaactcacctccaccagcagaatgccctggtctgaaatcttacttaaatatgacccaagaaagaggaccattctctccccaaattaccctgcttcccacgcaatgtttccctgttacgaagcactacaccaatcaagtcccacgccacatagcaaggtcacaaaaccaacttggttaatatgtttatcattacatagaagcactgtactctccagcaactttgataccgtctttccaaggcagcaatagaagggttcttttcatgaatttcctaacactcttctactactatgccgcttctggatttttccactgtgtgtctcttagaaacaaattaagcccgaataagtttgttccagctaatgaagtgcgctcttggctctttccccgtggttgagaattatccggcaaaataccaattgttttaggacgcgttttctcttagttttgaaatatcgcaattcgaagttactgcaaataaagcacatcaaaataacagcatacaagagaatcggtaaatggaaactattgtaaccctttttaaaactgaggctgtacgaaggtctcatgaataaatacactatacgtccacatgacacatata

SEQ ID NO: 33666 - DNA, 1718 bp, Bovine  19866880846142
  misc_feature (1)..(1): n is a, c, g, or t
ntccgacatgcacgagaggctctttttaggaccccgaaagcttcttggttggcttaggaagttgcttttacatgcagaaaattttatctgaattgtgatgtgctcagtgaagaaagtgagcagagggatttgtgaacaaaggaaggatcctcagccaacgagtttggagagagaggaggttaacggatttgaggttaaaggataaagagaaaacaaataatttaaagcacagcaggattttgtaagaagattttgttaagtataagcactttgcccagtatccttataggcttgtcctaagcattggtttccataaagaaggtaaatattaaatgaatgcagtcacaggagaggcagggctcataccatagttttcacaggcagcaggagacacccaggagaaatttaagatgtgctctcatgggacgcagctctgctttgtaaatgtgatggtggcaggaagacaaacggaaagacaaaagtatgtcctgcctggtagcccttgtcccaggtgaatcagggtcacgacattgagtctgttctagaacccaaggtacaaggtgaaattaattctacctgaaaactagcaaagagggttttctttgggcattcaagctctgcgtggtttagaccaccagctggctaggaacatgtgggtcaacacccatcagctttccctatcatggcaagtaatgaacaaaaagcttccttgcttggccttccatactcttatctcgcttttgtgggggtacatgcaatcttgatttttgtttctttgaattaacaggatctctctcttgtctaaacagctggtttgattctcctattctttctcttctcaaagaggaagattgtgcttattggcctctcacctaggtccgaccatctatcttgccaccttctccgatccagctcgtaacccggcagctgcgttctcccgccgtgtgtaaagctctgcctttgcttctgtcatcctcagggaaaccccctgtcaggtgtcttcaagttccatgttgtcattacaacatttgagatgatcctggcagactgcccagagctgaagaagattcactggagctgtgtgatcatcgatgaagcccacaggttgaagaacaggaactgcaagcttctggagggcctgaagctcatggccctggtgagagttggcgagctctttctgtaaacacaggcccctcctgttcacggtggaggaagcgttctctagccatctgcatgcagcctgcttctgcacagtctgtttaccctagattttcttcttgtcctttgtacctccgatggtgcaggaatcaaatttttgttgttgttataaactgggtcggcaatttgaccttttccacagattgactcccagagggacccaggggcatcttaagtaccatggcatttgtgaccaggaaatgtgttgttttggcttgtttccaggtccctgaatgatctggtaccaaaaatgatagccttgaacatcactgccttggcgcagtgaccagtctatggctagcaggccctccagaatgggaatgagtgagtgggtgctttagctaacatggaattgctgctggactcaggggtaaaaggaaggttgatctgtttgttgatgttatcactcgatgttgtcataaaagcaaaaacaaacttgcccccaaattgagcccaagaggcccttggcgtcactttcccacccaaacctgctgtcttgg

SEQ ID NO: 33667 - DNA, 701 bp, Bovine  19866880881982
  misc_feature (1)..(1): n is a, c, g, or t
ntaagcagcacaatgttgatccacagtagatgctccacaaattattgaaaatttctgagacttaatgatactaatgaattttagaatgagttgccagtagcttttctttttctgtttatcccaaaagactttgagttatggcgaggatgaaattattccattctttaccggctctgttttctttggcaagttgcttaacatcctgtgttttggtttctttatctatacaatgggaataataacagtacctaactcataagattattacgatgactcagaaaaataatgtaataaatgttgcttgctgcattctagttcctcagttattattaacagtgcatgtgagaagggcaagtttttaacagtaaggttttagatgctaaggtctttcagtaggaaggtgtttactatctgaaaaccatctatctgaggatggataaatataactacttctgtattaaataaggaagtaacctttactcagaatattaacaacagaatgggagcagagctaattaatttctgccttgttggcagtaatgcagtgttggatgcttgctctgttcccaggggcatagtgatcaatacagaagcagatttcccagatcagccttccccaggaccaaaggcgcttcatcttacagatgattggtagttacagttgacccttggaacaacatgggggtttcaacagcacaggt

SEQ ID NO: 33668 - DNA, 757 bp, Bovine  19866880892621
  misc_feature (1)..(1): n is a, c, g, or t
nttgactcccacatcaagctttttcatgtaatttctccagccttttgctctgtgtctgcatagaaagtagctaggagcaggggcccttgtgcctatgttaacaatcaggaaataagcacagaacaatccaggtcatagcattacatcgcagcagtggatcagtgatgagcgtgtaagaactgatttcgtgtctctctctgggtcagggttatccagctaatgaatagaacacttaataggaataataatttgaagtagtacaagcaagtagttaaaagtagtccttgcaaaacttctttgacgtgataggattacattgctttacagtgggtctcctgggactgccctgtggtccagtagctaagacttgacgctcccagtgcaggggtgcaggttccatccctggtcacggaactaaatcccgcgtgtcacagctagaaagcccacattttacaatgaaaatcaaagatctcgtgtgctgcaactaagacccagtgtggtcaaatgaatatttacagtgggtttcccttccttggcgattttatggttgctttggtagttaaagcactctaaggggttttatttactcctagtagccattcagcccaggtcactaacttatttcgggtgttggtctgacttctacctggtacctaaagggcagtagtttttatcttcacaaggctctttttatcctcatgaagggtacattcaagaaggagtttatatgtggtgaaacataagctagaatctgaat

SEQ ID NO: 33669 - DNA, 897 bp, Bovine  19866880903803
  misc_feature (1)..(1): n is a, c, g, or t
ncagtttatttaactgagataaggaagcaaagaaaagaaaataacctgacttgatatcaatattacttgaaaacagaatttcagcaacccctaaaccctaaaatatcttcaattttgttaatacaaaatattccacataagtcaggcttaagaattgggtaaaatatgtaaatatgtggacaaggactagagtagtacacaaaaaccactattaccaccatactgccatccaaaacagaaacagcaacatagaatatcagtgaagacagaacagaattcgtaacagcaaatcctttttaactttagagatcatgcagagtcaaagggtcagaaagaactagaggaagacgttccccttgagaatggttttaaaaagagaaatcccctctatttccaaactaggatggatcagccaacgcatctactgtttctgaggaacaccacttagcaatcaaggtaacacagaaatgcaggtgtttcaggagttctctcaccattgatgagatatgggtggttgcagcatttccgcagctccatcattgtgttgagtagattcggcatgttagtatgacctgcccctttggaaagaaaggagaaattcttctccaaaatagcccggtagtatttcttctgaatgttggttagctctacttcaataatggtctcctgtttgggtgccaggttcttttcaacatcttctttgagtcttctcagcatcattggtttgagaatggcctgtagcttttgaacctgtaaccaacagaggaaaaaataataacatgaagacaaacattctcacattagatggaaacatggatatcaatgacagtagatatctactctagtacaaattttttcattctgcattagtgtcacatcagacaacttcctacctgt

SEQ ID NO: 33670 - DNA, 709 bp, Bovine  19866880906011
  misc_feature (1)..(1): n is a, c, g, or t
ngggtagatgtctttgggctccggaggggactccccttctggctggatgctgctgagggggccacggggaaataaacggtcactgacaggacaggtaccctgggcagggcatggaagcctggacatcaccgaggaagtaaagcaacgaaagcccagagaggtcaaggacctggcccagggtcacacagcattgccagaggaaactgagcttgaagcccaggtggcgtgcccacaccctcagccccgtacataccctgggggctccggccttggcttttccagcagggatggctcactctcagcgcccgcctccagctcctctgaactagaatcggctgccaccgtgccctccttccgcttggttttcctcctgcgccgtttcttcttccgcccactggaggccatgccagcgatgctggcgtcaggctcgctggtggtgcccagctgggagtccgaagggaaccctgccaggcccccccaagggatgggtgacgtgcataggcggggaggcacgtcttcctgtggagcaaagcaggggcagggctaagcgggtgggaaaacaggcctggaggctggacggggcggcggtcgcatggccctgtgacttgctggcttccgagctcctcacggaggtaaggcagccccaaaccccaggccctgcccacagggtcaccagtgaaagatgcgctcacttcatcgctctccagct

SEQ ID NO: 33671 - DNA, 1290 bp, Bovine  19866880910295
  misc_feature (1)..(1): n is a, c, g, or t
ntaccaagtaccctgtaggatcaagaaaggtgcagcagaacctgtgtccttggggatcccaccacccagctggggaaaaggaacacggaacctgaagatgagaaggtgagtgagctgcggctcagcacagggaaggagcactcccaggaaacacacagacagaggtggaactggggtggggcatgcattccgagtcctcgggtcacaggaggagatgctgtgaccccgagggcagagggcaggagcagagaacttcaagagggcccagccacacttaaaacatcccaggtaacatggatgagtgggaaggagaatggaaatgaacaaaacccagcatcctttcccaccagtggcattctgaaatacacctgagaagagaaagaagtccccgaagcacagcgatgtggaccagcacagaagagggagggatggacacactgccacctcgcacctgagtggttctggagtgtctgggcctgtccgtctttggtgggcgtgatcagctcccagatgaagctcttgatcttctcgtcccctttgtagtgcttgacgcagtacaccagcagggcccggcagatcatctccatgtccttctcgttcagatgccacttgaaccgcccgtgcgtcaggatgtccttccaccggccccagctgagagtggaccccagaagggcgttagaaagaggaagggccagttgtgccctcgacacggcggggcacacaggagccaagagcgtgtcttgacccctggtggggcctattaacctccctgagggctttgtctcctgaaaaaccttggaggcctgcccactgcagcccaccaaaaatgactgaggggacctggacactggacacagagagcttcgtacggccgctagaatgttaagtaggaatgccagtatctggagtgaggagtaaatctggaattaagacagagtccagctgcagtgctggaaagcgatggggagctcccagaagctaaaccctcagcttctaccagcgccagagcccggcacgcatcatgcggtaacgctaacatctgctgcactgattcctgtacgtccttggggggaaaaggccggaaatcagtaccaggcagcaaatgattcccagagatgtgctgtggcaaacacacgagagaatcacggtacgtccgtaaaatggcggcagagcatactgactgaggggccctcgggcagaaagctcagttctctctttctctaacagaccctccctctgcccagaccccataggggagggggagagacacgctggacacatctcgactga

SEQ ID NO: 33672 - DNA, 1823 bp, Bovine  19866880958286
  misc_feature (1)..(1): n is a, c, g, or t
ntttgtgccttccactggcgccactacccttttgtctttcatggaagagagaaacgcacccattcggtggctccctttgccacaaccatgaccacttctctggtctctatcatttcatgcttctcgccccctccgcctaggcctcttccggaagctcggctaagcccctgcacactcatctatgcggcctggacgttgtacctacttcaatcatcttccctcccgcctggatgctccaactgcttctgactgtctcagggcaaggcattttcttccccctcttgcccactgccctgtacataagtcacttcctgaccgtgacactggacaactagaaagaggttactaaggggacggcagaatcctcctgttaggagaagctggactaagtagcctctggcgatcctacagaagaactggcaaggctggatgctggttactgaatcaaaagggtgtaagcagggattgtctgctgggtctgtgagcccaggagagttcaacactcatctgaggacaagagcagacagtgacgtgtgctcaatcccaagggaggtgatggggtcagagatggaaggtagggcagctaacacttctgggagcctcacagtggggctgggggcagctgccttcgcagtgttacctccaactctgcaaactgggtgccaccacctcctttgttcacatgtctctcttttttttcactttctcattgaggtcaagtaccttgcccaaagacatacagcgagtcgatggcagagccagtattcaaaccctggttttagtccaaggccattctcttcctcatgttcagaaatagaaaaattcaagatactgaaagaatggaggggaacctaatacgcttttccacgtcatgcttttttccactaatgtttgtcagaggtaaaattcctcgcataggaagtgctcaaatagaggaaaacagccacatgctaaggacaggatattggcttgggtcacggggctgatcttgatctgtttggttagttctagttcgaagtgaatttttactaaaattggaaattccagttttaatagaatttcccaggtacccattaggtcattttaaatacagttaacatttctcaagctttgtctatgtggcaagcatgttttaagtagattacatgtagcatctcattaaagaactaaggctcaggagtgaatcatggtttgagctggtaggagtttatggccctatatctgtgaaatgtttaatgaaataaaatatgcttaatgttgtaccttctcactctttgcttcagtgtccagttcagctattttagcccacttctgccaaaagtttgggtcatctaaggaaatatccgttctgtttcctgaagccacaaagctagcctgtgaagaagaaagaaccaataaaccatatctgaacacaataaaacaccctgtgatctccaatgcaccagagacacaagtatatgctccatctgcattcaaaatcaaaacctctaacagagctgccaaaatgttaaatggaaatctcaaagctattctttttaaattttctttcaaacactgggtgaggaaattacaatttcaacctacaggatcattttttataacttaaactcagaagcaggaggacaagcccgtgggagacaatggcaagcatatgtccagctgcccgtgcaagggttgattcttacaacttccctggacgtggtttctctttcagttcaccaggtcccaagtgtccatgctgggacaggccatggctgggcagtatgaggtctgcagagatgagttatgcctcttaagtgcaaaatgtccctggaaaagccctc

SEQ ID NO: 33673 - DNA, 1105 bp, Bovine  19866881007832
  misc_feature (1)..(1): n is a, c, g, or t
ntctaggtgatcccatccgtctcatggttttaaacactggctatatgtgtcttgcctgccatatttatttatcctgggctccccaggtggtgctagtgataaagaagctgcctgtcaatgtaggagatgcaacagatgcaggttctatccctgggtcagaaagatctcctggaggaaggcatggcaatcccctccagagttcttgcctagagaatcccacgacagaggagcctgatggactactgtccatatggtcgcaacgagtcagacgtgactgaagcaccgtaactcgcatgtgtgcatgttgtccggactgccatagttatttaatccagcttagaaccccataattatagactcctttatccaactgttatttgtcatcagcacctgactatttcataaatatttcacacttcagatgtccacaaaccaaactcttagtctctcagccaagccaccaaccctaccccttcaaactacagttttcttacaattgaattaaaaagaactctatccctctggatgttcagtctcaaaatcctgtaattcccaactcctctctttttgtgccacataccctatctcatcagccaagatatcctgttgagtttacctttgaagtatgttcagaacccagccatttctcaccacctccactgcttctaccctggtctaaaccaccttcatctctcacccagattattcccagtcatctcttaagtaatcactttgttacccagcctgtcctactggtctattctcaacacaactatcagaatggccccttcatttaagtcatccttttgcttaaactgcttttctttcaacttgggagtaaaacctaaagtctcccaaaggtcttcagaagcccacggaatgcgtccccagcctctcacctcctctgtcacctttcaggtgtccttgtctgtccctcatacacaccaggcacgtttccaccttcaggactctgctattccgtctgcctgaaatcctcttcttcctacatgactccctcactcctttacttcctttagttcttggatcatacattacctttgtgaagccaacactgatcaccctatctaaaattgcaaccttcatt

SEQ ID NO: 33674 - DNA, 640 bp, Bovine  19866881273955
  misc_feature (1)..(1): n is a, c, g, or t
nctggaggggatgaactggcttctttttaactggtataacaggtgtggaaccagaaccagtcctgtcttcagggctgatctttctaccaaatgtttgtgccaggagggagatggtgggcttagccagcatagcgggacagtagcagaggggtggaggagtgcagtggagccatcagttcagtgggtgatctctgtacatcaggagtaccaggacttctgtttttcatgtcagatttggtttggtttgctttctctgaccagagagtaatgatctttagatgtcatcaacattgttcttttttttcctttgtcagtctaaccagaaggttgggttcaatctaagtgaaacaaaaccccaaagatcctttaaaactgtgtttttatctcccaagtcttgaacacaaattggctctaagggagaatgaatctgcattctagtcccaactccactatctgtttgtgagccgtggatggcctcgacttatcgttttcaaccctgtgcttcagtccctgtcagaatctacatgaagcacatgacatctgagaaagatgggttaacatcttttaagatgttattaacattctagggtgccccccagcattgatgttaaagaccacatggcatggaacacataccaag

SEQ ID NO: 33675 - DNA, 1054 bp, Bovine  19866881437151
  misc_feature (1)..(1): n is a, c, g, or t
ncccttattgtctaaaagatgcctcctgggcctctctctgtgttgtttctttactgtgtcacctcaatgacatttaattttacaggagagatttcacataaaaagctctccctcaatcccacgtgcagattaccatcccagaaacatcgaaactacctgctgaccctcatggaccggacgtacttgctcctctgccagtcaggatacttgggagtcactaacccaagtatataggcagtgaaagggggtctcggatctgactccccagacgtcacaacttattcatcactgtgatgttaggagccgacactttcctacagtgaagatcacaggacttaaggtatagtaagttgatcttatcctaaatggccccttgtgggagcagagcccagataaactgctgcggttgtcagaggaaacagcactttgaaatatcagaattcaagtccaagagacgctgcctcaactcaagggagaaaactcctaccaatgtctcacgcccattttggtgcatcttcagaaatctcaatttgggtgggccactcatttccccaaattttccttcccatcttggcaaaagaaatccatccctgactttcccagcatctgggattatgaacgtgtcctcatgcagactggcttattagcaccccgagccatcaacgcatcacctacaaggcgagagaggccctcggagcctcatctactttggatcacacttcccctctccacgttccctctcactgcagcctgataccatgcgactctcctggaaggaagccaacactgctaaaccgctgggagattgttagtctaaggaccaggatgctagataaagagccttgtggtcacccactaacatggggaaagcccagcctaggtctgggtgcgagggaagcaggctggagacagggagagaggagtaccgggatgagcgtcagcgagaccccaccccgcagccgcagtgcccgctcgggctcctggcacagtggtacctggctgtctgcagactcagtggactcctcggggctccgcagggatgggttcggcaggc

SEQ ID NO: 33676 - DNA, 1173 bp, Bovine  19866881486949
  misc_feature (1)..(1): n is a, c, g, or t
ngttttccctttaatatggaattaggaatcttcccaggacaatgcctagatgtctgattttttccatcattcttgcctggaactccatgagccctttcaaacccaagtctttcttcaaaccacggaaaaatttctttctcgttttaaaattatggcttctcctccatgtgttgcttttttccttctaggctttgtattattcccatatgatgtctcctgggtcttcctccgccaagggcttgggttttccttgcatgctttctgatgctatttttgctttgcgttttgcattctctcttccattcgatttcccaggtctccatcctctcctccaattcatttgaaatttaaaatcatgtttcttacttcaggaaagtattttctttcacatttgattttttttttaatgcttgcattgtttttttttcttcctgttgctgttcagttgtggcttgaccctcccgtggttctgagtgaattgcaggctcttactcctggctgttggtttcctttgcgtgcttactgttttccatttgtctcccctcaaccccgaacttcaatatacattttattaagttccacatcttccccagctttattgagatataatcgacagataaaaactacgtatagttaaggtgtacagcgtgatgttttgatatataaattccttgtgaaacaatgatcacaatcaagctaattaacacattcatcagctcacatagttttttgatggcggtggtggtgagaacacttaagaatgctctcttggggcttccctggtggctcagtggtaaagaatccgcctgccaatacaggatccctgatcagggaagatcccatgtgcctcggagcaacaaagcccacacctgcaactgttgagcctgtgctctgctgcaggagaagctagcccaataagaagcccacgcaccgagactagagaaaagcctgcacagcagcgaagacccagcacagccaaaaataaacgaaagaaataacactattaaaaaaagagcaactcagtgtatttcaagtacataatgaagtattattcattatattaatatttctgtcatttggtctccagaacttattcagttgttccgcataactgaaactgtgcacccctccgccaacatcttccctttgccctccagcccatggcagtgaaag

SEQ ID NO: 33677 - DNA, 699 bp, Bovine  19866881789357
  misc_feature (1)..(1): n is a, c, g, or t
ngagtgatcagcataagcaggaaagggggtcccagctggacctggaggagaaaagggccagaggtgtggataaaaccaagcactgggtgtattggagccctggagtggagaaggacatgtgagtggaagatttcagagttggagcaattaattactggacagaacaggcacccgggttttgccacggacatacatagcccaagtgaagtgaactcagtgaaggaggccaagtaactgaggcttgagagttgtttgggtcatccctgtggttatccaagccatcaaaaggatggcaggacgtttgaggtacagagaaggaaggcatgccacgtcttgggtgaatggcgttccagcaaatgagaagagggttgatggccaccctggaggagcctcagaagactggggtatttttcctgagagcagtggcagagcagtgacctgaaagctttgttggttgtgggtctctctggaagcagtcagccttggctcaggttcactgtgcttctgaaggcatcctgattccaagtgagcagcatggtgacatgtagtattgtatttctgtacctggcgtggaaatcatctgagggtctgcgttaaaaattcagcttccagggctccactccaggcccactgaattagaatttctaggagagaggactgagattgtatattttaacactctactctccacacacatac

SEQ ID NO: 33678 - DNA, 969 bp, Bovine  19866880422333
  misc_feature (1)..(1): n is a, c, g, or t
ntgcttaccatttagaaaactttctctaggacaaacttcagggacttaaaaaatgttttccattcattttcttttatttatttatttttaaaaagtacacatgtaattccccaaagaggataaccgtttggaggaaaattactttcaactgtggttcttttagtcataattgcctcggttttgctcctaggagattgctgttttcagctctgtgcattttctggattagaaaagcaatagattttctcctattgctctacatcacacaatgaattaacaccttcaattttgttttcctgtgctttgttattataatgtaataagccatttggcacaccatgtttccttcattctgttgtttggctgaaaaacccacttgccaagcaatgtgcccatgatctgccttagtctttaggttgatggtgtgattctgatttgtttcaaaatgatgctcaggatggcaggatatttggtgatgatgtgagatttgcttgagagatcattttcctttaggctttaggatacgaaaggagggagactgaagcagatggggaggttaagagaatgaagaagacctagatgtacaaggtgggatggacctcactcaggaaattaacagtgatatgaatgctggagtgacttcatggggaacagggagatactatcttccttctagaattttctctgggaggagattcaaatgttaaacctttgttttggtagagggggaggaaggaagtggaaaagcagaaagtattttctcctggctcactgttgcttacttggagaacacttactgtgagaacatctttatactctgcttctctggtgactcagatggtaaggaatttgcctacagtgccagagacctgggtttgatccctgggtcaggaagatcccctggaggagaaaatagcaacccactccagtattcttgccggagaattccaggacagaggagccggcagg

SEQ ID NO: 33679 - DNA, 1626 bp, Bovine  19866880456338
  misc_feature (1)..(1): n is a, c, g, or t
nttagcgatgcttaatcccaccttatccctcaggcagtcctctttcaaagaacctcacgtttactaaactccactctctgtgcaagtgtaaatcccctccctcctgcagcctgcctcgcagcgaagcactccagaggtcccattccatcctctgatccgcttcaatactgcgggatcctgctttcctctgtcagataaaagcccaggctcgcaacagcacactctgttggtaccgccatccagtaaacaccctcactcctggcagggagacgcgcggcccagcccccgtgggggaaatcagggcttggcgtgggaaaatgttaggtcctgctcccaggagtctcttccagagatacatgggccaagatacagaaggagattcacgtggctgctccctgtagcaacgactgtgatggcagagacaaagacattccccaaattggaagcaaccttctaccctgagtgggcttccctgatggctaagctggtaaagaatccacctacaatgcgggagacctgtgtttgatccctgggttgggaagattccctggagaagggaaaggctgcccactccagtattgtggcctggagaattccatggactgtatagtccctggggtcgcaaagaccgagtgactttcactttcgttttcatggtcaagttcaagatggcagatccacattctccaaaatgttaattttttgcttgaaagcttcatttttcattattaatagacattgcaggttgtttgccttgaaacaacaggcttattttatccatgttcaggaaagggtctagcagatacccacgcataagtaattatagtccttgaggcttttaagtaaaaacaagcagctggttcagctcatggctcagccacacgagggcgctgctgcacctgctgtcacacgaggcaggcgtgtcaccaggaccccagtcttatcacaggaaggttagaaaggcgtatagccccgtggttgagtcttaatacaatgaatttttatcagttcatcaaggacagtcttagctgaagctggtgtgtgcccgtggtgagggatacttgctaaaatgccagcagtttctcccactaccggttttgcacatcactgcagatgaaaaggagagggtgacaacttagtattatttgaaaatagtttgacctgatgggtccccaggaggccttcaggaccccaggggtgtgtacagcacactttgagggtcagtgcaggaagtcatggcccagtatttaagactgccttcagtatttaagactaaagagctttttctaacctcgtgcaaaaaaaaaaaaaaagccaggcttcccggagccactggcaggatttgaaggtgggaaagcgattcttggtttaataccaagaactgcgtgctttccccgcccctggtgttttcccaggtaaagcgtggggtttgatatatctgagggaaagacaaagaagggctgtttttggagccagcatcaggaacctgggatgtgctcccaagagcctaaccatgcggttttctcgagagaacagttgctttccgaatgcgctgacaccatgcacgtgcttcctgtgttctaacccacctgtttgccttcctttcctaggagagaaggtgcacat

SEQ ID NO: 33680 - DNA, 950 bp, Bovine  19866880707847
  misc_feature (1)..(1): n is a, c, g, or t
ngatctctttacagtagtaagaaaagtcctttacgggtttatccttaagaggaaaacctactgatgattctcttcttccttgccaccaagagataatgtaattatgtaaatttctcacagtgacccactgactgatgagcaatggatgtggaattcttaaataggaagtaaataaactgactcaaagctgtgatggtataaagtctacgtgagcttgctcatacaagattcagaatatctccctttggcatacttcacatgtctgaaaatatgctgcaattttcagggacaggaaattagttcaagtactttaaaaaaaaaaaaaatttgtacttatatattctttttcatattcttttccactgtggtttgttacaggatactgaatagagttccctgtgctatacagtaggaccttgtttatccagcctatagatataaagttagcctctgaaaatccctaacagtccatggggtcacaaagggtcagacacaactgagccactaaagtgaataactaaaggccattccttccgtcctcaaccctcccacccccttggcaactataagtctgttctctatgtctgtgtagctcatgtacttttatgaaaagatcgatctattcaaaggcaggtagtgtcctgaagttctaattgttttagagaaaagggggcaatcgtctctcttttggaatgctgaatgacctcgattggtactgtaatccccacagagcttttgaacagatgaatggaaattaccacatttctcccagcttagacataaccaaaatcccttcttggagtcatcagtaaggaatttgcttcataactgaacctgtggtttctgggctctctgccaatggcaggaatgaataaggactaggataaacacaagcaagaataaaggaaggtgttttgcatctgaatttatgtctctctcttaatctctat

SEQ ID NO: 33681 - DNA, 3957 bp, Bovine  19866880719773
  misc_feature (1)..(1): n is a, c, g, or t
ntaaataacctgttaactgtgatatttttctgatctgattatttttaattatttaaaaaaatattatttatttatttggctgtgttgggtcttataaatagttgttgccacaactatgtggggtctaggagggatcaaacccaggcccactgcactgagaacacagaggctgagccactgggccaccagggaagccctgattgattaatttacgattcaggtgattctgcctcaaaagtgtgttttccatggatgcatttaccactgaacccaacaatcccactggtagaacttcgtcatagacagggctgcttatgaacgagaagacgtctacacaccgtggccctctcggccctgttcataacagcagcagcccagggtgctcagccttgcacgagttaccaagcaaggcatgtgcacacagcaagttctcccgtccatggaaaaggaggaggcagacacctctttaggtactaaagtcactcccaaaaggtacgaatgagtgacaaagttggggcaaaatccgctcccttttaggtaggaagatggaaagaggagtgaacagggagcacaggcttgcacgtgccgcacacagcaccagggcgcagaaacgagtaacgaacacaaagcgtgacccaagtgtggcggacgggctgtgggaaccagacttctcaacttacacttcttcagttttatttttgaaccatgtgaaacatctaaaaataagttttaatatttgatatttctttccttatttagaaacgaagttctgaatgtgggggtcgctgaaatggggtgtaaaagttttgtgaagtgaagtgaagtgaagtcgctcagtcgtgtccgactctttgtgaccccatggactgtagcccatcaggctcctccctacatgggattctccaagcaagagtactggagtgggttgccatttccttcttcaggggattttcctgacccagggatcgaaccccggtctcccgcattccaggcagacgctttaacctctccagacacaggtactgctgcttctatcagattagatcaggacctgctgcaacagacacagcctggggctttgcagatcctttccgctctccatgccacttgcagctcagctatcaggttgctgttgctcttgttcagtcttaagttgtgtctctttgtgaccccacggactgtagcatgccaggcttccctgtcctttaccatcccccggagcttgctcaaactcatgtccactgagtcagtgatgccatccaaccgtctcaccctctgtcgttcccttctcctcctgccctcaatctttcccagcatcacagtcttttccaatgagctggctctttgcatcaggtggccaaagtattggagcttcagcttcaccatcagtccttccaatggatatttaaggatgatctcctttccattgatttgatctccttgctgtctaagagactctcaagagtcttctccagcgccataattcgaaagcatcaattctttggcacttagtcttcatggtccaactctcatgtccatacatgattactggaagggccataactgactagacagaacctctgttggcaaagtgagtctctgcgtttcagtcacagctttttttttggtcatagattttagctctaccctatctaccaggatctacagtcaaatctttcaaaattctgttaatgtttcagcttgaggcacacaaaataatcacaaaaccatctcatgcttctcagaacagagaaagaaacacaggggtcaaagccaaacggacctcagttttcccggcacacgctgttttaccaggtgtcctcagagccgcgacccagtaaacaccatcaggaaacaagtgctgactgactctggctgaaacgtacatgtacatccccctgcatgggcagtgtttattcatcttcaaaatatttaatgaaaacccgtgcaccaaacacatcatctccctggaacctttcacagcttcaggagatgagaattagagcgaacacatttaaaagagaaactccagcctgtctaatgaatggcaaaatctgacatgtgcgtatgtcataggggaggcagttagaacagagtccacagggaggcaggaagcagtcaccctgcctggccctgggtcatcctgagcaagacacacaattttccctggtgatctctgctccctgactatgtctcctgccctaaacactgtgtcatggtcgtctgtgggaaggtggctcgctgattcattgtttatggcttcgctatatatataattttgtgatcatctaatatagatggtgtcaataccttcttaggtctttttcctgttttaataaacaccttaatgtgaagatggagtatgaaaatacttccaacatgaagcattcaacatagtcatggccacttgtgtggctccgtaattacatgctgcacagaaaacacgccttaatcacaggtcttgggccgatcccttcaccctagatccaccctggggctcagaggagggactaagtctttgttcttggggcaactctctgttcctcagtttttcttcccacagggatttatattagcagctattcaaacagaccaaaaagtgctctttttccaagctaatttaaaaaaaaaattatatagatcctcccattatatatttttaaaggatgtgtgggcagatacaggtttgaacggctatgcattcggtgtgcctggggtggctatgttttctgattaatagggacaattctggtactaagcaaatgcctaaatacagcagaaccacaaaaagactcaactaaaatttttaaaatcactaaagcctgatgggtttagacttcccaggggtcttcccaggtggcactaggggtaaagaacccacctgctaattcaggaaacaaaatgagataagggttcagtccctgagtcaggaagacccccaggaggagggaacggccacccactctagtgttcctgcctggagaaccccatggactgaggagggaatggccacgcactctagtgttcctgcctggagaaccccatggactgaggagcctcacaggctatacacagcatctcaaagagtcagacaggactgatgtaacttactgggacagcctttttaatgtcttatcttacactttcctaaaaggtgtaggtcatctaaaaggcataagcagtcatatgtggtggactagattcatccttgaggcagcagatttcacgatgtagggaagaggatatttgggttgaacaaacgttaagcccagctgtctcaaaacccttggggaaatgtaagaggcctgggtcccagagctctatctttccttgcctacatttctggtgaaggcagagaagcaaaggacgaggccttggccctgtgagcagagttcaggcttcctctcaggagtgggtgtctcttggccaggtgggctgccccgggaactgggaaggtggtctggatcggggtgaggaccctttagttcagttcagtcgctcagtcgtgtctgactctttgtgaccccatggacgcaaaggcacgccagggaggacagggatggacagggcttcctttccatcaccaactcccggagcctactcaaactcatgtccatcgagtcggtgatgccatccaaccatctcaccctctgtcgtccccttctcctcctgccttcgatcttttccagcatcagagtcttttccaatgagtcagttctttgcatcaggtggccaaagtattagagtttcagcttcagtatcagtccttccaatgaatattcaggactgaaccttagcaactgcttatattctgagcaggggaaccactttaatatatctaccctctgagctggcgctcaccaaacccagatgatgggcaccaggcgaggcctggggttcctgagacagcacacactggcagcctctgagtcctcctcttccgccctgcaaacctgt

SEQ ID NO: 33682 - DNA, 890 bp, Bovine  19866880755346
  misc_feature (1)..(1): n is a, c, g, or t
nccaggctcctctgtccatggggattctgtcatgccctcctccaggggacagtcccaaccaactgagaccaccaggaaagccccaaagatacaggctgcaggttggtgatggtggtttagtcactaagtcatgtctgattcttgtgaccccatggcctgtagcctaccaggctcctaaactgttagaggagaaaaatcaatgagtgacagtaaattatatgatccttttcaaattcaaggacaaaaagaaaaattaaggtttagtgtcactgtccccaaacaagaaaaaacccgactatattcattagtttttaacatgaatccatataaaatgcttaactgcagatataatcagatatcactcagaattcagtgtcaactagagcctaacacagtatatgcttgattaaatatttcttatatgaataaatgaaataataagttatatttaaacatttttcttgtgctactaatgaaaacgcttttactaatgatgattaattttagactattggaaagtcattcttataatcacatacctggaaagaatatattagcatcattgcaccattctcaaataaatttaactgctttattgtttaagggccataagcttatcttttgcattagagactgataatttgaagcattctaaatagtcatttgcataaaaacattaaaattttattcctggataaaggtagcaaattgtgtttttgaagtacagtacctggtatttagtgatcatgttttccagcccttcaattttagaatcttgcagtactgagtatgtcttgaaggttgtaaagatatccattatcttggcaagacgtctgtggaaagtttcaaattttccaaaaatatacatctcactgaattcaaattgtttt

SEQ ID NO: 33683 - DNA, 1281 bp, Bovine  19866880767401
  misc_feature (1)..(1): n is a, c, g, or t
ntgctctctcggctggaggagctccggacatcctcgccaagaaggagttgccccaggatttggagggggcgcggaacatgatcgaggagcattcccagctgaagaagaaggtgattaaggcccccatagaggacctggacctagagggacagaagctgctgcagaggattcagagcagcgagagctttcccaaaaagaactcgggctcaggcaacgcagacctgcagagcctcttacccaaggtgtctgccatgctggaccggctgcactcgacgcggcagcatctgcatcagatgtggcacgtgcgcaagctgaagctggaccagtgctttcagctgaggctgttcgagcaggatgctgagaaggtagcggatggggccgggggtgctacagtgcttcctgaagggaggctgcctgagtcgctgggtctgagcacccgaggctggtttggttgggagaaagggcggaaaaaaagggctggggagaggcgagccactcacatggcctcggttagagagcagcagtgtcagttcggagatctcccttccgtctgctttccagcgtttctcatcgcgcatgagagcctcttctagaaacttaaagtggttaattactgatggtttggtttagattgcctgtaagatagacatgaatattttcaattaaaagggtgaaaactttatagaatatcttattgaaagcagtaatgatgcatgtacttttgtaatacttgctcttccacccagaaaagccagcggaaaaacacccttcagacccattattgaatttgttttcacaataaaaggcgaataatgaattaagaataataacttctgggaaacaacaggcaatacttagttacggtttcctgtcaaaccagcaggtcagagtgagctcttgaatgtcttagcaacgtgaaaacaggacacttacttagaggaaagggttgcaagccgtgaatgtgggtgaattgatctgtgttgaactgagctcactgaatccttttcaaggacaggaaaatgttttataaagttaagaaagcctattgaagtctttgatataaagggatcttttgaaaggtgacagtccagcactattatcccatattattatttggtaagcttctaacctctatttgtttaaggtgacccttgcatagcacgggggttggggggtgttgacactcacgcagttgaaaatccacaaactgtgctctctgcctctaaaacaaaggagttgctgaatgactcacccggggatgagaggctgaaacagtttggt

SEQ ID NO: 33684 - DNA, 724 bp, Bovine  19866880989473
  misc_feature (1)..(1): n is a, c, g, or t
ngtcggacacgactgagtgaccgaacacgactgtcgccaccaccaccaacagagttaagtctgagaggtgcacgccaccccacagtcactgtgtggttccacacggcgcttagacctgaacttgctctgcagagcacagcgcatctttctctcaacgggcatcacccttccagggccccgaggcctcttctgcgctcagccctcccttgcccccctactcacttgagagtcccgtcagggttctccatgatgactgcgctggtgtgccccaggacgaagcccggaatccagccctcggctgcggggcactggtcagtggcggctcggaacaccagaaacatgttctgttgattgctggccagaatttgaacgacctctccttgatagacgtttatctcatcctccttcactgccgtgtagtcgtgtgtcaccaacatggtggagatgttgctaccgctgctgctttcactctgcagggggagagacggacagaaaggcagagcggaactgaaagggggtctgaggacgccaaagcgctcgtccgcgtgctgacaatcgagtaacggacaatcaagatttctctagaagcaatgtaaggataatctaaaacgacaagaccacagcgatggcgaaacactacttttggaagcttgattatttcaggtccatcttccttacaccgttaaagggacggctcgtccttctgttaatgccacgctgggtt

SEQ ID NO: 33685 - DNA, 1141 bp, Bovine  19866881002156
  misc_feature (1)..(1): n is a, c, g, or t
nttaggggggcagggattcctttcttcttctgcactgccctctgtaccgcgctctttgtcaccattagcacagcacgtggcacacagtgagagctcagtaagaggtggccacaaactatgccgtatttataagtgacagagcagtaaataacttctaagactctttccaattctatgatttcaacagttcaaggaaacaccagagtaagacaaagggggaaacttttcccacatttttaacctgattaaggggcccattcatgtgtcatccatgacgtgtgatagctttcccacaaaggacacccaagaatgtgaagaaaaacccaggaactccctccggaggtcagaccgtccagaccaaagctgacttgccacagccatgctgaggagggggtcagcagaggacagggctgtctcccaggctggtgtcaccctaaaggggttaggggcggtcaccagccccctgcggtggacatctgttaacatctgcctgcaccccgaggatccacgaagcagtctcggatcagggcccccaccgtctctgtgccactgctgcctcgggcaccacaccctcacgtcccagcccgggggggcaccccaccccaccccacctcccgaggaactcagcccttcccgcccagcacccaggagggaaagtgtcacaggagggaaacagggagcaagaatgtgattccatcgcggcagcgccttgctgggacccgtgttacaggggcctgttttcccgggaggggccagatggatggcgagcggccaggccctccgcactcacctggggatacaggccaggtaggagatgagcctccggaggtcctcctgccgtattctgtcatggttgctgcgggccggggaaggtgaggatgggacccccgcgcttgtctgtgccacctgcaaacaaacacatgcgcacgctcagacaccaaggggaggacgcagctcctgaggccctcgggcgcccagcatcaccaccgcccgcccggcccaaaagaccttcgagaggccagtgcccccgctccactgggaccagcgtcagggccacccgcacagggagggtgtcccagaaccctgtctccttccttcagggggtctgtttcctcccttcttcagttctatggttggagag

SEQ ID NO: 33686 - DNA, 1673 bp, Bovine  19866881016993
  misc_feature (1)..(1): n is a, c, g, or t
nccttacctgtccgccctgtacaccccgactctagccgtaaatggcatccgatagcttgtgaggccacagagctcctgtcctctgcactaatctggggaaatggatggcacagaaaatggtgagcttgtccccctcctccctgtctggccagtgctcccggctcctttgctttccttccttctttctttgaaccccatccgcacagtagagccatttttagtatcctgtttttggttcccgattccttgaaggattcattcactagcccttaagcctgtcactcttctgttgatctccgtctttccctccttagccagtagcctagccagcagttgaaaaaagagttagaatcctcccccatgcccagtcacctctttgagaaacattctgatgggacatggctgcagattaaaaccagactctgtctgctttccacatgtatcccagacaggtcttatttagtgtttcatgtcagaatattgtaaattttaaaagatggctttaaataaatgcaaacaaagacaaactcgtggtcttttggtctggaattacttttaaaaagaggctgagcttgcaggagaattttccgtctgtccagtgactaacatgaggcatccccctcccccctctctttttctcaacttcctctctaggcctcttctcggttattagtccgccccaccagctccgaaacgccgagcgcagccgagctttgtcagtgcaatcgaggaactcgtgaaaagcaagatggtaagatttcctaggggctcaggcctcagggctggacgtggctcatggagcattggggtgcgggggtggaggggggggtgacctcacaggtgggtctctagtctgcaggacagatcctcaggttcataattggcttgaagactcacaggacttagcgaagccacggttgcagttcattcctgtgaaaggatggaggtgaaggtcagccagggaagatgtacaggagcaggtccgggacgctcacgttcaggccacccttgtcctttccccatggagttacgtgcccagtgctagcctctcccagcgtcgcactgtgtgtgatgatacctgcagggtaacaccaacaagggccaccaccgcccaccccacccccccaaccccactctccagcctcggtggtcagagtttttatttgggctccatcacatacacaaggttgacccctcacatggctcaccccatcccctgctcctctggagatcaagatagcacatgacccaaagcccccaccagaagtcactcagtgagtatatagattgtctatctgaggccagaacccccaggtagacagacttcatcaggcaggacattccaggggcttagagggacctcccaggagccatggtcagccctttcctgacccacatggtctgcagtgctggcatcgtcatagccagtgtggtcagtcccattctcgtgggtcgttggtatcgcaggtgccactgggggtctctggctgcctctgcgatccttcactggggtctgcagtgtaggagggagaagggtttgtgttgctgtgtcagggctttattctcttagtgacccattgtccctagtgggtcagcatggcttcatttaataaaagccccaaatcggatgttgattctttgaagttaggtatgcattgtttctgactgattca

SEQ ID NO: 33687 - DNA, 918 bp, Bovine  19866881041690
  misc_feature (1)..(1): n is a, c, g, or t
ncagttttaaatatttaatgaatacagtggtagtctccatggaaggtatcttgagggtagaatttttgtgatttttagtaattcaggagctgttgcctcttacccgatggatgttctcaggggtgatagctctggcagggttggtcctgatgaagaacacacacaccccagtaagagcaacatcttttccctcggtcacaaacaccttgggttttttcatctttccagaaacagagtttactcctcctggagagccaagttgccctacaaatgaaaaggattttagtcccacaaatgctatatactacgtccacgtggtcatctcttagaatgaggcttccctgttaaaatactgtcatgttgactcatcctggtgacctacaagctccatcccttggaccacctctagcctgaaccctaaaggaatctcaaaggatctgttttatatagtgatcattttgagacagacaaaaatactgaatccctgtgctgtacacctgaaatgaatctaatattgtaagtcagttatacttcaataaaaaataaagaataaaaagtaaatgaaaggatctgcttaattccagaccacaagttcacttcaaaattggtgctccagggaaaaacagaaatggaagaaataggaatgagagttctgctgctgctgctgctaagtcgcttcagttgtgtccaactctgtgcaaccccatggactgcagcctatcaggctcctccatccatgggattttccaggcaagagtactggagtggggtgccattgccttctccaataagagagttcagtccagagcaaattcttgctggagctgcaagtcatccttgatggggccatcaaggggccaatgagaaagggtgaaggaggagacagcatctactggtaaatgttgtgcatcagggctt

SEQ ID NO: 33688 - DNA, 654 bp, Bovine  19866881129228
  misc_feature (1)..(1): n is a, c, g, or t
nctgggtgtacagagcacgttgaaggagacccttgcaaattcgcactgtgggtggggaggacaccaacttcagataataagattgtccttaaggtacgtccactgaagctggggaatgcgctctgtgacacattcaccatatctgttacacgtgtgccttttcctgttgttgaaacaggttgtcgtgtccttctttttgttcccttggtggcccctaagcttggtgatcaccacagaaagaacagtaagatgaaccccgtgtggtattctagtggtgcagtatcttgagctaaacttctgctgcctacaaaagatcacatggagaaaggtctttctcatcttctccatgcttctggtcttatagagtatttttttttaagcgagtatttatccagggtgattgtttaagagatatagcaagttgaggtacaaaaggagggagctatgaaccagtagctcccattgtacacttgacctctggtttccagaggaaaataggcatcgctgcatctgtgagggccttttgacactttcaaggctgaacgtgcccagaatctctatggggtcctagaccctttggctttctagtttggaagcagagaagggcggggggcataatcaggtacagggtttggtatgttatcgtttgaaagt

SEQ ID NO: 33689 - DNA, 1713 bp, Bovine  19866881153465
  misc_feature (1)..(1): n is a, c, g, or t
naatgtttttatggtaaaggacaccacacctttttctcctgctcagactcctctaatggcttcctggtgcacccaaacaagtacccttagtttacaagctctgtaaggacctggcctttgccaactctactttctggcctcagtcactccactacagtcatcctggggactttctgttcctcaacagtgacacaccactagatttttttttttaatgcacactggggttgcactaaatgaattttgtaaaaaagaaaaatgcattttgtaatgaacccaagatgggaaaaaaattaaagttccataccttcatgttactgaagttcttcttgtatgtgtctcgtttctggaaaagagcagctgcaaagggtgaaacttgtagacccatctgtgacatgcactcggtttctctaaataaggttagtatctgaggatcaaagtttacaaacagttcccctgtgccaggagccttcaccaataaagaagcctcaagtcctacgtgaatttcttcagtctgtgaggaaagagcaacattactattattagagagttcagtgcatataacggggtatcaaactcacccttttctgggaataaagatcattgtgtgtcctttcatgggtttgagcttcgcaaactaaggacaatggggtctcttactcttttcctaacttcacttttaggtgggaaaagaaagccttaaaactcttggtggtaacgtacagttagttcaacaaaatggttggtcatgaatctgttgtatttggtaagtggatactgcagtagagatgacttctcaaaagtcactttgctccctgacaccttcatgccaactcagttatttttcctaataaaagtttcaagaaacctacttaactcagttttcatttatctagaaaagcaatgaaaaacactacagagacatctgttattgattcagacatcaaaagttgaactaggaaagtgagataccattttagaggccttgttaggctgaattttatcctccaaaatacttcctgccaatctaccaagaaatacaagtgttggtagggtatgaaatataattggattaacccagtatgaccaaataaaaattaaaactttgcttaacatgcatgctggtgtttatggacacttaatggagaaaaaaggagcttagtggaaaaacaaaaaaagaaataccaatcaaccaggtaaagaaagcaataaacaagatcttcttccttaggagtttataaattaaataaaaataagtttctgttacctggctttatgacttttttccaaaattaaaaactattatccttcatgaacatattatactctttgactgattacttgcagtcaaccaaccctgtcttataaaatagacacaaagtcaactttccacaggagtaaaactgcccaaggtagtagaggattccccatggatctgacagtggcagcatcatcgtagcgttaagtcagactcacttgttgaagccacgccctgtggtagagaacctcaaactccaggaggaccttggccaccctgttgtaactgcgaatcactggcttcgcttccgcagtccggagcacggacgggtgcttctgaaaaagctgcattggttgctgaatcctgtggaagagctgccgggcccacagaatcttcccagcaatgggaggctggtctcgagccaaaggtgggtcgtttttctggctttgtataca

SEQ ID NO: 33690 - DNA, 1251 bp, Bovine  19866881348381
  misc_feature (1)..(1): n is a, c, g, or t
ngagttcatgatggacagggaggcctggtgtgctgcggtccatggggtcgcagagagtcagatacgactgagcgactgaactgactgaactctgatcagggcaacctagcctttgggactcactgccttttaaggtgaaagaaacttttttcattcaggtactggtgtcctgccttaccctcatttgcaagcagggaaaagaagttctaataaataggacctattattaaccttcctactgaattcctaataagaaatttaagaaacaacaaagagagttggaaaaagtaatgcatctggctaatggggaaaaaaaagacaaagaaatccaattcaattctctaaccgcctctccctcccacctccttcacctcaaattccctcagcatacccacaaaagtacactttataaattctgcttaaaatatgtttattaagccacataaattcagatacactgatggcaaaacaaattttgacataaaaaatgggtttaatgtggactgactcatctctcacttgggattctcatgcatattcattgagaaaaggaaaaaaaaagagagatgcaaattcccaagggaaagaggacagacatgcccctctgggagggaatcgctgctggagaccccgggaaccggaggaggtaccagcccacgcctggcagcatctccgccctggattcactctgagctcagacagtggcgccagcaaggctgaggagtgctccagcgggggcatggaccctcacgaactcggaagacactccaactgcgggagcccaatgctaccatcccacctgggtctcccactgacactccaggggctgagacctgctcggggtgggggggggggtgtgcagcaggagcagccatgatccgtggggtctctacctgctcgtttgtggggtccgcaataagaaactgaggtggaggtgggaggactggatgggggaggaggtgctggagtaggggagggtaagctctccggaaagctgacttccttagacttgcccggtggctccaatcagagagggctaagacccaaagcttttaagccatgcaggctggggaacctgttttcctttctctgatcccctaattgctcaggccctgatggcgaggaaaagaggcagtatctctccaccgggaagcccagggaacattttttcccaattagtatagaaatgcaaatgcaagtacagaaatgcaaacagacaggcaggaaggacatttacatgtaggtgtgggg

SEQ ID NO: 33691 - DNA, 1327 bp, Bovine  19866881373806
  misc_feature (1)..(1): n is a, c, g, or t
nagcagtccgtgcagtccacccagagcaacggggtaagagcgcccggccgcctgcgcccgcctctgtcccgcggctcttctaaacctcccgcctggccgccgctgtcctcgtactaactccgggctccaccagctcctcctcggcattccgcgccctggactcggcagggaatgcccgctaacctgctcccggcggacggcgcgccccgggtctctactaactcgctccttgctttgtgtccgctaacaactgggaacgcagaccattaaccttccgaatgaatgcagcatctctgagcttttcacatcttccgaccagccgagtatcttggaacttcctctctctctcgccgcccctgctttcctcgcacttttttgtttttttaaagaggggtccgtgtcctgccgtctacctcctgtgtaaactgaaacctgtatacactctttaagctttctactcatcgcttggttgtgcccttttatgccttaaattaatctttgcagcgtttttgactcatttgctgggaaaaaaaaacaaactcaagaaatgtccaacagcagctcaaagcaaactcagctggcacaatgaggggaaggaatctctccagtggaaaagtttgcccttccccaccaccacctgaaaacaaaaacaaaaacaaatgcacacgattcactggaagagagactgctttaagggcctctggatgctgggctctggccggcggctgggtgcggaggctcaggcaggctggagtggggcgccaggctctgtccagcagggggcgctgtggggcctcgccggtcactgcgttctcagccccagggttgcggtggtgggtcttccccctctcgtcctgcggcttcctcactgtcgggtttcctacaggggctgatgaatccgatccgtaacacctccctaaaagcatgcggtgagggaatagaactgttctcatgagtgtatgtttgatccttttataaatttttaaatacatttcccctgaaagggtctgttgtctctctttatccaaaaaaaaaaaaaaagctatttggcttttgcatgcttctctctttcctctggactcttcattaatgccttgttggagttgatttggccttattctcacctccagtttttcattgtgtatattgttcacctcaatctttctgtgtaattgaggaagaaattgagaaatggttctttgtacgtttattagcctttcagccttactctcaaaaagaagtgatcagggcaggcatcctctgctgtggccatcaccactgtcctggttgtggtacctgtatgtgtcctgcagagtagcatggcccc

SEQ ID NO: 33692 - DNA, 949 bp, Bovine  19866881486776
  misc_feature (1)..(1): n is a, c, g, or t
nttgcccccctaagctacccccatatagaaatcctggatggggagaaacagatagacggaacttgacaattggtaatgggggattccgtggtgattggaatctgtccaaggtgattccatgcggtgtcaagcttggtaaagtgaagaataactcaacaggaatggaagaatctagagaaggagtgcatgttggagaaaagaatactaaagaaatggaaataaagctctgattctttgctttccctgttggtctttacatcttgaaaacgtgaaggtcaatatgcttatgcttggtcattcagttgtgtctgaccctttgcaaccctctggactgtagcctgccaggctcctctgtccatgggattctccaggcaagaatactggcatgggttgccatttcctcctccaggggatcttcctgacccaaggattgagccagtgactccagcattggcaggcatatttttaccactgagccacctgggaagcccaagaatactggcgtgggtagcctaccccttctccaggggatcttcctgaccaaggtcagtatatgtgagaccaagaacatccagtatctttctctttatttctaaattcataaaagaaagaaaaaactcacagttaaaagaaagataactaatcatatgtggattaaataattactttagctgtcttccctcaaaaaaatttttgaaaacttaaattaagtggtgcagaatgttggctttgctaagattgctgtgagttcaaaatgtgcagcaaaagctaaaaaagatgcataagttttcttcagcttcatctgccaaagtggaagggacaaacactagtaaaatcccaaaggacaatacagaaaactgatgcatttagagtaaagcatccactaaacagaacacccaagttccacaggtatagattggaagaatagagatctcagtgttaatgctca

SEQ ID NO: 33693 - DNA, 1575 bp, Bovine  19866881562737
  misc_feature (1)..(1): n is a, c, g, or t
nattgaaattgctgtcagtaatctgtgagcagagcaacaccccatccagagacccgtaagtttgtaatttcacctaacgggtctttaattgaagagcagtgtggctaattatgtggttcggtatagcagagagtcagaagattggagttttaatcagcctgggggatctgaatgacctctgcttatgtatctacttcttaattcctcatctgtctaaggagcaccctaggtaagattgtcttgtagctcttgcaggttcagaactgtgacttggtagctgtctagcatcttctgggccccagtgcagcaggggttgtcggcggaaggacgccgcccttccttggtttggtccggttcctgggcctgtgtcaggcctctctttctcgggagtgatcccaggttgtcttttttcatcccggtagatgtttgactggatcacacacaacaagggcctgtttctgaacagctacactgagattgggaccagccaccctcatgccatggagctccagacccagcacaaccactttgccatgaactgcatggtaagatgccggggtgcaggggtgtcggggcgcaggggtgtcctgccgctgagcgaactttagcagacgggggagggtatttacacggctccttcccagcacgctgcctggagctcgtgtagggccttctgacgatccgatgtagcagctgacctccagtgtgggagattctctgtggcagcagtgtgcaggtagcttgtttttaagtttgtaagcaaacagaagtgaaaacaagcaagccaaccaaccagtgaaacttgaaccagttcacctggccaggcccacatgcatggttttgatgctggtctctgaactatccctctcaggagcccacggggctcttttcagaggctgagtcacgtaaaccagcccgctgttcatttgctggcagcccttcatgatgaggatgtaagccagcctgccgcccttctcagaggcatcttccagttctcctaaaacgtgagccttcctcccaagttaagtggagggccgggggtctgacatcagtctttcctgcagtcctgtggctctctggatgcccttggcctgttgtggatacgattggggttgctctaagattgcagtgcaaaatcccccgaaagaacccaacagtgaattttaaataacagtcttagtgtagttttggaattaatgtaacaaaaataaagctatacgttgttctgtaggacatagggttccttctgtagagagttactctagaaatacttactttagagacagttctggtgtggactttgagccagacctatggaagttagctaggcctctttgcctggtaatgtgtgtctaaagagcattgaaacgatacagagaggcggtcgttatttaaattagttcagtaagaggccatttcattagaattcagtccacaaagtgcttcactttggaagttaccaaaaaaagattcagcaattaaaatttatgtaataagcactatcccaaaagtctgatactcttcttgagtttgaggtaagagaattttggggtcagagattgagcctgggtgtag

SEQ ID NO: 33694 - DNA, 1407 bp, Bovine  19866880405053
  misc_feature (1)..(1): n is a, c, g, or t
nagctgatgaaaaagctgtaactttggtattccttaaaggcattaactcttgtaattgggcagctctcttctgggaccctcaaagctctgcctttggagttgctatgacagtattcctccctgaggatgtgaacattgcaagccaggggtgttccagagtctgcccagcgtgactctcatttcctcgccctaggagcttcataggctgctgggagctctgctgctgctgctgctgctaagttgcttcagtcgtgtcctactctgtgcgaccccatagatggcagcccaccaggctcccccatccctggaattctccaggcaagaacactggagtgggttaccattaggaacactcactgctgccccctgcttgcaagctcttctccagagcatctgacccactcagtgtggccagagctgagtcctgtgaccctgggtttagttccacctcagctgagctctcagtgggttatttttgttgtcattgtttagttgctaagtcatgtccgactcttgtggccccatggactgtagtcctccaggcttctctgtccatgggatctcccaggcaagaatactggagtaggtcgccatttcctcctccaggggggtcttcctgacccagggatcaaactcaggtctcctgcattggcaggcgaattctttaccactgagctgcctggggacctaaacatcttagtaaacagctaagaaatgctggttattttgtctagttaatacttgcttcaattgtgttccattgcctaataaagaattatgagggcttccctggtggtccagtggttaagactctgtgctcccaaagcagggggaaagagttccatcctaggtcaggaaactaagatcaggtatctcgcatgtcgcacagcacagcaaaaaaaaaaaaaaaaaaggatggtcttccaaaatgtattattgaaatgcaataatacatttgatttggtttttggtttgatttttattccactcattgagaggcgaaggaagtggaaaatcaagctgatttcccaaaacattcatcctcccagcttttgaatcctttgtcctggactcatctctgccttgtcaatgtctctctctctctctttttttaaatgtcacctagaatgacatgcactctcaatgtggtttgaattgccggctaatcacaatttcttttcctatcttgttgagataagacgagtctcacctgtctgcagggcttgcatttccttcagggcattgacttctctccagagcttttccacttgagtcttcaggtctccatccttctctgaggattttttagagtggggtgggataggatgaataaaacaacatatgattaaaataaagtacaaataaaacaaaataagataaagtttagggatacagaacataagccga

SEQ ID NO: 33695 - DNA, 2069 bp, Bovine  19866880420892
  misc_feature (1)..(1): n is a, c, g, or t
naaataatcatcacaagaaagcaaaggacgagggacttccctggcggagcagtgggtaagaatcctcctgccaacgcaggggacgtgggttccacccctggcccaggaggatcccacacgccacgggccaaggaagcctgtgcaccgcaactactgtgcccctgcacgagagcccatgagctgcgactcatgaagccctcgcaccctagagtctgcgctcagcagcaagagataccaccgaaatgagaagcccacacgcagcaatgacgagtaaccctgctcgccaccagagaaagcctgtgctaacagtgaagacacagcgcgaccaaaaataaatttaaaaaaaaaagggaagaaagtgattgatgaggatgaccatctctgtgcctggcattctgccagccatctcacctgcacaacatctaactccatcaggtacagtaaataaggcttcccattttaaaggtgataagactaaggctcaggaagagtaaggttggttatgactcccaccactttggagtaagcccgatttgtactcaagggggcctgattccagagctcatttcctacctgaaccagtggctggagaagaggaggagaaccagagaaggctggatgcggcctggggaggtgagctgggtctctgcaggtggatgaacagagggtcttgggtgggggaaaagaaggaattgcccagcaggtaccgggtaaagacaagagtcaagccctgggccttggacgagcaccaggggtacaacctggcatccctccagcccatctctgatagcctcttaacaatctgctcacacttcagggacccgcatggcttcccacctccaggggacttgttctcctgccagagtaagacactgaatagctgcctgtattcaacctgacatccacagatatttaagagtctaattcgatcgttacattttttctgtagacacaaaggaaccgcaggcttccggcacctcggggctccctctcgcattcaccgtgcccatttaagcgtgctggggagggatacacacgaagcagggccgtttaactaaagatgctgtacaatggggctacttcgctgcctgacagtgcaggaaaccttggtggatcctaacaccagccaagagatgccggccaccggggctgcggtggcgtccaacttgctcatgaatatggtggctgaacagatgggcgatggctccagcagccaagggtctatcaactgagctcagaaaagccaaatccccctcagtgccaggcttgggagacgctccattaaggagactctcgttgttacaacagtgaaggatataaactcaacagccagcccactttttcccccgcccccttctcactggaaggctcgtcatgtaggtgatgctataagctctgaaacttcccgtgtgcctcaggtggctggctggcagaaatgcacctttgcaggccaggtgaggtttgtggggtgggcgagatgtggcctggaaacccattccctaacctttcaccaggcctgaaatttactgtgaacggaattcctaaaaatccatgttggcctctgatttaaaaccactaaatccgagtccctgagattacctccattgtcctaagtacatcactgtgacaacatatgcgaactgcacgacctcagagacgagcgcggacaacctccacgtgaggaatgcgccgaaggtggctgtccttggacccacaccactgaggctttagggtcaggctgaggcactgggagaacgctaccatctcaccagcgggctgccgctgtgcccggctcccgtcgtggtggacgacagcagcaacagtaccgggaccctgatttcacacaggcgacaaaactgcgatctgtgttcacttgggacgcgcgtgtcgtctccagctgatggaatttaaggaggaagttatctgcaaatgtacggaaatgagtatgtttttctgaaagacaaaatactactcagccgtaagaaagatgaaataatgccatttgcagcaagacgaatggacctagagatgatcatactaagtcaaataccatatgacgtcactgatag

SEQ ID NO: 33696 - DNA, 696 bp, Bovine  19866880451729
  misc_feature (1)..(1): n is a, c, g, or t
natgaagcagatcaggattagggaagagtaagccacggctccctcccaacctgccgttggtgttgaacagacctctgactccatgttggttttgttttcccctggcaaatcaaggcgtctccccagggctgtgcacagtgaagttttcaagacgtgcaaagacaaccatattccaaatcagagcgggtgggaccctgaacgggggagcatggacagcccaggggtccctgaaaaaccgagcccggatcacctaaatccagtctaacctctaaatcaggtttcggatcacagatttgtttactttcatttggtgataattgttcacagcagaacatatcagaaaattctataaaaggaaccacagccaggaaatagtaaataattaatcaccctccctcccagcctcttgcatctctgttgatataaatgaccgtataattccaaacccaattatcactacttagccgttccattttgtagttaaaatcccacaaaattaaagtgcatcaattgttaatggtaatagaccagacaagggattaaagattattttaatgtttatttcctgtcaagagatcttctggcaggaaacactgcagacaaaaggcgggtacactcagatgagattcatatatttaaatcttctaacttctgaaaacattatggatataattacttgtttaatttactcgttcc

SEQ ID NO: 33697 - DNA, 2020 bp, Bovine  19866880580902
  misc_feature (1)..(1): n is a, c, g, or t
ntgttatatctgtcgggtcctttaactataacactgattttacgagagtggaagttaagaggcttacatagtttgtgggggcttctcaggtggtgctagtggtaaagaacctgcctgccacagcaggagatacaggagacttaggttcaatccctgggtcgggaagatgccctagaagagaacatggcaactcattccgtattcttgcctggataatgctatggacagaggagcctggtgggctatagttcaaagaatccgacacaaatgaagcgacttagcatgctcacacattgtctgtgatcatttgtgagccatcagatctaggttacctaacaaccaagttgctataggttttagtatactgaaaaagttctcagataatcacagccttgtgcttgatttttccctcctgagaatttagctagttgttttcctacaccaggagaatactgcgaggaaagtaataactaaagcactttgaatccttcttaataaatgaatatgacttagaacacagaagtgcaagtattaacacaaagactcggtgaggtattatttaaagtcagctgtaactactatacgaaaagtgattccacgtgttaacgttcaatgagtatagagaaaagtcttttgagtctcactcaaaatgtccttaagtgcagtggtccccaagctttttggcaccaggaactggttttgcagaagacaatttttctgtgggccagtgcggggaggggtgggcgatggtttcaggatgatttaaacccatttcctttattgtgcactttatttctgttattattacatgagctcacctcagatcgccaggcgttagatctttggaagttggggacccctgtttatatgtgtttcaactgtttttgatgacgtttagatccaaatgaaaaaaaaagtgtagatttaggtgtacaatctacatatgattaattacatgaaacaatcagtgaagaaatgacaatttccaaataccatgagaattaaggtttaaaatgtttcgggaattattttaattttcacaaaatatattggtcatttcaattttaaatttcactatttaagcataattgaatggattactttatattttcacaaaataggcatttgcaaatataattatgtaaagtttaaaaataaaataaaattaaaaaaaaaaaaaaagcgaagagaataaaaaaaaaaaggaaagaaagaaaaaacagcagcccagccaactaagtggcagcatatgttgggaccacccgtgtccagaatctttcgcgtcgtcttaagagcacgccagttgccagctctgaggggacacaatgactgatacacagcagtcaacctttttttttcccttgaagaaagattgaaagaaaaacaaaatattttgccgccgagacatgggtggtacctggtaacttcaggcgcagtgcaggtgtcacctgaaaagcgactcctggggagcagcactttccccatttaatcagactgcaccaggtcgtatttatagccctggtgaggttggcccattgttacacgatgaaattgtgatgttcagcagtttataccttgggagctggaagcgtttctccatggtgaatttgtaatattaattggccatgtcagttcgtgacaaatgtagtgacatctatttcaagtatttcagctttatggggctgaaaaagtgacatgcgcttgagataagaaatctcacaaaagatcttcacgctcgctccgccgcacctccagaacatgttctcagagatgcagagagcctccagtttttggggggctgttccctcccctcagctctgggctgaggaggggcccgggggaacggggtggacgcagcgttcagtctcctgagatgctgatcgggagtctggcgtggacttgcctgctgagaccaccataggtttgttctgggtccctgaggcttagaggcctcgcccctcagtaacaggaaggtgtgcccttgtcaccgcgtgtggtggttctcgaccaggggccgtgt

SEQ ID NO: 33698 - DNA, 1599 bp, Bovine  19866880600811
  misc_feature (1)..(1): n is a, c, g, or t
ngatttcttacagctcaggtttcagtggctcgagaccatttcaccctccacccgcataccaccaatgtccaaacttttgactcaataggtctgggacgaggcctgagaatttctttctctaacaagctgctgtgtgatgctgaagcagctggcctcaggactactgggagaacttcaaggttccacccaagggcatcttgtcatatatctccacgtcaacttttgcttcctggaagaaaacaattgacatctcaacgtaattttcttgatcttgtttgatacaatttggtgattttttttctttttttgagggattttacattttcctggtgggtggttttggttctttggaaatgactcccatatgggggagtactttgtttaattagctaatttaaaacaatgtggcttttcttttttcctctgttgaaactgggtcatttaaattaattcttggatttataatacatataattagttccaaacaatatacaactctatgctctgtttgggagtatcttgattacacaaatgagaaaataactgaaaagcacgatggcgagaaaagtcaacattaaaaaaaaatcccgtttctgatattttggggaccattaggctatgagttgtgtaacacctaaccaaaagtgcttgctgtatttttaacggttcagccatagctcagagtagagtctgaactatttgttgttggctgttgttatattctgttccaaggttcataatttgaaaatcgactttggggactttttcctcggtctattaaaatgattcatgttgcattcaacataaattgtgcattcgcagaggagggtgagagcccgtattcacggcgtaataactaaagtgaattttgtacgagccgcagtttgtggcagcgatgtggtatcatttgtcttaatttttctttggcattacattaggcgagtgcatttacatttccaggtatggctaaccactttaaaaaactttgtttttatagcctgagtaaagggagaatcaaatctgcatgtttatgtgatgtaacatcaaataatgccattttactgtctggaggacttggggattttacattccatttacccgacttcacaaagggaacttgggctgatatgcaaagtacatgaaatatttaccatcagtggatcaggccaggcttctaagagaaaaaaagaagggcaagggagctaaaacccttctgccgttgctgtgttttccttttaccagaactataactaatatcttaagtggattactcactgaaaattcaaatgcatcttaaataaaaccgaactccaaataagttaaaactttaggtcacatttgcagaacagagtaaacatttgaaaatttaatgcttatatatgtatctgatatccacacagacatatatacacacatacctacacaaacatgtatgcctcctgctaatgaaatatttactccaaagaactgagatggattatcttatatttccattaatgtcacttaagatccatatgtttgtgtatagactcacgtgtttgttttgtttttttccagaggccttctataaatgatacactggatttctcattacagttt

SEQ ID NO: 33699 - DNA, 1968 bp, Bovine  19866880627626
  misc_feature (1)..(1): n is a, c, g, or t
ncgtgggttcagcctctgctggacctgggtattcagatgtcatgaagtttttttcttcccctgtggggctcagcttttccctgtatagatgtagaagcatcctccattgatgatggtaaagcgagatgcaacttttgtcaaaacctggagttgaccagttgactagcattggtcttgttggctaagggaagggggtcgggattcttggttcagcctgcaggaatgtttgcacagtataggtcatatgccatcacgagatgccaaaacacatggattgggaccgaggatacgactgtctccctcaggaattagggtgcttcatgggaagggcaaatgaatgccagccaggcacacgcagaccatgttgaagagctcacttcacagtctggctcacctctctttccaccttggagactggctggttactctgatttcttctgcctttctccacatttatgggcttcccaggtggctcaggggtacagagcccacctgccagtgccagagacaagagagacttgggttcgatccctaggtcggaaagaccccctgcagactttctgcacaaatacatcattacacaaatcacaggattgtagaataatggtcccttttcaacatgtaatcagatactttgcagagcacctttggatctgttagggaaggagataaatttcagcctgcctttttggcctaatttgcattgcattaaaccttccctgcttccattctctaagagcaggcctattcctccccatttaaaaaatcatagctatatttcctctgtgctcactaagctctagtccccaaaccagcccttagaatgtcacctcccttctgcctcaaaataatcacaagtgaacctcaggatcacctgtctgctaagtggaagatcctggctttaaaccctagatccaaaacagaaagttctagaacatagaccaaacatgtattggctaaggctggtgacatgaaaccaagtttttcctgctttagggaaatcccaactattttcctctccaactctataaagacctagagatttttttttaaaactgctgtttttctaaagagcaacattagtagtcactttggcagaaatttcacatgaacagtgagcttttcttctccatttgctttagcgcagtcttttccattgttcatccagcttcttggaccctcctatccgcacaccgcacttattcacccaggacaggtgtgtggcaccttggagaagatgaaggctgagagaagatcatcagacaggaagtatgttgaaagatgcctgaataaattaccacctcccaggagcggtatgaaaaatggctatttctgtaggacgccagagcacctttttcctctcaaattcacgcgtacccccgtgcgaaggccgggggcgacggggagtctgttcctaggctgtggggagttttctgagaattcagtgcccttgtggtcgggaggcactgtgggtggtccagccagtctccctgcacaggctgcttgtgggaagagttttcatcacagtctttttcctggacagctttggggtaaacggttacgggtcactaaatggtcttgctaatgagagactgagtatacaaatggacaatggccaggccgtatctgatcatagacctctgacctgcagcctctgcagccatcagccagaaatggtcaggacttggtcagtaacacccagcattgctaatttctgtccttacttccaacttcaggaccagctagagaaaaccagatatgctcccaaaccaagcccctaggatgtcatgctcctagctgttctgccccccgcttccccaggctgacagcctccaatcataacacactgaagccttcccttttcctattagaaaatgtgccctcttccttgtctgcctctgagcctctgcccaacgcccccgatggtagctgactcccctgctagaacaagctttgactagaaggccc

SEQ ID NO: 33700 - DNA, 1070 bp, Bovine  19866880693053
  misc_feature (1)..(1): n is a, c, g, or t
ntgaatatctgaatccttattttatttatgtatttattgaatcccccctccacaccacccaccacttctgccccccaaccccttgtccaagaatcatctttccctttaaaaactccctagatgccccagcattttcccccactaaaagcgatgtatttctcactgtgagacccgatcgggccgtgcagagtcctcgcttcctcccatgctcacccaacccgaaataattgtctgtatgttccttttattgtcacctctgaaacaagatgaagaaaccagtggtttgctttagaaggcattaacttctttatcacattaatactgactcgtatcttatttcccacttgcagtaagaaaaaccattcaaatcttttccctcacaggacaatatctttaatagcttctgtgtgtttcctatttttggctgtttctgtataaacagacttaatctaatagcatgctgaaccatctaacttggcagaaattcagaaaatcactcatttctatggcaagccaggatgccaagaagggggagggggggagccctcacttttattgcagaaagatttctcttaaagttgtctttcatgaacataatatgtctatcatttgaaattctccaacaccctgactggaaattatttattgcagaaagacacaatggcgaacgagaaactattactccgtgcgcaatttctgtcttcatttcctttccctaagaagcaggagcacatgaactccgttgtgaatgctggtgtggtcatggaggatggtgcccacctctcggcttgtgcgctgagccatttccaccccctgaatccaaaagttgagaacatcacagccccgtgcaacgcccacctggtggcctggcccaacccagagttctccccccgtcctggaacaagagcctgttctgggagaaagcatccttgctgtcattctaggtgagctctcgccacacacacagcacccattctgatttgttgacagtcacacgtcgcagatcctgagtggtctaagaagtcccgggtcccactcctgagcactgctggagaatctcacacgtcctg

SEQ ID NO: 33701 - DNA, 1121 bp, Bovine  19866880707920
  misc_feature (1)..(1): n is a, c, g, or t
ntatatttgttgaatgaagacagacacccttctaccaataaaaaaaagcacttccaagctcacttatagacagctggtattgtctgtaatttgcagggagagagaggaggcagcaggatgcatactccctatttcttgattttgtaaaggcctaatcagatatgatgaggctatgggctctactgggtcttcccatttgcattattgatctaaaaaaatataacttacacaggcaaattctgaatgcaaattatcagaattggtgcagacacacgtgaggagctacaagcacgactgtacaagcccctgccttatactgctgcaacacgcgacatgggagcgcacaggacgtgctgcagaagctgtggcgctgcaactgtgccctcaagatgggatctgagagtcggagctttcaagtccccttattcaacagcacgcagtttaaatgacagatttttcttctggagttagaaggccaaatgactgcaactatggatataaaactacataggcagttgaatgtaaaataaaaggcaaaactaagaatgggggggaaaccactgcataaggggagtggaacttgggcaacttcccctttattctttttctttcatacagttgcgacatcttttgaagatgaagcactctcttccccatctcagccatcaattacgggatgctgagtctctcgggaggcattattaacagggcaggaagtggaggtagcagttttacaccagccagacttggaaaaggaaagctacaaatccggctgcaaagatgcagacagacactgaagcatttcagcaagtgtgataatgtggatggcctaggggcacagacccaataatcagaggagagctgaactggagctgatggaagttgcagaccctgccacaaagagtccgagaacaaagaaggtggccaggaaattcctgactgagccactctccttcatgaccctcaagggctgggctctccacagacacttttgctgccttgggttcaggagcagggacttagaccatgggcagggagaccaggaaagaaccaccaggtagaggcatgggccaaaggcaggcacagaagagttcaaaaggacaaaaatggtgcttcttcca

SEQ ID NO: 33702 - DNA, 1360 bp, Bovine  19866880784563
  misc_feature (1)..(1): n is a, c, g, or t
nataaaggggaattgatactcttgattgacaaagtcgaagggccgcttacccagtaatgactcaatggcaaaggctaccactcaggagaaatcccccactgatccgagtgggcgagaagcaaagagccgtcactttcagaaaaggagcagggggttggggaccaaggacagacagacaggaaaatctcggatcagcaatcccaaaatatcttgctgctgaatttggcatagagactctcctagctggggctatttctgtttgcttcttaagtctgcagagatttatgacagcaggagaaagcagagtaggaactgctgcctttaactctgccctctctgtgtttgtgtaattatgcaggcaaggtgcacattcccagaaactggggccctgggggcagctcagaaatgaggatggtctctgtgcctctggcgagctgtgtagctctgcttgtgatattcatgattgttcctttaaaagatgctgctaaggtgcttgtcaatagaaggatgagcaagggaggacctgacccaagcctccctgtggaaagaaagttgttcagtgttagttgttcagtcatatccggcatgaccccatggactgcaggctgccaggctcctctgtccgtgggattctccaggcaagaatgctggagtgggttgccattcccttctccagggtatcttcccgacccaggagtcgaacccgggtctcctgcattgcaggcaggttctttaccgtttgagccaccagggaagtccctacttgcaggacctgagcattttaactagacccagtgttcagtccgatccactaactgcgcttccagtgactaaacaaggggatggagcgctttgccattctgcagctctcacctgaaggaacattgctggcccttaaaggagcaatgtctgctcgcaggtttgacttctataaccaaattgggtcagtggcgtgttctcaccctcagggcccccaggaatgacaccagcctgtacccagcttctcatccacagaatccatctcctcccttcccttcctcccactgcaccactgaccttcaaaaggatgtgatgacagcaatgcgtggcgaatttttggcttatttcaacctccatgcattgcccggctctctgctcagcctccactggggactatgagtggcagtggcagtcacccccggctggccaccccgccctacaaaacctcctccatctctggggctctcacttggcgtccggttcaaaccagggccctcctattccccacacagtcaactgactctgctgagcctcagtttcctcatccatcaaatgggtataactggccctgagtctcaggactgacacgaggtctcatgag

SEQ ID NO: 33703 - DNA, 906 bp, Bovine  19866880785522
  misc_feature (1)..(1): n is a, c, g, or t
ntgtgctactcgctaatgctttcctgctattttgaacttgtttaaacctctttaaggcatccctgtggctcagacagtaaagaatctgcctgcaatgcagaagaccgtctacaacgcaggagacatgggttcaatccctgggttgggaagatccccctggaggagggcatggcaacccactaacccactccagtattctttcctggagaatcccatggacagagaagcctggcgggccacagtccatagggtctcaaagaggcgggcacaactgagtgaccagcacaggcacacacacacacacacccctttaggttatggccttagacagccaggaacatccattccttctcttacctcagagagtttgtgtgcaacaacttgagatacacagagtaacaaacatccttaaagtctgatgagctaatttccattatagcatcttaaagaggagtgatagaaaccactgctgagaaattgccgtaattgattattgtatataaagtacactgacaatcctcctttctaacccacactctttaatgagctattttagtgctggttctgctaaatgcttggaatttataatgccctggaaactcatcaatttctaagggtgcaatcaatgactgactattaggggaaaagcaccaacaacaaacatgcaagatacaagacgatgaaatgagagcagaaagcttcacccttggtgatccctcatgtcactaccatatgttttattccaagcctttctgcgtatgttttggtccagagcctcaactcctttggtctttacttgtgtgtatgcatgcatgtgcgtgtgctcagccatgtctgactctttgcaaccctgtggactgaagcccgccagcttcctcttaccatgggatttcccaggcaaggata

SEQ ID NO: 33704 - DNA, 929 bp, Bovine  19866880837253
  misc_feature (1)..(1): n is a, c, g, or t
ntgaaggtgactggcttcctccacaatcctgagtgcatgcctcactgagaaaacgcggtgctcctggctctataaggtcttggcccttatagaggctaagcccttatataaggctctataaatcttggcccttctctctggcattgagtagctgcctcctcatttataatcactgcacccacctcatgctggatggaaactgaaggctgccctacagagcagtgtgacaggcatctcggctgaaaccttgtccaaggggctggcgcgtttacagcactgtcaagtcatctcttctgccatttctccatcaggggtcttgggaaatcataagttttcacatggaggatataacacggtgagctgaaatatgtgtgacatgagatggagtgtttgatttgggatgtagaaattccttttattgttatacagtgatgttttatttatttgattgtgtcggaaaatgggctatttcacagaagcgaagcttacagatagctcaagttttcccatttcagctctgaaacgatttttcactctcatttaatggcaatcttcccaaaatatatctcacacttcagccttcttaatagaagacacagatattattattattgaatatgtactttttacttggcacaatgcctgactctcatcagttttcccaacaaccctgtgatacgggtgctctcataactcccatttcacagatgaggaaactgaggcttagagaggttgcataaccgacccagggttacccagggagaagtcagtggaattgagactttattcagccacattattggagaacattttggttactaaatggccctaagaactactaaacatcgaaacaggatggttggaagtctacacacacatttcagaagggtgtccatgactctgagcatcccttggctgttttctaaaag

SEQ ID NO: 33705 - DNA, 1582 bp, Bovine  19866880863981
  misc_feature (1)..(1): n is a, c, g, or t
ncaggatttgagtgttctgggattgttgaagccctaggggacagcgtttaaaggatttgaggtaatgttttgacttctggactgaaaggggtgatatttatctggaatctattgaaataatacaagattaaacaaaacattatgcaaaatgcatttgaaatcatctgtaacatgtcttcttgttatttgctttttaaaatttatttcaattgaaggataattgcccgatagtagtgtgttgatttctgccatacgagtgaatcagccgtgggcacacatatgtccccaactcctgaacctcccccagcctcgccccacccctcacagagcatggcctggagccccccgtgccgtcagcggctcccatcagctatctgtttcacacacgatattcataagtgataggactttcccagtgtctcatgcctttctcagggaccatcttgttacaactcctcgcaacagtctggtgaagtggccaggggaaaccttaacatcccctttattcactttatagctattaaaaagatttttaaaaagaaaaatgtttttttaaaaagattaaaatgaatacaactatggatttggccatgggttaaccaagcgtacacccctcctctctctactcgtggctcccatttcgccatcacatcaggctcagaagttaattacaaaatgcaaaggttggtgagaaatagcctctgtttcttctaatcacttataagtcattatttcagacattgagaaagggcatttttggatgaaaaatttaaagacaaagggtagagttatctgacaataagacagaattggctatgggttggtggcttggggagtaagacaagtctacaaagggttattatataattctgtttttgtacatgtacataactcccaataacaaaatttttaatcactaaaatatcctatttaccattaccatataaatcaaataggatctggtctatgaaaactgaaaaacctatgggcaaatcaactatacaaaattgtggtagttgagagcaagaaaagccattggaaatcaggcataagagctctcattaaactttagtgcttccccacggagagacaaagagacctcacacttgagaatccatcataaccagaaacatgggcaagttactgtttttcagccccatcacaaccctgcaacgtaaagattattatccccttagagatgaagttcagaagggtttggtagttttccatgcggtcagaatgagagcaagtagaaggtgaacctgaattcaaaccactagagagttttgattcttcctacagtcccacaatctttacccctcctccccacctgcaaatgctgcattggatggttaatacaggaagaaaaatcctgtaaaaggcaatgccaaaatcccctcggaatcgattttgagcctgctgcttggtctcagtgcctcagagcctcagtatactttgaaaatatcaatatgctccaaattcattatgatgaatgtctggacccctcaaccagctcatctgtctttttgtcagtggtttccagataacacggcagaaaaacgttcagagagaagtaattgtg

SEQ ID NO: 33706 - DNA, 768 bp, Bovine  19866880892764
  misc_feature (1)..(1): n is a, c, g, or t
nacatgcgcacacacagtagaatcagagaggagaggtgagacagatacagtgcagaccagagggaaagctggcggcgtcctgtgtgcttgggtccagtggtgcgtgtggttccacactgtgaacaaacagacatgatccctgggctgcttcctctggcagctgcagggggaggccagtgaccttggtttgcatctgactctcgccgtcaccgcctgcagcgtgtgccatcagggacacctatgcttgtctcagtttcttctcccggatgggggagagccatttgaggacgagaagctgtgacgcttaccaagtccccagcaagagcattgtagagccgcttctcaactgctctttcccctgccttattaatgcccatcctttaacctgtcctcggcttaatctcctggcatccttggggcctttttaaccccacaaactaaacaaagccatgtgcatatgcatgtgcatccattcacatcaccccacgcagcactgcaaagtcaggccccaagatttccctaggcgcttattctcagatcggctcctgcttctgtatctgccggagcaaggtctgacctctctccatgttacctgactcctgacagcgcggatggaggagggaccccagggctgacttactgtcttttggcttgtttatgtcagctgaaacacggctcaccctgtccaccctgccctggtacaaaactcctgtgccaaatctcagtcctggccatgactcatcattttctgatctgatcaaccatggc

SEQ ID NO: 33707 - DNA, 967 bp, Bovine  19866881033809
  misc_feature (1)..(1): n is a, c, g, or t
ntcattcgagaaagacaaggattattatcactgtgactatcgtgatgagaatggaacggctgctcgggaaaggatacggccgctcccgaacgcgttctgtcttttgagtgcacagagctgatgctgttagcacgctgcctctcattgtcaaaccagtaaaatctatctggaacaggacaagacgataaagtgtgagcgcaaaaatgcaaaaggaacaagtgactcccacagtcctccatgctccgacaaaagagggattctgttcgtgtgattagttcaaaacagtgtattaagcccagaggaatcgtttttaaagtaagactctaattttaggaagccgaggaaaggctgcattttaataggatatttcattgtaccccacatacaaaactattgtttgcctgactctataatttattgttagacagacacggcgctattaactgtggcaaaatgaaacacgggacgattccactaataaaacaatcagttcacaaggcaaagcacagctcggctgtttaaacagagcagaatacccctgagtagagatctacatagtctactattcccagttggaatttcacctttctctactctttcatggagaaaaatcattgaaacagtctggtaacaataccgttactgtctccttaacttaatcctttgttcctcccaaagaaaagactgccgctgattatgaatattccgtgctacaatttccatcaattaatatactaccgtgttcttagtacggtattaatagcttcttgatttacattagagagtatatattttacaccatgggtgaagctcttttctaacggctttaacagaaaatacttacataaaaagaacttacaatttggaaaatggaggtgggagggtatggataatttctgggaaagaatatattctattctccttccgggtttttttttttcctcctctctgctggggaattcctgtc

SEQ ID NO: 33708 - DNA, 1758 bp, Bovine  19866881057679
  misc_feature (1)..(1): n is a, c, g, or t
ncgcggttgatgatgtttctttgtgagctatgtccattcgtagagatgatcactgtggttctcctgaatctcacgtgcgtggcagagttcataaggatgaatgtgttggggttaatgtgagcctcagagatggtttctctggagtttggaaagatctcttagatggtgtgtctcagtggtggattctgtagagaagcactcactctcagccttggcatcccagtgaaccttcatgtcaatcactgtgagatgctccgtaggtcatgtactactaacattatctgaaatgccaaaatggcggaggctttactcttttcagtaagttgccacaaattcgtgatacttcccagagtaatggtgtccttgttcatttgtgttctgatatattttcttgagtggcagggaggcagatggagattgtactagcacagtgggaatggcactttaacctaagtctacccatgagagcggttgcttgtaggaatgtcacctgtaaggcatgttttgacaagggaagaaataaaggaaattaaaattgctgccctggagctcaggaatggcagagatttctttcatggtttggatggatctcagtaccagtcacatcatatgtactgccaacctgccccagggcaagcactgtgttcccctaggtgtcttggggttggaggagaactccaacctttgagaatgagaggtacttgtgctcagtcactagtcatgtcttgactggaaaattccatggacagagagtgagatgttactcactaattcagtgactgtgcattgaatacatactacgtcttgggctctatggggatagagattaaaaagagagggtctggatacactgtccagtagggcgtgagaggttcttggggttgaggattctgttgttttatgaactcagagatgaactcttaggttgcgtatatcttaaagatttttttcattggtggttctactaaggttgtttttttttgtttttaatcttggctttctacaactaccaaaaccttatatactgtacaactcatttctggttttcctttccaagaagacaaggaatgcctttaagaagaatatcttcaatcactttagcaaattggccaatgtcttttgaccatgagtaaagatacaataaaagttaaatatcccccagaaaagaaatggatttcagtgccagtgaatctgttaacagcaagcaagccatttagaacgctggtatttatgagctcggtgtgctcggcacgtaacgtgtgagacctgttttccttttatcagcctcagtgccaggctttacagtggagctggattcagttctgctgagagtctgtgtcgaaacatcggcattgacgttgtttggttatatgttttgattttttgtttttcatttgagtttgttcttcttggaaccaagagaaatgtatcagggacctgggtctcacaaaagagaaaaaaacgtcttgggaaataacagaagttcttaccatgccttattctgggctcacagacacgaaaggactaaactctgaactaaactaaaggacagtaagaaaaaaaatgtgaaacaggaaggaactgggggaggggacaacgagggtagataactaatggggcatataatgcaggctttgatgtcttatagctttgctgaagcttcttggcttcctaagagtgggttgtgcaaagggagaaaaatgatcagccatgtgcacttgtgttcacttgaggagataaaccagtcaccaggaaaac

SEQ ID NO: 33709 - DNA, 1853 bp, Bovine  19866881151284
  misc_feature (1)..(1): n is a, c, g, or t
ncactgggattcaaaaaaaccttgaataatcatgtgtaaaaataaatactgtatgtggagtaagtgttatggatcatatttatgatgaaatatgtatgtctttccaagggtaggaccttcatgattaatttataacgtacactccttaccttacatgtaagtaacagaatagtaattttcttcttcctggagaattgttacccatggaagggggaaaaaaaaaaaaaacgataagcttttctcaaaacagcagaatgcccttcagagagaactggaaaaaaagtattagagaaaagccaaaaaaaaaaaaaaaaaaggattgtcggttctggtgatggtggaaaaatgacgtgcgagcagaagtgcccgacgctgagcttcatctgttttgtcatgttatgacagaaatcattacaagtgtgataggtttatttataaagactcgcttctatattcaaagtacatctattccagcattcctcattttgagccaggccgtggatcaagatgaaagaaaaattaaattgtatattgaaaagctgttaattgagctgtgctgtctttagcgggaaagcgtgggcttcgggcagtcgatcctgccgaggatttttaatgcactgcgtcgggaggccgtcagcctgcgttggagaatgcaaacagggctaatgacaaagccccgaaaacttcagtggtttctgccggtctctttggaaggcgagagtgtgcccttacccacacgtagaagcctgcagacgtacgttcacgatgggacaaaaccctgtagcttcttgcctttgggtcaccaaaacctgtttcctgtggagtcatttgggggcctgtttaaagtttttaatgtccgcccttataaaattattgtaagagattgctccccttttcctaataactgtataagagattttccccctcttcctaatcagtgtaaattcagttgcatttcagaggatggccagatagtatttcatcatctctaatatccatttaaaaatgttaggtctccccagttataattctcgaaagtagcttatcagtggtttaacatgttatctcccttctctaaggcagtgttaatttccttttgttgttaatctatcccgctaccaaatttactatatttatagttaaagattctgttaagacctacgtgatttaagtacatctgggataaagtggccttggctttaactatggagcaaattttctttattttgttctcttcactgataaatccatagtaactggaggcagcttccagaattgtgggcaatttgagcctctaaagtttgattaaagacacttcagttacttagtaggactaggaagctcgaggactagaaggaatttatttggggttctggttctggtgctgacctggctcagtggaggagagtgggttaacatgagctccacccagtgctctcagtcttccctgagtctggggcgggcgttacttctcaggaaggcagtgatggaaccagttggctcttttcagagccattgcgtgggacacacacatacagcaaggggtccctgaacatggacatggctttgaagggctttttttcatttattcattcacttgctcactcatgccttcatcagatgcgtgtgctgatcacagcttctgtctgggttttggatgaaggctctgttagtgaggtgacttgagcagagagacatgcgtggagtgcaaggtggagccgtgcagacaggtggtcacacaggtctcctggcgtctgagacgccctcgtggcctctcttgtcaccttcacgtctccccttgtgaagcacaggcagtggcgccctggaagtggaaggaaataggcagctcgaca

SEQ ID NO: 33710 - DNA, 2173 bp, Bovine  19866881160282
  misc_feature (1)..(1): n is a, c, g, or t
ncaaaggtttgaaaatcaactatgttatttctctgagcctccatttcctgccctgtggaataagcataacctaccttacagagatgagaagatgaaatgacataatatgctataaaatgtttagcacagcaaccaaaatattataagtggtctataaattaaagatcattattgtcatcaatagctgggccaaattgaagtttatagggtgaagaatttcaaatagtcacatagaaacatccacaaatcttctcttggatttcgatttctaaagccatgattacatcacatggtggttttgcttccatacaagccttggggccaaagacagagccttattgaagtataatctgtgccttttattatcctaggtattttatagtaaacattttaaagcactctgagaaggctccatcagactgccaagggacaaaaaaaaaaaaaatacatacctaacctattgccaaaaaattcaatagctgagcatacctgtacaaagctatgttatgatgcatttgatgggggagaggtcacttaatatcagcaatttttattaaaatgtttatgacagaaagccattcactgagcaactgattcttcatcggtcatgtgaggaagtaggggtctaagactccctagttccccggtggtctgccttccactgcttcctaagactaaacatgaaaaaaccagctactgaaaaacaaataggccattccactctccttaaactcctaactaaagttcattttcacaagccaaatttaaaaatcaattaataaattaccactgccaaagaatgttaaaaagcccagaggcacctaagaagagcttagaagcaacaacaaagcattaagcctgagataaatgggcttgctaggagtttactgcagtgttgacttaggatcccggagcagaaattctcttccctctacttaccagtgcgttgtgtaataggagcagcattaattttaacctaatcatgaatcaatcatgaaatcctgatgcttgttttccctggcaacagaacactgcaattagcaaccttgaataggagtgctttctggatgggcaaggtgagggcaaccttctgcagtacattctttcctaacccgccagagcaagggggctaggctgaaataccactgcggagttaaaaactcccacccctccagtcatccatcctgtgacgtcgccttcaatctttcaggaccggtcagagtggggtttctcgatcttgctgcaactgacattttgtcaagggggctttcctgtgcattggagaatgtctagcagtgtccctgggctcgattccttagacgccagtccagtaccatcttccctccctccgctaccccctccccaagatgtaaggaccacttcaggtcagcaagggggtctgaagccatgagcacccacttgcccgaccacgcctgctccgctctccccctaccctctcctcccactcttggttgagcggggccctccctaggggtgctctgagctccatccctctgccctagtgcagacccaggagcgtatgctcacaactagggccttgtgtgccggtgcagaaatcctattacagaagcgccttcatcaaaatcacagaagccagaccacctgctgcatgccggagggagatctgatgatacatgcgctctggaaggcaaaatggaacgtcccaaccaaatgatacatcgcatgcagacgattttcatatctccagtaagaagggaaagagttatacttttcttccctcagagctttttcttaaagcagtgatcagcttcctgaaacttctggtaagtctcaagctgggatgccctgtgtcagagtccacccaactagggacaagaaagaggaactggaagacgtgttgtctgcacactttgtgatgggttccagacagtgaagggcctggcccagcacaccacagccccatgcccgtgggtcctaggggtagagaatgtatttaagatagcaaacgaagcaactgacagagaaatctcaaaaatatacaagcagttcatgcagctcaataccagaaaaataaatgacccaatcaaaaaatgggccaaagaactaaacagacatttctccaaagacatacagatggctaacaaacacatgaatagatgctcagcatcactcattatcagagaaatgcaaa

SEQ ID NO: 33711 - DNA, 684 bp, Bovine  19866881235432
  misc_feature (1)..(1): n is a, c, g, or t
ntggtgccttctttgatcctccccctccagtttccttttctccaatttcatacttctttccagtgatttttggcctctgcgcagtttcgctatcggaggccagcatgattaaacagacgccaggagtttgtgttgccctgtgatgctgtttctgaaatgtttattctgtgaacactgattttcgtataaaccaccggacatgttggtttttccttgtgaggcggaaggtactgttttcccagcagcaatagggagaactttgaacctggggttccgaaccattcagaagctgaaacccataaactctgccctcctgactacactgagagaagtgtgtgccttgaatgacggtgggacacatgttctcatgtgccccgaggacctgctggacggcaggcgccaccctcgagggcttagtttctgtgtctcgtcccactgaaggtcactgtggagcttgctgtccttagacgtctgctctcagaacaagccactcaccctcggtgggcctcggtttccttctctgtaaaatgagtcactaaactgagatatcatgtcccaggacttgtggattttaccgtgtagtttgaatggaaatttttttcaaaaaggagacccatgctggttcatatgctttgtgctgaaaactctggatgaaagacaaatctaccactgtagactatcgcc

SEQ ID NO: 33712 - DNA, 1753 bp, Bovine  19866881355250
  misc_feature (1)..(1): n is a, c, g, or t
ncaagaagaagtagctttaacatctgccttaaaaaaaaaaatcataaagacagctgagttgagttcagttgctcagtcgtgtctgactctttgcgaccctgtggactgcagcacgttaaaaccaaacggaaggccaatgtgactgcatcaagaactatgccacgtgaaaggcaagataggaagccacgggccagcccagggggtactgaattgcaagcccatgcttccaacaggacaggggaggacgagctttaaaggaatcggaagtggacctgatgcagaactccactgagcttggaaaacccgcccacaggatgaggggaaaggaatgtcagcttggtctgagacacctgagcgccagacaagcctaaggagcccaggactgaaatctctttggtgcccaggtctttaaaggtcatagcgagctcttggctaagattaatgtgaagtcttcccccatatcggggaggagacaccacacaggtcctgcttcctgcgtcagagcagagtcagaaaagtttcagaaatattaggagagtcatgggctgcagcagtggttctgctactgcaaagacccgagaggagcctagggcaccaccactcaagacacagactgacccaggaaatgatggtcaggcggaggctgggcctccctgactcccagtccagtgctcagccccagcccactgctcagctactcagagcaacaccacgcttccacgtctatcaaggaagaaaccaaaggtctctcctgcccacaccaagaagtggattctcctctccgtggctgtgatgggctcaggcgacaggacaaagcaactgaaaaaagagcttctctgactaatagagacattgtacgtttaaaaacattttgactacgattacatagatgcaagctttacaaataatacttcgggtattaacggcgttgcctagagtctgaccaagagattagaattacgtgtcacttttctggagggtaacctgatgtcacagaccagcggtattcaaagatactcgtgctttgacccgggtgctgctcttccaagaactgatcttaagaaaataagagatccaaaaagaagtacgtgcaggccagcttcagagtgcttccaacagcgataatatatagaagcaacctagcatatgagaatttaagactggttaaatactctgacctctatgcaggggattactggattccacctcgtcccatacagagccactcggaacacgggcatgctcttgggagtctgctgaactgagacacctaggcgctgctgtgcttttagccagacacactctgccgaggtccacctcccaaacctctatcactggtggattcacacttcttgtacccactcccggtacctctgagaccaccttcttcttcattccatttctggttatcactactccttaatgtcagctcaaatgcctgtttgattatgagtcggtgactgaacggtaacaacatttgaagcttagaaggcagactgcagaattctgccgctaattgagaggctccgtgtgtatttttcataataacgagatattgagggctttctcacaaagtgaagaaaaccaatgactcacaatattaagaacagagtgcagtgactagcggatccactgaaaatataatcttccccggggattttcagccggctgccacagtgcagcactgggtgatgtattgcaaatgtatatttcaagtttttaggctgacgagaactagcttctcaacaattta

SEQ ID NO: 33713 - DNA, 1670 bp, Bovine  19866881414904
  misc_feature (1)..(1): n is a, c, g, or t
ncattctatgttaaggcctcaggaaatattagaggctttgtgggacaactgctcaactgtccactgtaatgtgaacacagttcagttcagttgtgtccaactctttgcgaccccatgaatcgcagcacgccaggcctccctgtccatcaccaactcccggagtcacgtccatcgagtcagtgatgccatccagccatctcatcctctgtcgtccccttctcttcctgcccccaatccctcccagcatcagagtcttttccaatgagtctctacagcatcggaccttgtttctatcaccagtcacatccacagctgggtattgtttttgctttggctccatccctttattctttctggagttatttatccactgatctccagtagcgtattgggcacctactgacctggggagttcctccttcagtatcctatcattttgccttttcatactgttcatggggttctcaaggcaagaatactgaagtggtttgccattcccttctccagtggaccacattctgtcagatctctccaccatgacccgcccgtcagtcctgggcaattcccaaagggtgtgactgtatttcaataaaactttatttataagaaccagacttggtcgtgcctgcagttgcctgacctccgccctagcatatcatcacgggtgcacgccctttaggagagccctggcctgtgaaagagaagaacctgtttcacccacttctccaacgacacgatttagaagacagcaagcccgtgttctgttttctctgggggttgggggtggaggctggtgagctggcagaggatgggactgacaaccgctgtgtacagaggggaaataaaggcggaaaagcaggagcacatctgaaccgtatacatgtgtgtgtacgcacgcgtgcgcgcacacacacgcacacgcacgcaccgagaaaccgctgcaaccgccataccaccgtgggtggacctgcactcagtgcgtcagattaaacgcttcctctgccccaactaccagcgattcaaggggccaaccggcagccataagaacgcattaacctttgtgccaaaccaattccaagtccccttccagcacgaagaggcagtaactggcaccccatgcgcgggaggaggggcgccctctgctacacttagcatcctctgcacctggatgtctgaacgcccgctcctccacagtgaccttctgaccaccggagagcctggaaactgacgtcctaaggccgttcccctccagccttagagcctgcggtgggggcggacagaggtccaagctcacagctactgccaggaccgtcttcaaaagttacatcggcatttgctctgtgcctatggggctgtggggcttcgccttccggaggccctggacgggtgatttcacacagaaacacaagaggcgtggccgatgggttgagtcagatcagcactggagacgtgccccaagacccagcccttcctgagcccttctttcaacttcaggctgggggcgctggggcttctttctaagaaatggggttctcagaagacaaaactgttttccggctcagaagcaccaggcggaacagagggctgaggcggccgctggctgtgcctgggggtggcgggacaggggctgggggcgcaggggccccggacagagtcacttaggtagcagg

SEQ ID NO: 33714 - DNA, 711 bp, Bovine  19866881530383
  misc_feature (1)..(1): n is a, c, g, or t
nacacaaaacaaagataacgcagctattttgcaggaagcttccttgtcgaccacatgtgtgtgtgtgcgcgcgtgtgtgtgcgtgttttaatgtgatggtgagctttattttctcatatgtacatcatatattgtaatacgaaatagatattgactgcagctggtgtggatatccacatgtattgacctcagaggtaaatattgactgagacaaaggtaaaatcgatgcttaccttgagggataataaatctggatatctattgaaataagaagtcaataggcacattgttacaaacacccgtggttatagtcacttgagcaaatttgtagagcgggcgggcagcggctgttttgcagaaacgagaggcagcagtggaagcccgcggaggccgcactgaccggccgctttccctttactcccctttcctctgtcgccagccagcatgggaccaggtatgccaccccaccctaccctgtcaaaggagcacctcagcctccgttttcaggaggcggttactgaattaggagtctgcattgtggctcagctggcaaagaatctgcccgcaatgcaggagacccgggttcgatccctgggtcaggaagatcccctggagaagcgaatggctatccacttcagtattcatgcctagagaactccacacagagtcagacatgcctgagtatgcatgcaaacacttattggggggggg

SEQ ID NO: 33715 - DNA, 826 bp, Bovine  19866881751155
  misc_feature (1)..(1): n is a, c, g, or t
ntaccactgagctgatgactattattagccctccctctaaatgaataccccctgttctttaagaaggggcttccttgatagctcagttggtaaaagaatccacctgcaatgccggagaccctggtctgattcctgggttgggaagatccccctggaggagggataggctactcaactccagtattcttggggttccctggtggctcagctggtaaagaatcctcctgcaatgcgggagacctgggcctatacagtccatggggtcgcaaagagtcagacacgactgagagaaattctttaagagagaagcgcaaggaccatcccggtgctctttagaacaaacatcttacctcttcacttcctgcacatagtctgcgtttctgtcgaagaggtgggtcacggagtccttgatagcttcgtgcttgaaagtagaagctgttccaaagacagtcacgttggggacagtggagcacagctgagccacagcttggccctagaagtgaaatataacagacaagtcacatagaagagctaccacccgacagctaagcttgctgggcaaaaagcaggatttctcggccttgacactgttgaccttttttttggctggattggtcttcgttggagggggctgaactgtgcattgtgagatgtttagcaggatccctggcctccacctacacggtaccagcagcatgccccaagctgtgacaaccaaaagtatctccagtcaacatcgctcgttattagatgcaaatcaaaactacagcgagataccacctcacacggtcagaatgcccatcatcagaaaatccacaaacacatg

SEQ ID NO: 33716 - DNA, 1098 bp, Bovine  19866881894074
  misc_feature (1)..(1): n is a, c, g, or t
ncaaagagttgtacatgactgagcaactttcactagcatagaatacaactgctgaccccttagggttgccaaatttagcaaataaaaatgcaggatgcccatcgaaacctgaatctcagagaaacaaagaaatgtttgggttttttttaattgaaactgtatctcacatttaactgggcaacctgttgttttttcttttctttttgatcatgtggaatgcagggatcttagttccccaaccaggaatcagactcgcaccccgtgcagtagaaaagcagagccttatccactgggccaccagggaagtccccagcctgtatttttcagtctgggcgccctataacccttgtagtaagctatgggaagaaaacattgcagcttctgtgtacatgttttaaaatcttatcccatatgtaaatgtacagttcttggggggtttgttcagaatttaattttactgctagtggtgcacgatcaaagcagtctggagaccactgggaggaaaaactcccacccgtatgaccaatccgggtttctggcatgacctcaggtgaagcctggtcggagggaaggatgcagattccagctctggctggtcccgttgtttaaacaccctgggctctgtgcccttgtgtggataatggtctgtctctagttgatggggtgcttgtagaaacccgtccgtgtttgtgtcccagtgccggccagagcccacggagtgtggtgggcgcgccacgagtgtcctcttcccaaggagtgtggtgggtgcgccacgagtgtcctcttccccgtggctccgtggagactggcctgcaggggtgggaggacagagggccccagcacgctgggcagagctcccccgcgccggaccctctcccgctcgcgtccttctggctgcagcagtgactcacgtggggttaggctgtttgtgtctgtgctctgtgctgtggtttcggttcacatggggttgggggacgcagttttgttttcactttggtcggttgtgtgagtttccacccttcacctcttcagtagctgacgttcttgtgaaactctgtggggattcatggaaatgtccagtcagtactgtcgggttcc

SEQ ID NO: 33717 - DNA, 732 bp, Bovine  19866881900456
  misc_feature (1)..(1): n is a, c, g, or t
ntgtgtgtgtgtgtgtgtgtgtgtgcgtcctaaactttcatcaggttgcctgtcgcccgtgatgctgtgttgattgagtaaaactaattcatagtctacagccactcgccttggatacttgcttctaggccatttaaatggttggtatacaggttctcatttttctcagccttccatttccatattaattctcaatcaatcactgacggccagctgtcaacaggcaccgttttttggtgggacttgatgatgtatagcccttgtttccagattcctcgcatctcgtggcatgaaacactgctctgagcaagtcctaatgcatttgggtgcagcccctctgagccttctaatggtaggcctggtgcaggtgctgaaaggaggcgtgtctttaaagggccaggacgtggaatcacggcttggtggacgatgttttagcatatctgtgtctgggtatgcacccagcaacaggcaagtttaaaggccgttttgtcaggatgtggcctttgattccaaaagtttgggaacaaaagatctatgtcttctcagtaggtaatggataaaggagtgattagttgtaaattatttgccattagcctgctttaatattgatatgacactaattttgacttcgagaagtttcccttttgtcaagaatggtgatggtggtggtggtgatggttatggtgatggaggtggtgatgatggtgatgaaggtggtggtggtaatgatgg

SEQ ID NO: 33718 - DNA, 1269 bp, Bovine  19866881944534
  misc_feature (1)..(1): n is a, c, g, or t
natcccattcacacaaactcttgcatacttttgcaaatggacggcatatgaaagttaattttgagtccttaaaaaacgatgcattgggttcattttgtggcaagttatcacattaccaatgtatccataaaatgtccccttaatagaaaagaaaaagtgcatctacaaggtgagatttgcgattttcctgagaaggggcccatgttccaggtgaggcaccaggggacacttgcccgtgagaggcacagaggaccccccaggttaactgcaaggtggatggagctgtgagccaagcaaactctcgagttttagctctctcctcccagtgttgctattgttgttgttaattaaggctaattatgtgatttaataaataaaccaaaagggccttgatttccaaaggtgtgatattctatcacagcttcaagtgatgctgcattttaaaaaattaattagtatcttgtgagatcggccacacattattgagtaagtaacagcagctaagtgaagcagatgaaatattggtaagcaatgcagcccacagtataagtatgtgaagggggtcagaggttaatccctattgattttctgagtctgcgtacagcaccgctgggagaggccggttctgttggcaatcagctagcacaaatacattataaatcttactgtccaccttcactgatcagtgtcacttacttccttcactaaagaccattaagaaactactggaaaaaaaatacccagatgaggggagaaaggaaagcattttcaaagtctcccatgtcagagagtgcttttggagatggaggacttgcccgaaaacagaggtagtcttcctggggtccagtctcgctcactgaaggagacatgcatgaacacagagtagttttgaagtgcctttaaagccaaataaaaaatgggagaaggagctttcatatcagggtgcatgaaaaaaaaaaatgtagtacaacacagtcactgacatggatgagcaccatctccaacctggctctgaaaaaatttggtctcagcaaaaccttgaagctagtgaagagtaagcttcagggcccctcacaaccgggggccccttccaagattctgcatcacatgttttcagttcagttcagtcgctcagtcgtgtcagactctttgcgaccccatggactgcagcacaccaggcctccctgtccatcaccaactcctggagcttactcaaactcatgtccattgagttggtgatgccatccaaccatctcatcctctgggtcc

SEQ ID NO: 33719 - DNA, 1126 bp, Bovine  19866881987886
  misc_feature (1)..(1): n is a, c, g, or t
ncagtcacacttgaaactgacatcccaaaattgaaaatgcagttcttctgtttcataggtcttaggaattgtctcaggaattaaatcataaacgtaagggtcagggaacaagtgacctatcccttctgtagatgtgacatcttaatacagtatgagcacatagtaggtgcccaataatgtctctgctgcttgattgacagatgtatttttttctccctttcccatctctgaactgtttttacagttttatgtacagctgcacatttattatctggagacaaatctgaggctgcagcatatcacccaaggtgtgtataacatttacaataaagttgaagatagatggctaaaaaggaaccctaatcatctctgatattattaattcctctagtttgagttctcagagagcccaagaaaattttcttttaatctctatgggctttctgtcccatagatgaagttatagagctggcctgagaagtaattttgtaaactcatttaccaaaggggatgggggagactcactgtagtcatccttcagaggtttgcaagtaataagcatgctctgttctcttcaagcccagaagagctgtgtgggcttgataaatagccaagcttggcccaagtgcagcttctaaaatgctgtctgtaaatactgctgaagagaccatcaaaacgttggtgggtgttgctgatgagtgactgtgggtgcttttgttagcaaacagggcagctgcccctccccactctgtgaatgactagcctgctgcaggggctgtaattcctttgctttcctggtgcctgtcttaaccaatatgacgtctttgattttttttaatcaaatcaaattcattagttatttttggctatgctggttcttcactgttgcacgggcttttctctaagtgtggtactcagacttctcatttcagtggtttctcttgttgtggaacacagactctagggcacacgggcttcagtggttgcagctcctggactctagagcacaggctcaatagttgtggtgcaagggcttatttgcaccgaggcatatgggatctttgagcagggttcaaaccgaatctcctgcatgataggtaattcttaccactagccaccagggaag

SEQ ID NO: 33720 - DNA, 3778 bp, Bovine  19866880347846
  misc_feature (1)..(1): n is a, c, g, or t
nagaccagagaggaggttgtttaagtatcactagatcagagatgacagcagcccaggccagagggtggctgtgcagagtgagataagtgggtaaatctgagatattttggagatggaaatgatgtaccttgatgtgggagtgagggagacagaggagctcaaggagagctcacgggtttctggcttgagccacctggtgggcaatgatgccactttctggaatggcgaaggcttggagggggagagttccatcccaggcatgtgaattttgagatgcctttgagacagtcctatctggagcttgactgatgttgtaagttctgggggtcattggcatatttatggtgtttaaggccaggggactgtgtaggttttcctagggagaggctagcatgagaggaggccctaagaatgtgcctgccctcctggaagtgcatggtaagggtttgcaggtgttgttatggcacaccaggagtcaaaggagatttttgagaaagaagatgtggacaggtgtgccagatgctgccaatagcatttggtgaggagaggcaggtgaccactggatttgggaaagtggcggatgttggtgacctcctcaacagcaattttgatgcagtgatgatgacagaaacctgatcagagggaattccctggcagtccaatggtcaggactccgtgccttcattgtcaagggcctgggtttgatccctggcctgggaactaaaatcccacaagctgcatagccacaaagaaagaaagaaagaaagaaagaaacctgatcagaatcgtggccacgggctcagtttctccagccacagccgaaagactccttacaatgtgggaagagacctttctctaagtgccaggctcttctgaacaacctagctggctcaccctcttagagaagatgactctggcgctgccaagaggaactttgcttcttcagcattcttcatcgagggattcttagaacagcccgaggagtgcctaagaggttcgccaggctgcctgtgccggatctcctgtctgtgctggttggggctgcgacttctcctgtggccagccaggatgtggtctttgctttcccagggtggtatctgcagaggtgagaaatcctgccctccttctttttaagtaagattagcctggtattctggggacagctgtcctcctcagggccctttcaggggatatcttagaagacccagagacctacaaatggctccattgtcctagggtgtctgaggtgagtaagcgtagcgaccaccattagcaccctcccacctagagaagaactaggacattgaattaagcaccaaagaacagtaagatcctcaagtggttgttcttgttcagtcactcagttgtgtccaactctttgtgaccccatggactgcagcacgccaggcttctctgtccttcactatctcctggaatttgctcaaactcatgtccattgagtggatgatgccatccaaccatctcatcctttgtcacccccttctcctcctgccatcagtctttccaagcatcagggtcttttctaatgagtcagttctttgcatcaggtggccaaaggattggagcttcagcttcagcatcagtccttccaatgaatactcagggttgatttcctttaggatttactggtttgatctccttgctgtctaagggactctcaagagtcttctccaacacaacagttcaaaagcatcaattctttggtgctcagccttctttatggtccagctttcatatccatacaggactactggaaaaaccatagctttgactgtgtggacctttgtcagcaatgtgacatctctgctttttaatgtgctgtctaggtttgttataactttttttccaaggagctagcgtctttaatttcatggctgcagtcactgtttgcactgattttggagcccaagaaataaagtttgactcatatggagtgagaaggaaatttggggagagctgctcgcacctggcccaggatgcattgtacttgtccagcaggatccttcagagcacgggaattctccatcactcagcctttgttgggcttggggtgcttaagaaaagactccctggatgtgttcttcagaggggctggagttgcagccctggcttcagatccttatcttggcagttgtgagagcttgactgggttttttaacatcacacaacctctgtgcttcttgtaaaaatcaggacagttacaactgcgaggaagcttggtcccttattccccaggacttccgaggtgctccattgctaggtactcagcacccaggatgctgagttaaaccttgggctgtgcgggctgtgaggtggagggccagcccccaaggctggcaggagccatcatggaaggcagcttggaggaggtgtccgagctgagcttgaaggaggagcaagcaggcctgttctagaaggtggcccttctggttctctcgggggttatgtgtgtctcaaaaaggaggggcaggcaagggagaatcagcttataaaacctttgtgcatttagccaaggagtctgattttcttagaagacaacaaggagccgcgatgtgtttaaggcaggagacccagtactgttggtgctttagaaaagaagatccctttggccgctgtgcacacaatgggtcagaggagagaggggctggagacgggggtgtcctaggggcccactgtgatggggcctgagatcaggagtgccaagccagagggtgtgaggggtgaggccggttcccagaactagctggatgtggacagtgagggaatgggaggaggcaggtggacactgcagtctctgacctgttgactgcctggctgacaaagtcattactacctgggagatgggagcaggaggtctgggcatagtgttaatgttagtctcttcagtcgggtctgactctttgtgaccccatggactgtagcccaccaggctcctctgtccctggattctccaggcaagaatactggagtgggttgctatgctcttctccagggaatcttcccgactcagggattgaacccgggtcccctgcattgcagacagattctttatcgtctgagtcaccagggaagccccagtctgggcatagaggaaaggtgttggggttttgaacttatttgttgggaagcctttggaacaggcaagtggaaatgtatacgtgggagtttgggagagaggtcaaggcttgagattgagattatgggattaagtgaaataaagctgtgaggaagagcctctgggcacagaggcacacagtaaacattagtcccttcaaagagcttgtaagctcatttggggagacaaggctcacacgtgtggaaacatttaatatgaagaggaggccctgcttaattaagtgttgtaaggattaaactgcctgctgtgggtgttcagaggaagggagctgtgtggctggaagagccatgttaggttatgtggagtggggatcctgcagctgtgggggaaggaagcttccagaacggggcagaaggggaaaccagactggacatggatgtcccagaagagagcgatgtcctgctcggagcacaggcgccagtggagggaggagtgtgtgtgtgtgtgtgtgtgtgtgtgtgtgtgtgtgtgtgtaactagagctctgaaatgttctggggagacactgggaagatagggactcctgcagcccttcccagcctcccacctgtcagttcctaattccagcagactccaaacttgttgctcaataagaggaagaaacagaggcaggtgaagagt

SEQ ID NO: 33721 - DNA, 2460 bp, Bovine  19866880387903
  misc_feature (1)..(1): n is a, c, g, or t
ncagcctaccaggctcctccatccatgggattttccaggcaacagtactggagtggggtgccattgctttctccccccagagggccctggtaaagcttaaataacctactgcgcacacagctctgggagcagcgcctgccacacagtaaaccatcacacattaaccactgtctttatcagtctcatcatcatgggaatggactgtgcgggccacacaggcccacatctggttgcaagaggcagcctcgtcttgttagcagagtcctactccaggtgaaggcacagaccgccaggagcatcttcaccacgtgttcagctgtctcccattgtgtgcacttgaatgtgtggtttatgggggctagcttggcgtgtgctttgtgcctcatggtgtaatgactttgccgggaactgactgcaaacacagaaccacaatcatgcttcattgatgcctctttgttggaaatcaaagaacaggtgagcaaagtttccagacaactgaaactgatgttcttttttgttttttcttttcttttttccttctttccttttctttccttccttcttcctttctatcattctttatttctttctttctcatcctatcacttctttctttctttttttcccttccttcctttctttttttttctttcattctgttcttccttccttcctttctctctttctttttcttcttccttcctttctttccttcgatcatttgggtgaaagtaattccccatacatcctgacaccattatgactccatcatgactccatcattgttcagtgactggcagcagctcaggtgtagtggaaacgatgctggaccccaaatcaaaatgctctgcagtttggtcccctctggtcccatcacccagccactgtcacaaataaaaggtatcatgtctgtgaaagtgctaatagttgagtatttacagagggtccctggagaattctggaggcttcagagccatttactctacactaaatagccccgccccaccatgctgagctgtaattcttccaactctcccactgctgttagcttttctggttggagtgcccccagtgccttccaactctgcttctcttacagctctcctcaccctgtgaccaccacttcctatcaaccacacaatcctaacctatccatcactttccagccacttgtcctgtccccaggggtggcccacatgagtgcccagagaccctccagcaactcaggagctacctgcacagtccagacctcgaggggccgtccatctgttatctgaagccctcctcctgtctctcccagcagggtcaaggccactactcatagcaagtgttcaggatgaaaaaaacaggggaatttatttctttctgccacaaagaaagccattacaaagccactcagctaagaaggaagagttcaccaagcacacaaaccctgataagcatctccttgcttgcttagactttttccaccccttacacacaattctgaaactaggaaagtgactgggtcttcaagtaggtttaataatctccctgggacattattgggagataaggcttcaggccagagctcatggcagcctcaccatctgcggctgcacaggctgtgtttgtagcttgcttgctgtgggacatcagtcctcagaggaacctaggcctcctctcttggaaaccaggatcagactgggaaggagtcctgcccagactcccctacactctcagaggactgggggtctgaagcccctgggactgcaaaggctcctggagccctgctggggacctggcctgggctgaggtcaggctgatacaacaggctgcagccatccatctgcttggccagaaaaacatatcaaagccttcacagccaccgtgtcagcacctttatgctatgaggtgctctggggccccaaattcattttaattttcaatgtagagagtggtcattttactaaataggacgaaactccctgctttcagaaacagaatagacagagcacagattagtctttttggttattcacccaagtgattgttatggaagtgccatgaagatacggacttttgtgtctctgctccctgccatgtcctcggtgcctagaaccatgtctggcatctgcaagatgctcagaaaaacataagcaaggcaccttcccatgcagggctctgggcaccagaggacagatgggtagatttttctgttcctggcagagctcacggtccagcctgtgatgtttacactcgaatagaatgactccgcaacacaggctgcccactagggaactttttgagccacgacatctgtgttttaacatctgtcttccctttctctttgctagactgtcagttgtcacttaaattgcatagaattgtaaacaggatgtgaagttgagatcattctcaagaagggcaggtgtgggctagacagcacctctccatcacaacacagagccttgcatgcct

SEQ ID NO: 33722 - DNA, 1279 bp, Bovine  19866880408331
  misc_feature (1)..(1): n is a, c, g, or t
naaaaagttagacaggtcaagagtgatcttcttaaagaaggcctcttttgaaggaatttaaactatttatgttctggggctctgtgtccataaatatttctgaaacagaagcaagagagcagaaccatccagtttaagccatcccttctttgtcctctctaagctgtcaaaatctgcttttatgccttttcctcaagttcaatcatacaagactaaaaaccattcaaagtcttctctctctaaggaaataaggttcttcaggggttaataatgagtctatttgttaaatatttacgatattccaagcaccgcgctaagcacttgattatatttattcagtcttcaaagcaaccttgtaagtgggtgttgtcattattatcaatttgcagatggggaaaccaacgttcagaaagtcaatagtcagtaagtggcagagctgaaatgtaaaaccaagttgtcaatctaggaattataaaaataacaacaccggtaacccctatacaatactgcctctccgaggcaaagagaggattctagtatatgtaagaattcagatagcaacatcccccattgtgccttcatgaacagctgagcagacccaagcatagagcaagccagactggagaagacagtgtctttctgaaaaccagagagatcattacttggtgatgataccttttgtgtgtgtgtgtgtgttaccaacaaccacagtctgcttgcataaattgagtcatatttcaattggctcatttactgagaaaaacaagtccacctgccaatatgaataaagccagaaaggccacagaggagagaggggatggagagatattttctggtatttcaagaaaaacaaacaaacaaacacatatttattgagtttttttctcgttacaaaagtattctttcctagttgtgaaaccaattagaaaatacagaaaattatatagaagctaacatttgcaatcatgacacagcccagatacttaggtgaccacatgaccattatttaggaacagatgctttcggtcatgtaggcataaattcacactttaaaaaaatgcaaattttgtacacaatgttttgtagactctttttttcagtgaatgtatttgttgtgaacatttttccacctcattacattttcttcttaccccatcatttggaatggctacatagcattctgctgcacgaatgtgccataattagaacctcgtttctctgaaataaatcaagcacaggaagcactcttgcaggtcaagcacaaatgctttaaaaggtg

SEQ ID NO: 33723 - DNA, 1001 bp, Bovine  19866880437408
  misc_feature (1)..(1): n is a, c, g, or t
ncccaacccctccgccttcccgcaaccctctcggacaaggacaatgtccactgcataaaggagcccagctagggtagccccaggctgaaaactatttatacacgtcctcagcatccagaggttaaattacagctggagatgtggcacagggccagccctgagttatttatatccatatcctcttggcagaccaagaagaacagggcattctagggggcctctctaagaaagacctacaggcacacagtttacaagacagcacaatcacaatcatccttcccatagccccgcaaccacaccctacacgcacacacacacacacacacagtctggaccatccttgcaatgactgtaaactgagaaagtagaaaccaaaagtttgttctaaaaaggaagtaggtcatggccactgaagggctggggtaagggaaattagccaaattccattgaatcattccaggagattctccaggctttccagactccacatcagaagcctttgaaaggaaaagcctctcctggtcctaagtccacagcactcaatgcccatgagacatgaaccagatgaaagtagaaggcagggttcccagggtgaaacttcaagatgagttggacccatggctcaagcaggaagcttccactctcagaggctccctccctctgaccccaagctgatcctggcccaaagagcaggggaaggatttagaaatgcttccaacaccctggggccccagcaggaaaatacccttgtttaaccaaagcttcttcaagcccttctgtttagttcttagtgacagtcataagacagcacagcagagtctgttaaatatcacacgggatgcacgaggcctgctgctaggggcagtgcacagcacatcaatgggcttgctttaatgtcgtgccaggtgaagggagtcttgtagagccccccacagcagtcctgggccaagattcactcaaacaaaagccttggcacagctgggccaagtcccagagctgaa

SEQ ID NO: 33724 - DNA, 1871 bp, Bovine  19866880585771
  misc_feature (1)..(1): n is a, c, g, or t
ncgattcaggaaactcatccttagaattccatccatttagaaccaatcctaataccaaaatctgcatttggattcccctaagaaacagaactgataggatctctctatgtctatcccatttccctgtccatatctgcatctctatcgtcatctccatctccacaatcatctccatcttcccacccacatctgcatcttcatccatctatgtatgcgtgcatacacaaacaaacacaaacatacctagagagacatttattataaggaactggctcatattataagtgattatggagaccgagaatttccacaacctactgtgtacagactagagaccctgggaagctgatgggttagttcaaaggcctgggcactgaaggcaacaggagatcagtgttctagctcatgcagtcaggcaggggtgtgtgtgttggggggaaggatcggggggaaagagaatcttttcttcctctacctttttgttcaattcagtctacaaattcaaatgctgatctcttctggattagcaacctcacaggcacatacagaaatgacatcttaccagagatctgggcatcccctgatccagtcaagtcgacacataaaattaactatcacatcattcttctctaaaattcaagtgcacgtgggctaggatggttcagaatgctgcagaggcctgatggtttaagccaatgtgaattcttcactaagtgctgatggaattacccaggagaagaactcagtccttcaactcttttgttctccttaggaacaaagggacatgtgaaaggaggtgggggctgggagtggctgaaccctaccctgtcttctgacttccaggctcctcctactccactctgggaatttgccttttctgtcaactgtgagaagagctgtcatacttttttttttaggtggcctatgatgtggtcctgtgttggcagtccatggggtcacaaagcattggacgtggcttagtgattgaataacaacagcaaatgatgtggtcccttaagaaggaaggaaagatggtgtgatagactgcttttaacttgccttcttactgcttctccaggagcacacaaggcgctcctgacttcacccaacgttcattaaatgtcatgtcttctcttcttgaaatctacagaatgcaaccaaaccactcccctccataggctccattgtctcctctcttacacttggtcacactgttctttcacctggaaagtccctctctgcaacatccacaactcagcacctctgaaagcccagaaaagaaatgctgtgctttccatgaatccattcttgaaatgcgctctggggaaactaccatgacagtgtgtctatcctgtatattcacgggtctcattcctacctgctagactggatactaatcagggccggatggagcagagggaggaatcaaactcaagcgtcaagtccatgtgggtctgaatttcatccatgtcactattagctttgtgatcccaggagaatcattcagattctctaagcctctgtgtactcattaattaaaatgagaaaataattcctacttctcagggctgatgtgaggattagtttgatacatatttatgaaagagtctgccaaagaaaggttttcatagatgcctgtggaatgattaaataaattgatataaactatctggcatggatattaacaatttttcacttaccctgtagttaaaaattgcatttcggaatggtggtggtgaagaatatatggattcttttgagatgtcaaaatcccaagggatgagtcctaaggtgaggaaagaagttacctggggtaacactcctttcacactcatgcgtgacttacattcatatgatgatatctggcatgt

SEQ ID NO: 33725 - DNA, 802 bp, Bovine  19866880589752
  misc_feature (1)..(1): n is a, c, g, or t
nccctttactctaacacctagttacctgtctactctgaaatcctacagctctcagccctaccacaaatgtctttgtacttgagttagttgactgtgtgtaaatgtttgagcacgtccttgcgtgctcagtcatgcccaactctttgcaaccccatggactatagtccactaggctcctctgtccatgggatttcccaggcaagaagactggattgggttgccatttcctccttcaggggatcctcctgacccagggatcaaacccgtgtcgcctgtgtcccctgcattggcaggtaggttctttacaactagctccacctggaaatgtcggatacccacaaccaaatcgtaaatgccatgaaagcagggacttttcacacacatctgccctccctgcacagccctttgcatatagctgggttccatgcacatagtgaattgtgaatgtgacttggcaattacaagagtttcagggatggacgtgatatgccttactttggtttgggggccagaaggtacaggggtggtggtgttggaatcattgcaagttagaatgcaggggtcttagactttgtataacccaatggcctgcatttatacagactctctaacattgagtttgcccagcaataggattttcttactcccaccacatgagcagccaaactaaggcctggagcagtaaagcaatttggcccacgagtccagaacccacatctcctgtcacccagcccacgctttaaccactaaaccacagctgccactccaagaccttattaatagccatttctccccccagtca

SEQ ID NO: 33726 - DNA, 3192 bp, Bovine  19866880637992
  misc_feature (1)..(1): n is a, c, g, or t
ngactttgcctttgccccgtgaaagccccctctactcctgggttttctagaatcaagcctggctcctttctgaccaatccccacctgactccatttcccttatcaacctgcagatcacctctcatttgtcatctttattagcttttaatctcccatcagtttagtgctgaggtttaagagtaggattagtggggggagtttaattggatgatcttccacggccccttgaacatcagattcagtaaaagtttatgaaaagataaaatcgccaagggttttatagccccagacagagcaagagactggggcgagaacaaggtgactatttttcaacctcatataatccgtgtttcgacttgattaaataaggaagtgagttttccgtctctttcccttcctccctctttttccttgggtaccatgagccttttctgccttctgtaagcaagaagcccctttctgccaggctctcatcgcctcttctttgattctttctgacaggaagactaatgaaacctgggtgcaccagaaaataacatttatttcatgcagaaatatgctgatccaccgctaaaggtggcagaaatgatgcatctgatgggaaagagaccagtcttcaggaggggaatgtgaggtccaggaggaagcaggaaggaaatttgaaccatcttgaacccaccttctccagccttctgtcctcaattcatgctgtatcacttcttacgagggttaggcaaccggacagtgagggtggggtgggcagcagaatcatttgtgaatatgttcatttattaactcagcaaacttttgttgcaggcgtgctatgtgtcagatgctgtgctaaaccctggggatatcaaggtgaataaagcgtgttctgctggcgggagggcatagtctgtggaggagatggacagtttgaaagggaattaattttgctttttacagccttagagatgggtcttgtgggcttcatggcatgacttgggatcttgcagcagacctaggctgtcagaccatgatgcagggttttgcacaataaaggaagaagtaactgggggttcctaaagggaatctgatgggcggagctaggggagggggcaggaagaggagccaaggagtggctattagtcggtggactccctgggggtgaagatgtaatggaaatttcctggtgtggatggcctaaggacattcagagtagtcaatactcattaatgccttgtggagatatttatttttttcttctgttcattcaataaaagtaaaagcccataatcatgggtgaccatgaagatgtagcttcccaggaattcatagaaatctaaagctgggttttggatttcccctggccacaaattggggtttaagccaatggtaagtaccaggagaccctcagtgatgtgtgatttacacagctgttactaactactaggtgcaagaaagacgatggtacaaatgaaaggcagcgcttgagggagtgaatgagcagtccatctgggaagggggtgtgctgggcgtcagaagggtcttgataaacagaatggggatagaggaagggcacaaagcaccttacaataagaaatagccaggagacaggaaatgatgacagtcatggaggttgggatacccgagggagttacaagggctgaagagagagttgaggctgctggatggggtgatggtggtagtggtgggggggaatcttggaagacctttgatgcctaataaaggagctcagatggtggtggttggtgctggaccctgaagagggtatgggggaatcagagctacatgttcatcttagagctatcaccctggctcagggtagatgataaactggaggggagtggggctggggccagggtggccaggccggggacaatagtccaggcccaagcataggtggtcacagtacacactgggagtggagaggatggaggcgtgttccaatggaaaatggaaaagcctttgtaattggttgaatgtcggggggaacacaaaggaagaagtttgtgtttccatggtctccagactgaatgccaaggtggtgagctgtgttattcttttgcgggaggtaagcaggaggatgttcagatgtgtttggacagatgacttgttgttgtgttgagatgtaggtatctgttaagcaggcagatgtgcttaaagctatgtagagggaggagatggtcctggaggatgtagagtggttaaaacgaaaaagggaagaagagataatgataaagggaagggaaggagaaaaaaaaagtgaccatggatttctgactttgtctctgacaaagttctaggacctgtctttttctactacctatggatggggatttttttttaaagtcttaactgtgacaacaaaggaggatgactccatgttgtcagcagacatatggggcaggggtggagatccaggtgcatgtgtgtgtgctaagtcactcagtgatgtctgattctgtgtgacctcaatggactgtagcccgcagggatcctctgtccatgggattctccaggcaagtatattggagtgggttgctgtgccctcctctaggggattttccctagccagggattggacccatgtctcttacatctccttcattggcaggcaggctcttttaccaccagcaccatctggaaagcccaggtaccttgctcttaatggtggggtctggtgaggtgcacacccacctgcttattcctgagtagaaccccatggccacagagtctgtgtgtggctcaaagtgagaatagcctggtatgagagctagatgtttgactgaagctgttagagtagaggtggattcaagctttgtggtgcttcaggctactgatcttttaagaaaaacaatacagaattttgtgaataaatttggatattgaactttggaacagatcatggacgtgagaagctttgaagcttaagctctgttagcttcatggtgagttcctcttgacttgggagacttccaagaagcccaggagaggctcatgggtgttgaatctgtgtgctgtgctatgctctgtgtgtgtgtatgtatgtgtgtgcatgtactgcattgatgtatgaggatgagctaggaaaagtgggaactcgggactgggtattttaaaaattgtgttctatccagcagggagctcacatgaagaagggtcctaagaatatgtgtcaggtcctta

SEQ ID NO: 33727 - DNA, 1107 bp, Bovine  19866880670266
  misc_feature (1)..(1): n is a, c, g, or t
nttgagtttgaatttctgctttcctattacagtgatatatctgtgagtctcagtttcctcatttgtaaaattggcatgaaaaggggcgatccaagcctgtaaaaataggcaaatatgtaataggtcatttatggacagtacactaagatctctgataaaataaccattaacagtatgtttagacttcacagccactctggagtagcatctacatcagagagttgtcttgaagattgtgtgtaacgataaatataaattgcctggcatggtgcaagtgccaataaatattaccaatcatgataattaccatgtttatctctgtgccctggtttgcatcctgggcaaagattttgctcctgtcctcaggtgatatctctgactataggcacctccccaagtttccctgtgatgctatgtgtcaggaggagtccttacacttgaggccttgatgggagcagatggacctgaagaagatggaccaggattcaggcatccagccaaccaactagaggcccagaggagggccctgcagggacatcagacaagtggttcagagggtgcaggggcaggcagggtccaggatcctgcagcagttgagagaggagtacaagtgaatgcaccccgcagttggtcctcgagtgttgattgtggccaaagggagatgaataggagaccagcaggtgaactctgctcctgattgccacatgttcccagatgctgtgattatttctcttccgggaaggggccgcagaagaaaatgcaatgcaagtcaatgtgggtggatgagcattctccaagaacagagagggcctgattctgcctgcaaatctatattctcaaaagcctctccccatccactctttaattagaatggagcacagccttgtggaggaggtgagcagagatgcttagagaagctgcaaaggctctctctggttctctgtatgagagtcagatccccaggggtgagggatgaagcaaagtttggaatgggggggaagttgtttgatgcatggaggcaatgagaaaaaaaatctattagtggtgcttttgagttccttagagaatggttcctgaggaagccaagtaaacaacttcctgatactg

SEQ ID NO: 33728 - DNA, 2298 bp, Bovine  19866880708095
  misc_feature (1)..(1): n is a, c, g, or t
naaattcactgggaggactgatgctgaagctgaagctccaatactttggccacctgaatgcaaaaagccacctcattgggagactctgatgctgggaaagattgagagcaggaagagaagtgggtgacagaggatgagatagttggatgccatcactgactcaatagacatgagtttgagcaaactccagaagattagtgaaggacagggaagcctgacatgctgcagtccatgggataacttagcgactgaacaacaacaacattactcactattagagaagtgcaaatcaaaaccagatcatgatatttttgagaagatgaagcaatataggtataaagcatagagctattcagtgctagggaactgtgagttttcctcttctttcttcaaagagaattttatttgaattttaaaggaaggagattttgagagcaaataatcatcctctagcagctactgagattgcagacctaacactcaggagcagaatccactgtatttgcaaatccaaaagtgagcaagtgtcagcaaatgcctcttttcttgctccctaaaaggtccctactatcccctaaccctgtgtcaactccactaacttctcactctgcatacttcctaagtaggatcagcatggagagagtgagtccaccaactcaatgcctttacccgctggtgctgccctcaggcctggcctaaagtagatgctcaataaacgtttgccaaattgaattttcttctccctggattaatcactggccgaagcaagtagctagcctccagcatggctccagtgtccacaaactttatgagtcatgtcttcaaaagccttgcagcagccacccccttcccttgcctctgacctctcctgcttcttcagcatgtttatggacataattacagcatgctattgatttcctgacaggcgccttgatgtaactattttacagaatcaagctaatttcatacattgaggtttttatgggctctggcagattcaacctaagtagtcacttcgtctcctctttgggcactcccgccccttctcagaacattgcttctcttggtccctccttccctgaagcccagctgagctgcttgcaatccacggtctctgtcttttccttgaggccccactctgatggtcttgtgagttgacagtcatgtcttgagaaaacagcaaggtctttgagatcccaagaagttatggcagtgcatctgggtgatgggggagtggaagatagaattcaattattcctctaattttttaaaaaaactttttatttcctactgaagtatagcaagtaagtacaagtgaagttgctcagtcatgtccaactctttacaatcccgtggactgtaacctaccaggctcctccatccatggaattttccaggcaagaatactggagtgggttgccatttccttctccaggggatcttcccaacccagggattgaacccaggtctcccacattgcaggcagatgctttaccatctgagccatggggaagctgatcaacaatgttgtgatagtttcaggtagacagcaaagggattcagctatccatgtacatgtatccattctcccccaaactctgcccacatccaggctgccacataactttgagcagagttccctgtgctatacagtaagacctttttggttatctattttaaatatagcagtgtgtacacatccatcccaaattccctaactatcccttcccctgttcctcccctctggaaaccataagttcattttctaagtctgtgagtctgcttctgttttgtaaataagttcatttgtatcatttctttttattggacttccctggtggctcagctcgtaaagaatccacctgcaatgctggagacctgggttcgatccctggattaggaagatccactggagaaggaaatggctacccactccagtattctggcctggagagttccatgaacagtccatggcattgccaagagttctctttagaccccccacataaaagggatggcattcaatatttccccttctctgtctgacttacttcactcagtatgacaaatctctaggtcaatgcctggtaggggtcactaagagtcagacacgacttcactttcactttcacttttcactttcatgcattagagaaggaaatggcaacccactccagtgttcttgcctggagaatcccagggacgggggagcctggtgggctgccgtctatggggtcacacagagtcggacatgactgatgtgacttaacagcagcagcagcaggtcaattcatgttg

SEQ ID NO: 33729 - DNA, 686 bp, Bovine  19866880782079
  misc_feature (1)..(1): n is a, c, g, or t
ntgttgtgaaaaaaaggttacggatgatgtaacttgcaccattataggtataactacgctgtgcctaggtttaacttctgctgagcctcttagctttgagtgtgggaagaacccagtatcccagtatcctggaagtcatgttgtttgggggagggaggctaataatacctcgcttttgtcttctgcaatgctcctgacagcccctatgtgaagggtttggcttcccagcatcaggatgaagatgctgtctgtaggttgggaaagagagtgagctgtcacaagttaactgacccttgccatggccccatgctttggacatgcttagacatggctgagtccaggtctgttccaagctagcgcccatcctcacatgagagtttacactaccagaccctggtccacctttcacaagatcatgaagttcttctgatgggaccactgtctcctaagcttatgttaggtgtcaaggacgaaaaccctccatccaggagtgtttcctttgctcgactgctcgaaagtgcccaccaccagagccagtgggatattccaacgatgctctgcaccggccaagtgtaaaccttcaccaagagccagaggataccttcaaaagcagccccagactcctgaggttatggtagactggtgttattatccccatgtagagtaggaaatggcaacccactcca

SEQ ID NO: 33730 - DNA, 1600 bp, Bovine  19866880783812
  misc_feature (1)..(1): n is a, c, g, or t
ntgtttctttattttctattcctgttttgtaaataagttaacttgtatcttctttttgattcaacatataagtgatatccacatgatatttgtttttctctgacttcacttagtatgataaactctaggtccatccttgtagctgcagatggcattatttcattctattttaatggctgagtaatattccattgtaggggttctcagatgactcagtgggtaaataatctacctggagatgcaggagatgtgggttcgatcactgggtcaggaagatcccctggaggagggcatggtgacccactccattattcttgcctggagaatcccatggacataggagcctggtgggccacagtccatggggtcacaaagtctgacatgactgcagtgactgagcacacacacagtattccatggtatctacataccgcatcttctttatccattcatctgatgacggacactaggttgcttccatgtattggctattgtaaatagtgctgctatgaacattggaatggatgttcatagccttttcgaatgcatagtctttgcatgttcatgtctttttgaattatagttttctctggatatgtgcccaggaatgggatttctggatcatatggtaattctatttttagttctttaaggaagctccatactgttctccacagtggctgaaccaatttacgttcccaccaacatgaagtaaaaatttttgattttttcccccatcattaaaaagatatgaaaatgcattcttagcttgaaggctgtacaaaaacagatgatgaactttgattggcttatgggctgtatcttgatgacccctgactagggcattggatgcggcagtgggagtgggggcagagctgaggctgtccactttgggcaagcctttcacagtgaaagagggagccatggaattttgtagagctgggagtgatatggctaaaactggattttcagggcaaagatcaccctccttgatgtagaagaagggaggggctgagtaattctgctttcttgctgaagccagaaagctgctggtgcgactaaaattcttattatgtactttagatttctctctcctctctttcccactggaatattttgcaatcatatagagagaatcttgtctccagaaattgctacccatcttacttgagctgtctccccctttagagtctctggtcacagaattgtagccaccttttctctgaatgactggaaattagacttccaaaagtctttgacacacgtctctctctctctgcaccactgttctctttctcggctgctctgaacagtgagaagacacatttactttcctctaagctcctatgtctctatccatggtttctatcatttccactactcagtaatttcttctaggttgatcagaattaagcctgagagagctgctgcctctgttagctcctaaaccttctgaggatgaaatcgtgaatgaggtgatttaagaggttatgaaatgctctgcttttagcagagtgagatttctgtgcatttgaatcattgctaatgagtcctgatcttctgctgggtttgtgagctaatttgtgtgtgtgtgtgtgtg

SEQ ID NO: 33731 - DNA, 1075 bp, Bovine  19866880792262
  misc_feature (1)..(1): n is a, c, g, or t
ntggtaaagagtccacctgccaatgaaggagatgaagattcaacccctggtccaggaagatcccctggagaatagggatgggaacccattccagcattcttgcctgggaaatcccatgcacagaggagcctgtcgggctacagtccatggggctgcaaaagagtcggacatgacttagcaaatgaacaacaacagaagatggaatagatttcaagatccaaggattctcccccatgatagtggtgttccagacacagtagtagaagagatatgggagggaggggggtgtgagtgagagagacagaacgctagaattaggaacatcaggacagtccagctgtgttccctgcctcctgcctcctggggacatcatgaggtcaagggaaatcccaagcgacagtacaggagaggatccagaggaacagattgtgggtgcagctaggtgtggtgcctggagttgcaagggctgccacgtgagatatgtccaaaccacacaactacatacacagtgggtggagagaaaccccaggtcccagtgtgggctgtcagcgtggggcactgctgtcagcaagaacatggcctgaggtctggatacaggctgtagtccagcacctccactaacccgcatgtgaaactggaccatctcttcctgactccatagactcactttccccatcagtaggatagagactaggatgaggcagaggtgggattgcaaggctgatctgtagccccttcccatttgtacacccatcttcaacatcccctcattgccaggaaaaactgtcaccacagcagcaaacaagagagaggacagcaaaagccagccaagccttcatctgctcgctcactctaaacagaaatcacttaccctaaacggcaatcagtccccgatggcctcctttccaaacgcccgtgtatgacaatgagtgatttgtaacaacatccaatcaggcacacctaaccttcctgtaattgcctgtccttttcagcgttcttaaaagctttccagtggaaaagaacagaagctccttgtcagaaggaggctattatacagaggagagagacagccccc

SEQ ID NO: 33732 - DNA, 1214 bp, Bovine  19866880818868
  misc_feature (1)..(1): n is a, c, g, or t
ngcatcaatccttcggcactcagcttaactttgtcctagcgctaaactcccaacataaaatctaccttagaattagcactaaggatttttacactgtggtcaatgaagccctttaacaggagatcatgccggggaatgtgagggtaagaaaaagtctagagaaggaaaagcagggtgagagggaagacatggctctacagcctctagctgccacttcaaccatgttcatctattataagcatgaagtttccacataaacttgtctttgaagaaaggattttgtgattaaaaagaaaaaactcagagccactctcctagaactttatataagatgttgaacaatacagtgagagtagcctcaacagcagttatacaaaagttgcagagtagtcttcaaatcactgtttcttttatcaacactagacgaaaactgaaggcataatattagatcaccattctctgaaaagacacttctatgggaagctaaagtaatgtattatggatgtgtgtctttctggtaacagaaatcacaaaagcaagaatgagcttagagaatccagaagaactgatggttactgtcctttgggataactctccaaggtccctgtcaggctgctttcaggagatttaacaggttaagtactccaagttaacagatatgttcaattattgagtgaaagggagccattgattttaagaaaaattgaagtgttattaaacacaaggagcccaatttgtatttttctacaaatagaaagtcccctagctcctctccaatgtgtcaaagtgcatgggcgtatacaaaagaatacacacacacttgcgtggaagtgggttgcagaatcatttaggcatatgtgctcagtcacttcagtcatgttcagctctttgcaacactatggactatagcccaccaggctcttccatgggattctccaggcaagaatactgggagtggccatgacctcctccaggggatcttcctgacccagggagtcgaatccacatcccctgcattgcaggaagattctttacccactgatccacctgggaaaccctagaatccttataagttcagtttagtcgctcagtcgtgtctgactctttgtgaccccatgaatcgcagcacaccaggcctccctgtccatcaccaactcccggagttcactcagactcacgtccatcggagtcagtgatgccatccagccatctca

SEQ ID NO: 33733 - DNA, 829 bp, Bovine  19866880839514
  misc_feature (1)..(1): n is a, c, g, or t
nagaatggaggagggagagaaggtgagacgaagaccgaagaccggcagaagaaaatcagcccagcccaggggctggaggagagaactggggagggagacacggaggtggaggtgggggaaggaaagaagaggaagacctggctgggagtagtgggcgtgtggaggttgaactctgccagtcttcatacgccgatggatggaaggaagaaggaaaaaggagaggggtttgtttgtaagaaaagacttggagaggaagcagcttgatgagaaggccaagcagctcccaggctggagggaagttggaggtgacgtgtttgtgattggaaactgggtataggagcagctggcctcccattaataggctttctcccccacccaggtaaccttttccttcgaggctggccggcgctgtgtctcaggagagggcaactttgagttcgaaaccaggcaaggcaatgagatcttcctggccctggaagaggccatctctgcccagaagaacgctgcccctcctgggccccagacccagccagtcccagtccctgcggtgctgccccggccagagagcccgtatgcccgaccccacgactcgctgccaccaccgtcgcccactgtcccggtgcccacgccccggcagcagcgcggactagagggagagtatgcagtgcccttcgatgcagtggcccggagcctggggaagagcttgaggggcgtcctggctgttcctccccagctcccagctgaccctctgtacgacagcatcgaggatcacccgcccccacgacccgaccacatatacgatgagcctgaggggatggccgccttggcc

SEQ ID NO: 33734 - DNA, 1395 bp, Bovine  19866880844039
  misc_feature (1)..(1): n is a, c, g, or t
natggactgtagcctgccaggctcctctgtccatggaattctcctggcaagactactggagtgggttgccatttccttcttcaggggatcttcctcacccagggatcaaactctcatcttttccatgtctggcactggcaagcgggttctttaccactcatgacaccttgggcattgcccttcccccatcagcttgtaagtatcataaaaacaggagcgtgtattacatttctcggtctcagttcttcaaatctgctcctgtactaaatgtccccctagtctgttctgctgctcaaactgggggaggggtctttcctcctttaggggaatgggttctttttcatcatttctctctgaagcacttgtgccttgactgtactcctcaccatgcctcatctacacgtccatttctgcggtcgtccctcctcttcctggggtgttttcaggggcagttttctggaacgtggccgagtagacagttcagcacatccgcatgtgaaaatacatcttcaggctgaaagataagcatatagtcataaatgctgagcagatcttctcattgcagggacgcatacattgtagcataattaagaaggaaggcccgtccttgggaaagatttgcagaaaaggtttataattgcaaggacagagatttagttttaaggcttcttgacttctgtgataatctctagggcttctttatcaatttgtgcccagatgatgttgctcgccagtcaaaagcaattggcttatcagttcctgctggcatctcatggctgagcacaaccccgggtggggttaggtggagcattgctggtcagaaatggtgaattctgtttattataatatcccatgtggacttagagctccataattaattgacattcctggaagcatccccaagatggtgagtccaataccatggacatcttcttaattataggagttacactggttttgtgactgttgttttttaaggaaggaaaacatcctagagatgtgtttgcctcaggaaggctggaagctgttctttagttttgaaaatgagcagatcgtggatagtgaggtcgctgcctggtggcgggagaggcaagcagtggcctttgcagactgtgtggtgtctaagcaggtggcactgagggccaatgtcgcactcctctcctcttcacctaggacgcctgatgtgtgcagaggtgtgggatcctgtgacaccttttgtgggttcaccttttattgatttcaaaatcaggccagtatcagaatatctccacctggagtccttgatgcctggggagttttaggggcagtgcatgccttgacttttagggttcttaactccatcccaatgttcctcagtgagtgatgagggaattttgtgggtccctggcagtatct

SEQ ID NO: 33735 - DNA, 2005 bp, Bovine  19866880853832
  misc_feature (1)..(1): n is a, c, g, or t
ntcccactggaggtttagggtttcaatatatgtactgtggggaaagacaattcagtctatggtagctgtcttcctcaaaattcaacagtatgtcagggtagtcatctaaaggggcttacacccccaagtctcatactgttttggaattgatagggtttggggaggtgactcagagtggggttggggtggcagggctccatgcatcccagggacctgtgctggacttacagaaggacttggcaggctgctggacctctgatagggtagcttctagattccaggagacagagctaagtgatgtgatcttgggagctctaagtctggcatggagggcgtggagctggtgcctttgaagaaatatgttggctgggacaatgggtgtcttagtgatgcccatgacaggctgaagtccagtacctctggcccctcttgtttgaatgtataacccccatcccccaggcctttagttagtatgatcttcacgagggagaggggcctccaaatcatgactaagattgattttttttttttttttggccgattttggagagtgggggcttgtcgtcatgtttagctggatttagacaaatgagtaatgtgacatttctggcaccagagtgttgcagaacaaagtcatacctgttatattgggttgtatcaaacatttttaatctctgtcaatctggtggatgaaactgtcttctcctctgccaccatcaaggggagaggaaacttgtccaagtagggctttcctggttagctcaggtgataaagaatctgcttgcagtgcaggagacatgggtttggttcataatcagggaagattccacatggagggtggcaactgagcccacgtgccacaacttctgagcttgtcctctggagcctggggactgcaacaacagagcccacacaccgcaactagagagtagcacccacttgccacaactagagaaaagcctgcaaagcaatgaagacctaacacagccaaaaaaaaaattttattcagctgccctgggtttagttgtggcctgtaggatctagtttcctgactagggattgaacttgggctccatgtgttgggagcatggcatcttagacactggaccaccagcaaaatcccagggatttttttatattttgtggctacaaattcattctttattattattattgtcacctgcttattattttttcttttttaaaaatttatttatttttaatggaaggatacttcctgcacagtattgctttggcttctaccaaacatcaacatgaatcagccacgggttacaaattcattcttgaatgcacatgtggccaccatctattcccagtccgtgggatatcttttcagttgctcctggagtctcttgttctgatcacaactttttatcttttcaatttaaattaaccctttcctttgctgggggaagccaaggatttctaggggacggcgataggagaaagaaagggtttgggttctgtgggatggggaggcttctggtgggaatgaggacatgcatgtgtctgggctggaaaagctccctcagggtgggggttgtagctgcatgatctcagagtccctgttagtgggtatgttagaggcctagtggaggggagaattacagaaaagctacacaggcttttctctagtcgcagcgagcgggcactcctctgtagttgcggtacatgggcttctctttgcggtggcttctcttgttgctactctaggctccaaaggacaggctcagaagttgtggcgcacgggcttagttgccccaccctatgtggaatcttccctgaccatgaactggacttgtgtctcctgcattgctagcagattcttaaccacctgggctatcagtagtaggttactgcccaaagatccttcccctgagggtgaccatataatttttcatttaatttgggagacttttgagggtgtaagggagcaccattaataatcacagtgggacagtggaagtaaacttggactgaccag

SEQ ID NO: 33736 - DNA, 762 bp, Bovine  19866880859151
  misc_feature (1)..(1): n is a, c, g, or t
ngcacacagcctgtgtatttgtgtatatgtgtgaacatgtgggtatgagagagagcgagaggctttccaagagaaactgagtgggtggctgccactgacgtggtatatgtagacaaatacaaaacatcaagcaattactgcaatcaggcgcagggggtatcttcctgcgtcagcagagctgtctctgctcccccatgcctgctgctaaggagctagtgtgctcagggtctgcaaaggaggggctcagcctgggccaggagggcgctcttaaaagaggctccttgccgggggtggggggttggtgagagccctcctgccacagtgggattgcaacacccgaaaacactgactatacatacctgcattagccccatagtaatttgagccacatagtgaagcttgattcaagccccacctttctgatgcagatcctgttcttctgcccattggctctcctcttcataccctcctgttgtccccgtggatttctcgaagcatctggccagtgaaagagcccctggttcccccctgctcctcagtcagtagtgagagctctggaagaaggggttcattcagcatagtcaggatgtaacagaaccactgtctcctgtgatcagtaagggatgccaggggaagacacagctatccagcttccaccaaaagaccttttggccaattccaggagttctggatatgggtatatcatgactactgttgagtactatttgaatactgttaaaaacaaattctcagtatctgggt

SEQ ID NO: 33737 - DNA, 1084 bp, Bovine  19866880877427
  misc_feature (1)..(1): n is a, c, g, or t
nctaaagcactttattttaatgtaggtataattattatgctctgattggcagatgagcaagccagggtacagagagagacatccaaagaacttggccaagatcacccagcaaaggggaggggcctggatatgaacaaggccgtctgacttcgtagcctacacaggcatctctgtgattatagtgctgaggtggggctctatgacctggaagaaggtggttacctccccctcagtgttccaggcgtccatgtggcttccccagcccagcctctggcctctcccagcaccctctcccttgggagcccatcatcacaacttctacttcctgctctccctgaaccttcctccagctgaacaaccattctggcaattcaatcctgacgctagtgaattatgtttctccaaattgctacattaataagggccgtgtgttcctagaggatcattaattacagacacatttttatttcccactgaaatatggcctgtgtttctgctccatgcagctcaggcacaatcttgccaacgtgcctgtgtgttgcttttgacatctgtctctgactttcctggcaagcagtccttgcagttccctgctctcctcacctttttcctcttgacatgcgtctctttccccaagtgctgagaggaccccacccccattcaagtctggaagggtctgtgaaggtccctgttcctcaaccttttccaatcaaaaccagttgtggttactgctggggggagtataaaaaaacaggcgtacaagggtcaatcagatgatgacctgatgatgtcccttccctagctccaagactttctgggcaatatatcttattggatttaaggttactccaataattgggacattctgagtaaggtaggaagcacaaacttcctcaaactggatctactgagggacctcacttttaggcttgtcctcaaagccttgtaggactgaggcagtaaatgggtgggagcactcttatgcccccatctgctggacttgaagatcagtctggtactgtattcactctcttatgctccagggacaggatctcttatgtatataagccagaaacggaggcag

SEQ ID NO: 33738 - DNA, 1476 bp, Bovine  19866880914362
  misc_feature (1)..(1): n is a, c, g, or t
nggtcggggggacagggtctgtgcacagaacagcacagtcagctctgacaatcatcttgaataagtcattcagtggtctgatcagtgtcatcttgattgttttaagtgcacctaatctccagttccagggtggcttcatttccttgaggccagatcttgaaattttgtacgaaagatcagtttgtgttgtggttataatctggtcatcatgtggttaatttttttcaccagataggggtttcagtatctgcaagacaactcaaagaatatggctcagaatattatctgtagtctaggaggaggaatgaaaagttcttaactttgtttagtggctaaactattattgtgttctttgactgggttcctttacttctgcattttcgctcttttctgattaaattaactctttggctaaagttgtacagacaagatgcaggcagagaacttggggtgggatctgttctgggaatgcctcacagggccctgctcccttatacttctgcctccaaacctttcaaattcattggaacttacacttagttgtgagctgggctggtcacactgtggaaggtcctttcctggggatatgtgccagtatcacgactaccattactgacacaggtgcagccccggacgactgagggataacccatacatccccaggtcctggctggatgttctgcatcaggtggggcctcctcgggtgctcaagtcacacacatctctgcatcctggtgtcccacaccctctcttgtgttgcccgggggcagaacaagaaggcttgccctgcctgcgtgttcaggtaagctgcttcatggttgatttccaattcatccactctattcccttgctggagactaaacaccaaaacaattattgtttaatttcaagtgaaaggagcactaaaggagacatggtgtgaccttttctgtgtatgtatctatagatagagatatatagacattggaatttatttccccagggagagcagtggtaccgtgctgccagctgggtctgcgtttggagctgtgtttgtgtacagtgctatgtgtaatttatttccccagggaagagctgctaagatggcacatctaattcctgtagagatttcttttccttttttctttttttaaaaaataaaccaatccaccccttacccccagaggaaaaatgtctcctccatctagtggccttatatgactggtgtctttgagtttcacaatgccttggcagagggctaggactctggtccctgcagattctctgggatcccaagtcacacagcctctgtctgtcgtcatcttggacggggttgggggaagggactgcagaatgactgagaccaaggacacagagtgccagacttgccctgctttttctcgtctttcttctgtgggctctaagtgacagtttcattcacgcattggcttactcttccctggcactagctttggcctggagttaggaagcagcatc

SEQ ID NO: 33739 - DNA, 768 bp, Bovine  19866880939796
  misc_feature (1)..(1): n is a, c, g, or t
naatatggatatgaaggctggacctccagcagccacctttgaccttaaggtgactttgtaatggaacctaggcacagaacacagaacagaaatagttctgttgacactgtaggatatctaccagcccaggattcttgctcagctagatatagtcctaactagtaaagcatgtaacagacaagtcagatgggagtgagagctaatagcattctaaggagtgcacagtggaagcggagcaggatcgattgactctgcacaggcaggttaaaacaaaatcacagagaagatgtgtgaatgagtctttaaaatgaagtaggatttcctcttctgtacaagagggatggagtgttcctggtaggggaacagcatcaggcatggcaaggcatggcatggtttattcaaggaaggggcagtcccagtattgaggaatgctggtgaattccctgagggggaggggccttcccagggccaaccggcccctcccagccccagcctaaaaatgcagcctcatccccagcaccccctgctcacttttaagtaattactctcccagtgcatttttgtcttacagctgttccaccagctgttgtgactgttctcaccacaacctgtcaagtccatggggagcaggttgctgggtaggaagaggtgacaaactctaaggagggccattaaacacctgctgagccccagtgaaaaggtttaggaggataatatctaggccttgggccttgtaaagaaaactgctcttttcaaaagcacttaaag

SEQ ID NO: 33740 - DNA, 1930 bp, Bovine  19866880969672
  misc_feature (1)..(1): n is a, c, g, or t
nacacaactgagcaactgagctcacacacacgctaagccttaggagggctgaacgtactgcttttatagattaggtgtctctgttgtttttgttatgacctgcgtttcagatagtaatgttttgttattagcattgtcacactggagctcagatccttggagaaaactgaaggtgacttgcttttgttttcttcttttggatcaaatgcctccctggctttttatttcctggagtttcacttctgagcactcaaaagtgttagcgttccttggatgcgagcaccgacaattacatctggagctgttctctcttaatagtctgccctccgtctgagaagtttatcagttctcttggagagtccccaccgtgcattagcatttgatatggatgtcacaatttgcaagcctttttatctttggaaaaagcagagcaaggaaagcaagccagatcacttggtcccccactcggagttgcaaactgattttatttgtgaaactggcttaatttaatcaccaggacgagtgatccaggtgatgttctcatgcaagctggtgacaggccagccttcctccttgctctcccaggcacacatgggaacaagctaaactcacgcacgctgtccttcctccacacacatctacccacaaaggagaaaatgccatctgtgcaatgcgtgcattcgtgctcagtcgtgtctgactcttttcaaccccatggactatagctcaccaggctcctctgtccaagggatttcccaagctagaatgcttgagtgggttgccatttccttctccaggggctcttcctgacccagcatcaaacccgtgtctcctgcttcacctgcactggcaggcagattctttaccactgtgccccctgggaagcacatccgggcagtcgtcctcagcacacactgtagtggggcactttatgtaagggacagagagcagaaatatggggacgacgtaagggcagccagagacacggcaccaggtaatttaacatgaatctcctatatgcttacagcgtcacatcattgacaaggtatttgtgggcacaccatatctttcagtctctcacatctcaagggcacacactgttacttctccttagactgtccccatctgtgcacctgccaacaccttaggccaacgtggccaacttctccttcccagagaaatctctgacaaccccatctacgttaggaacctcttaggacttccctggtggtccagtggttaatatccatgcttctgatgcagggagtactgattcaatccctgacccagaaactatgattccacatgtctcaacgtgaatacaaagtgaaaactttataaataaggaaataaataaattaggaacctctcctgccattattctccatcttaacactctatttgtttttatagcacctaattattttttgtgtttttatttacctcttgattacctgtctttcccactgaatgataaacttcttaaaagaaaagaatccagtctgttttgttcatctgggattaccagcccccaacgatgcctagcatacggtcagcactcaaatatgtgttgaataaatcaacttgattttcacaacaactctgcagctatagccattttgaaaataaagaaactgagatccctagaggttaggtgacttgcaagttgctaatagctagtaagtggcggagccaggattccaatctcattccatggcctgtttacaccacattctttgagatagtcattccctgtgatatgacttgacctctgaactccactatagctcccagcctcaggaaaaggagggagattttgatacacacacacacacacacacacacacatacacgcctttgacctaacccttagcttattagccacaaaggaccaggtgggaatttcactctatcatatgtgccataatca

SEQ ID NO: 33741 - DNA, 1636 bp, Bovine  19866881091038
  misc_feature (1)..(1): n is a, c, g, or t
ngcttgagaggcaggcttccatctgagccggaggacgctgagcgcacgctgccttcctaggctatcctgcctcttatgtgtcatgataatgacttgaaagagccaataccatgagacacatttgaggggtgcacacatgaggtgcagttggagttccacaaaaatagttttcctgggcttgggagggagagggggcttcctggaggaggggtgctggatttgggttgtgttgttgtgtgtgtgctcatttgtgtccaacttgttgtgactctatccatgggattttccaggcaagaatactgaagtgggttgccatttcccgcccaggggatcttcctgacccagggatcaaacccacatctctcctgtattgcatgtggattctttacttgtagtgccacctaggaggccccttgagtctcatgaaagggtgcaattcaaacaagtgaagggaaggagatattttaggcaggaagaaggaaattatcagagacatcattttagagtaagatagagatgagagagagtgcgcatgctccttgtttgtgtgtgtgtgtgtgtttaactgcagcgggtatgaagaaaggacaaggttgcagtccatccaatatatcccctgccattttgttgggaggaggtctggcatgtgcatgtccagattcttattcagaggaccagcactgcagtagggagggcctgtgggcagatgggggcaaataagctggatgacagtgactcctctctgatcccaccatagacttgctgcgtgtgatttctgctccttttcctcgcctctctaaatgtaaagtgcctgcctggtgcagactgtgctccctagctttcttcagctgtcatggtattaagtgtaaaaaaaaaaaccaacatgcatttattttatgttatttacaaactgtaacattcagcctgaaaacaaattgagatttctgggcaaagaggcagcgtctgatgttggagtgagatttcttgtcgttctgagtcagtctgttcttgcagatgcctcagagaaggcggagccacctgcctggtggtgggagggaaggctatgtgggacagggggcgaggaacggggtacccagaaggcaagattggacagtaaagcctggagtgctgcgtttccaggatctggcttacccaggtcaggagagcaccatctggttgcaattaatgaacagcatgagcaatggtgatgctcctatcagagggcctgggatggaatgcagcctgtacccaataatgtgtgttgtgttctttggtgatgctccctgtgtctccgcccatctttccttcctaagagattctgacccactatctctggcacgactcaggtaacctcccatttctcatttggtgactataacccttttccccggtgggaagccaagaggggagaggaagaggagataggaggattcatgttgctacaaaattctatggctaaaatcccagagcaaatggtgtccatcgctccttttaggtgttacccatcttgagtcccaagctttcctgtgttgccatgaaccgtgacatccacctctacccaaactctgccccacccccagtcctccccactcatagaggtgggctcctgagcttgactcatctactcagtgcacat

SEQ ID NO: 33742 - DNA, 1253 bp, Bovine  19866881096100
  misc_feature (1)..(1): n is a, c, g, or t
ntagttgggggtctcagcaggaaacagatggcacactcaagctggataattgaggagagtttaatgagagtactgttttaaaatatgtgggaagggattaggaaaaaccacaagggataacatgtatcacttccctagacctgaagaggttggggaaggagacactgagaaagcagaaaggaccactgtgtgagaaggtcctcttaacaaaatctgcaacaactggaggcaaccccacagggaacacatactcctagctcactctcctcccactcttacatcttctgttggttcatcccattggctaaacccaacctgaagccaaagggaaggggatcaggtaggtcaccctcccagcacagagcagggtagggtagagatggaaagaccagtaaaggatttccagccaggggaccaggatgcaagcatcacagatggtaagtgcaagggacatcaggggaagttgcagggttaggggccagttccgaggagacagggataggccgtggttcctagcagaagagtgggttctaagggaggagaaccctttggcttagacagcagagtcaagggcagatgccctgagcaaactcagacagctggaagtgagttgtcccccagggtcaggatagacttccatagggaatctaaaagtactcctttcctccccagctccaagatcacaaaatcccaggcttccttcctggaagggcaaacttgaacaaggccccacgaggccttagtagggtggagaaaatggataacagttgatatctgatactcccgtggtgaggtctgaggcaaagcaggagatgtgcttcatggtctaacacagaaggatacatggttctagtctctagatgaaacctgagagagtaaaggtctaatagaaatcagagtaacaactagaatagtcctgagtatgagtatggtaccttgcatgaggtcttcacgtagattgtcttaacaatgataagagggaacagaaggaagttggagagacaagtaacaagcacaatgaatatcaaatatgtgctagacattgtatacatggcatcacacactatatgtgttcacagttccattcttcccattatacagagaaggatactaaggatcaaaggggttaagcaatttgtccaagctggaaagtcatgaagtggaatgggaccaagacccaaactctgattctacatctctgtgtacttaccacactcatagagagagggccatgcaagtcagcatcagatagg

SEQ ID NO: 33743 - DNA, 910 bp, Bovine  19866881102293
  misc_feature (1)..(1): n is a, c, g, or t
nctctttgagttgggaaagttcgtaaatgtcagtccatgtgtgtgtccaagtggctgccctgaatggaggctcgtgtagacatgatacaccttcagggcaaaattcagagccttcacgccacacaccatcccctgcctccacccagacacacaattcaggctgtctgagcttctgactttgaacccagccccagagaagaatcaaggccttcagagtgaccccaggtctccccctgatgccatcctcctatataagccacgagaaggtggcctcaccaaaggccaggccctgtcagcttccgcaggctggactggctgggactcaggttctgatcttctttagagcaaacttcagacacgctgccagctgctcaacacagcctctggcgccttccctccaggcacggggcaaagagcactgaacggggctcccaggctacagggcctctcccagcccgactactcactggctgagggagccccactccatcacttaacccctctggccctcaagcttctctcagggaatccagatgaaaactactgccagcctgcttcacacagtcccgcgaggaggaaatgagatcaggctgtgaaatagcactttggaaacacagaactccacgcctatacctcgggtaattactgtagcttcaggagggtgccccgaagccacgtgcttggagggcccataaccccgggccagactcagtctgttccctgcaagggtctctcctacggccaggtagaacaacataatgactgggaaggtatccttgcctgaggtgaggaggctggccacccagcacctgcctagaccccaggttcttccactataaaatgagggccagattgcctcacctcaaaggcctcccccagttctctgtgctacaaggcatatagaagtaga

SEQ ID NO: 33744 - DNA, 1514 bp, Bovine  19866881112468
  misc_feature (1)..(1): n is a, c, g, or t
ntacaacgatctcagggtcagggcaggctgtgcaggtggaaacttagaaacacagcgttgtttcttctgcacaaaaggagagagactagtataaggagccctcctgaccccaggttcagcatctcaacatctggccagtctgggggagctttgatggaagggaccatagttaagaagaagaatgcctgatatttgtatagaatattattaagtcctatacacaaaagccttttgcataaagtatttcgttcaattttcatagtaacccatgaagtagacattgttattcccattttagagatggaaagagtgaggtctggagcagcgaggtcacttgtcttggatggctctgcactggccctgggagttctggctaccaacccatctctcttatgctatgaatgctttgaacagctgttgttaatgcttctctaccactcattagtgggatggtcttgcgtgatccctcccctgctcctgggctttgcctttagttgaccccgagaggcctttccttggcctggggaacgtctgaacatccccctgggccctctcagagctccgtgccatcattccccggtgtgtcctacttaatgggaagtggagcagtttagaaacagcccagaaagcagagtgaggcagcccacatagtcccacagcccccactccaggtgcccagcgctggctctggcccaccggctggggataggagcccccgggaggtggcagtgatggtgaatgggccaggagaggcttccctcatttccacctagagttcattttggctgctggggctcaaggactggagacctggtagcttaagagatgctggggaagaaaaccgggggatttctggaacttcctctggggacactcagctcccagccagcactgaaaccagcttccagaaacagatttcttcttttttaagctactttttctccccacggtgacccacttttgtagctaaggccccaaaggcactccagtcacctctctgagtcattttcctgaagcatgggctccctagccagtccttactccctgcacggtggttgggaggcaggaacacccagcatcttctggggtgggggtggggggcccaggggcttagggtgcctggagccaccacttacttcctcaatctgaagccctggctgggttcctgagatgctaatgggaacgtctgctcctgagttctccatgactggcaggtgcgtttgggagatgaccatgggcgagaggggcacgacagacaaggaagtgatgggtcctgccagagaagcaccatccaaggcccattcaacatctccatattgactccctccctcaccatccagccttggaggacacagaggggctcgtgcagctgcggtgcagctgggggcttgggggcagggtgggagttgatggtaattcctatggcagcaggtggagagttcctgcttctagatgagaacagtggtggtgctagtagtgaaaaagaacgggcctgccaatgcagcagacctaag

SEQ ID NO: 33745 - DNA, 853 bp, Bovine  19866881235013
  misc_feature (1)..(1): n is a, c, g, or t
nctttgaccgagtccactgggctgctgctggtgatgagccttcgcgatggtccacactccaaagaggatggtgcccctggctctttgcagaaaagaggcctgggtgacacagagctatagagtctctgaggccagctttgaaaaaaaaaaaaaaacaagaagctcaaacatccccattagggtttctctcttgtttccccattaaatcagagagagaaaccagtgtaccgtgtcaattcttacttttaaaaactgggttcagcagccaagagcagatgagtgttggtaactggctaccctaaaggggctgttgaggggaccatttcccaggagagccatcccctgtttcctgttctctggggcaggtggctccagcctggccctgagcttcctagccccctgtccccatgggcatggcctccggccagcaggaggtggcctggccccacccagcagtggggtctccctggccctgtggctgggttgatcaaacagcaagagaagatcccggaccggagcaggctattagctcctctgaagagaactcccttaatcgcataaactaaccacactgtttattgtgcaaacttggactgaagcagcctcgcagaagggggttcataacaagggctgttaatatttatggctgacatcgcgggttcctcgagtcactataatgagcccattgcagcctgagtggctgcaaccttccagcagaggcaaagaggaggagaaggaagcagaggggagaccggatggtgcctgccttcctgatctgcacggcagggttccttccagtggtggaagtgtctgctgaacacctgctgtgtatgagacattcagccatgtgcta

SEQ ID NO: 33746 - DNA, 960 bp, Bovine  19866881299888
  misc_feature (1)..(1): n is a, c, g, or t
ncctccagatgaatgaatggatcactccagcctgcaatcatgagtctggggcctgggctttggtgaacagtcagtggccctgacattgaccagaaatcaaatcacgagacctggaccatgtcttcacataggaagcctgaaagtttacctgcaacatggaaaggggaggctggagataatggggcatgggtccctcagctctggatatgctgattggatggaccatggcagcagctttgtccttgggcccctcccaactctgatccatggctttgtcaaatttcttcatgaaaggcaagatgaaggcctgttaggatgtttgcttagagagatctttctctctgtctggatggagaagcagggaccccattgcactggttgtcaagtgctacagagtggtcatactggaacctggaaacagaaatacatcctgctggccccagatgtcactttcctccaggattttatagtccaccacacatgcccatctcttctcccctcttatttctggaaagaaaaacattttaaaaaggcaatttgctgggtcaaagttagcaatgacttgttgaattcaacagatgctctcaagcatctataccactggaagccttgctgctgctgagtaacttcagtcgtgtccgactctgtgtgaccccagagatggcagcccaccaggttcccccatccctgggattctccaggcgagaatactggagtgggttgccatttccttctctgggaagccttgagtaacatgtaaatattcccagtagaggaaataaaggggtgaagaagataaagctacactagagaaacaagtcaatggagtcataagaacagggatcaccttagctccaccgggttgattattaacactcagatccttatccattcattaggttgacaagcactgtctagtgacagggtaattacccagtcctgggtaattagaaaagtaaa

SEQ ID NO: 33747 - DNA, 1251 bp, Bovine  19866881344152
  misc_feature (1)..(1): n is a, c, g, or t
ntgtgtgtgtgtttgtgtgtgtgtgtgaagtggggttggggtggggaagaaggtgtccttttaccctcatagaggtttagttagcagctgtttttcaagggctttgaaggccaaaagctgtggaaagaagctgatttctaatcttatctgtcataacgcactcaaaacaccaatcacatgcctttcgtcttcccgtcttcactgttaatggccacgtctttctctctctctcggccacagactctctgctgcatctcctgccagctggagggactggagggggcccactggccccttcttttctccctccctgatcaggagaaaggaggtatgactgttctcctgggggcatgggacaggtgataagcggaaagctatagaccttgagccactatcgctttttgctttctggccttctgtttttctgtctgtaaaatgggcatgatcacacctgcctggccttcttcatggagttggtagaggaaagaaggagagaacaggcccagaaacatgagctgggagacagccccataggctcggcagatatgccctcttctcccatttccctttgccaccagggagtggtgggggcctgaggagtggagtccctgcccctgggtggatccttcaccctgcagggcaccccagctgccgtgctgtctggcccacagcttaactggcccctgcacgcccctctctgcctagccttgtaaattgcctgcgctgaattctgcacacacctcagtggaaggggaattatttgccagatatacggtgtctgtgagaagggcctcttatgagtcagtgttcaaatatgttaccagctcaataaacagaggtttgttgtaaattaagaaaaggaagcgaggtgcctgcaacagcccttgttcatctactgttttctattagcgacgctttccccttaagtagcacataattcccggtagctgctgggctggcagcttggaaggggggatgtaattacactgcagttgttaggtagttagagctacacaataaggtccatagagagaggcagggacagccctggggcggggggaaggggttggctgggctccccaacaggatcagataagatcacagttgcctgataatctcagggtgacgggaggagcagcctgggcacggcagagggcagatctagaaaacaaggctctgaccctcatcacaggaagaggtggatggtgagttcatggcacccgtgggaaccctgcaccagctaagggcagg

SEQ ID NO: 33748 - DNA, 1516 bp, Bovine  19866881385113
  misc_feature (1)..(1): n is a, c, g, or t
ngaggagcctggtgggctatagtccacggggatccacaaaagagtcggaccccaacttagtgactaaacaaccaatggacctaatgatgatatataacctgtatcattaaacacttaattgatatattttctcctgaaagtctgaattcccatggaatgttcattgatcctaatgacaacattttgaaatattgtttaagcaaagtgaactgtgatttactttaatgcttgagaagtgcagtagagataacagctgaacctctttgtggctgtcctgctaggagcatgaggaaggcctgagtgcccatctgctagggttgctgttgaggtatttacttccttggataagattttggaagcaaatacttgctaacaccctttagcaaaaatcctcactaacatcctttccaactatatttttaaaattagaatctgaatatttatggaggtctttctgagaatgtacaaaaccctgagagtattataatgcatagtttaaaaaacgcactttgttatcttgccacgtatagagtagcatgggaactggtgtccaaatatcccacctagttgggatgttgcaagtcaaaatgctaaggatcactactctgtgcagagttagcagaatggagagggtaagtgactctcccagcttgactccccagatctgtagcagccttccagaggatctctggactctggctgctgttagctggcccatcttcttaaaatctgcaacctcgtaaatttgccagcaaaactgaacaagcacatgttgcccaatcctgactttaccatcggcaaggagaggcataaatccctttacatctgtgcctgaagctcttttgcacttggatcctttctgaaagtcactattggctctttgaaagaaaatatcttttctccatggtcttctccatctttaatagacatgtcatcccatgcactagtgaagatattttagaaaagaaccttcttctttgaggttggcattacctcagggaaaaggggtcttcttagatgatgtgactatagaaaaattcctatgtaaaacgcggctggtacctacctctcctgatgaacaatgctgcaaatcaggcagggcttttgcaatatatacatatggaatgaggtttatttatgagtgggaagaaacctataaagaagagttattaagtccaggaggaactgatttatgtcatagtaaaattcagactatagttcagccaaaggaatgacagtctctgacaggtgtccatgaataaattcaccttcttctaaagcattctcttctctttgctagccactggccaagttctttagttgacttgaggacttttcccttcctgcccttctcctcattttcctcttctccgtgatctttatagctccaggaggtaagaggaagagggtcacctgaccagcacccttgagaaagccttggggtttttcatcactccaggcagattttcagagcctgaaacccaagctgttttctcttcaggaatagtgaagtctg

SEQ ID NO: 33749 - DNA, 1398 bp, Bovine  19866881389911
  misc_feature (1)..(1): n is a, c, g, or t
ntggtgttctttttgtgccttgattctcacctctctggaatgagaatgcaggttagggtgggaatgatggttaaaatctaggaggaagggagtctgccttcccactgtctgtcttgaaacacacatacgcacacacacacatgcaaaacctcggagagtgcgagaggccatttggagcgatttgaaatctggagcccttggctatttaatgtttccagcaatgaactacatgatgaaacagagagcacgctcattaatttcatagatgacacccagctgaggctggaggggcaccttggaggatccgattagaattcaaattgactccagtgggtcttagagaatggtcaggaaccagccaaatgagattctgggaggacaagggcaaagcgaggaaaaagcagccacacagatgatggggaggaatgacttgctgagccccagtcctgcctgaaaccgaaagacttccgtgacctctctgcctgattcattaaggctgacatctgcacacagcttacaatgatacaatgaacttgcactgttctttcctttgagcctttgtgacaccttccctgcccacccccacccccccccccagcccaggagagaggaattgttatgaataagttcacagggctttcgagatgttaaaaaatctgcctaaggccacacagctgataggtgtcaaagtcagatgcaaaccctgtgagcactttccggggctcctttgacatgaacagaaggtattggctgtgtcatcagacctaaggtacagtcccctgatccttccccctgcccccaggctgcctcccatcccctttcttgtgtcatgttctcctctgggtggccaagatcctaggggtgtatctgtgtaacccagttctaatcagcaccaattctgatcaaccgcctgaatgttggatgactttggaaccttggatgaatccaacttccctcacctggctggctgaaagctcttggagtgaattacataattaggaagaggatggagccactacagatccactgcgcaggccctccattctgcttggcaatagcttttatgtgtctctggtcagttcactctcctcaaggtcctcacctcattattggcctcattgttattattctgttgaagagaagatgagggttatgggacaaaactgctctcagcaactttcaacttgtctaagttgacatcacctctcccctgctttcctccaggctcagggcaagtggatgatgccgtccacttgcctctcctgtgctcatggccttcctggtcctcttttcccaacatgcactcccctgaggccctccccactttataagttccttcctcataggccttcaatatgttccagccaatcctggctcatgaaactttccctggatggg

SEQ ID NO: 33750 - DNA, 1803 bp, Bovine  19866881598159
  misc_feature (1)..(1): n is a, c, g, or t
ncctctgtcggctgcttcgaggtgattagagctaagtatgggtctcagcaaaggcgctgtgtgccagctagcaaacttcaagggactgtgtgggcttgaaaactggacagtgtcatctgaactgaagaccagagggtaccaagcaaatagtctgcactttttaagattttatgactcacaactcaaagcaggctagagcggaggggaatggagccccagttgtggctaagattgaattttccattggcttggcaggatgtgggtttggaagaaattaaagagttagagggaagaaaactttctttatatctcatgttatatgtagagtaaaattcatctccaccaaatagaattgagctctgtcccacacacaacccaacctcactcggattatactttttggttaagttcctgcatgacagctggcagcatcccagttggttcagatcctgtgctgagcttccaaacagccctgaacagcccagcctggctggtcccagacattccaaggcagatctacctttaaaatgcatgcatgtgtgctcagtggtggccaactctttgtgatcccatggactgtagcccgccaggctcctctgtctgtggggtttcccaggcaagaataatactggagtgagttgccatttccttctccagggtatcttttcaacctggggatcaaacccaagtctcctgcactgcaggctttaccactgagccactggggaagcctgaaccatcgctagttagaagttagtatttcatgggttaatcccttactatattgtggctttataaggtcagagtctcaaagctttgtcatgaatgctatcccccaagcccctcagctctgagccggcactgaatgctcaaaagccaccattcctgcctcaaaattgcaaactagccctcgaacagctttgttttgtccctgtttttgtcatctgtaaggactgaatctgatatgagattacaaagtaataagactgacttttaaacacatcacagatcctatgaatccagatgagcgctggcttttcagtgatttcaccatgggaggctggccacacacgtattacagtgaggctgtcactccaggcaccaagactggaatttctctgtagaaattgcctgcggggacagttagacaattacagaggaacacagaaaatcagtcccaccactcggtggcactaatggctctcaagtgtggttcattgttcctgtgttaagcctccccagcccatgtcctcttccagggcgcgtgtcttagacatcactacgtagctccggcaatgtacagaatccagtatgcaggaagcacttcataaatgcttggtaaataaacagtgggctccttattggtccggggattattttttttccttccccctcttttttttccaccttctccactgttgttgttgttgttcagtcgctaaggcgtgtctgactctttgcgaccccatgcactatagcccaccgagctcctctgtccacaggattctccaggcaagaatactggagtgtattgctacttccttctccatgggaatcttccagacccagggattgaacatgtgtctcctgctttggcaggcggattctttaccactgagccacccgcgaagcctgtcttctccattaaatactcattatttatccatatcctctttttctggctgcagaagtcacaacaaaaaatactcaaagagggaactagaactgaccacagagcatagagggactgaggtttctatatccatgaaggataggctgggctaggctatgacatggcaacca

SEQ ID NO: 33751 - DNA, 1741 bp, Bovine  19866881637996
  misc_feature (1)..(1): n is a, c, g, or t
nctctataaatccaagacactgctttacaactgcttgcccaccatggcccacacttcgttggtagagggccatttctgcacatcagatcatcggtgatttacaggaggatggggggtacttttaactcagttcaggccttttaactcagttgcatgccaccaggcaaaataaatggaaggttctaaaaattaatgaaagatcgtgtgcatgaaaggatgcagtatacagtagacactcaataaaggcttgtttagtttcttcttggctgtcttttctttattggactgagagtccccagctgcacgaagtagcaggcatttcatcaatgtttgtacacaccctctctgtgggctaaatactgagcaaatcagctttttaaaataaatactacctccatttattttgcaaaagacttgctgacaagacacccagcagcatctgaaatttcatctagacaaagagggcagggacaaggagctctatttttcccattccgagcttcccactgcattcctcccacactcacgcaggcacacacatcccagcacatgtgcgccaccgcgataaggaggctttcaaacgcgcaattcatcaccttggccccggatggaaggagagtgtgtgtgtgtgtgtgtgtgagcgtgtgtgcatgcacgtgtgtcacactctcgcatgcacgcactcccaagggcctttgtagcccctcctctgacacaatggagtgaaagcacagagctcacaaagggagaggaaaaggaagggaagtgaagaaaagtgcccacttcggctgcctctgattctggctgctccatctgagcctgttaaccagttaacgatatgacaaagaacagcaggaaaggagagaagcttccagcctgtagccctgatgcaggagaaaacaaacattaatcacagcagtccctgtgggagcaggggtggtgccctgatgctctttacggggggattcatgaagtcacaaagtccacggaggcagccaggatgctaatatccttccccagaatcctccgggaccctcaggccagccctggctagtgagactcagccttaccaggcacccgtgcgcgtacacacacacagacaaacactctccagcccccacctcggcttcactcccagagctaaccactcactctttttggcggagttcttgggaaagtgggaattaaatgaatccacatttatggaaatccacgtggtgccaggcacttccattgggttacttagtgtaagcctcacaagagcactggggaaatatttttctggttattactccatgtgtagagatgctgaaaactaagatgcagagaaggggtgtggttttggtttccaggcacacccggctgggaagtggtgaatggagaattcaaatctaggtgggttattttttccttttattggatgcccaaactagtgttttttccttttacagcacaactggcattcactttcggccacagattcctggatcctgtatgatacaagagttctgggtaggctctaggaatctgcattttagtacaaaattcttttttcctttattttactatgatagcttcattaaggtgtgattgaactacgataaattgcatatgtttacaatttacatttgagaagttttagcatttgtatacaggcttcccaggtggcacagtgataaagaatccacctgctaatgcagaaggatcaatccctgggttgtgatccctggcctgggaagat

SEQ ID NO: 33752 - DNA, 796 bp, Bovine  19866881907154
  misc_feature (1)..(1): n is a, c, g, or t
ntgcattggcaggcacattttttaccattagagtcacctcaaaagccctaaaaatgctagttacaagcccacaaaatagaataaacagaactgaatctgtttgggccatgtagtcttagctagttatctaactagttatgtttgacaacaattgtcttgatattcagatgtcagcagataaaggagttgtcacaaatttcccaagacccttctgaggagggaggaaggaagctggacccataggtgcccatcacagtgctgctgctgaattctgggtgtgtgtgtgtgctaagttgcttcagtcatgtctggctctttgcaaccctatgaactgaagccctccaggttcctcagtccatgggattatccaggcgtgaatactttagtgggttactgcgccctcttccaggggatattcccaatcccgaattgaacccgtgttgcttatgtctcttgcattggtaggtgagttctttaccattagcaccatctgggaagaccttttgggcagttgtggaccaggccagtctttggtctcttggaagaagggtgtatctcttccgtgtgtgagctgccaggatgcacagctcagaaaaccatacagaataataatagtaacattaaacacaatccttctgttggctgaagtgtgatcatttcccgtgtttttttcagtgaattaccttatttataatcacagaattatagattattgtgcaggaaagaatagtagagaacatctaattcaagctatgcttttcacagatgaggacactgaagccaggagacataaagt

SEQ ID NO: 33753 - DNA, 1462 bp, Bovine  19866880387113
  misc_feature (1)..(1): n is a, c, g, or t
ntactttaccaagatattcagacttatacttggaaaactacagggaaatgaattcaaatgatttatatatagagatgtatttaaaggtgaaaaaacagttgagaaatactttcctatttcttctctctttcaaatgaattctaaggtaggttgctaccattaagtttattatgtgtaaaagatgatttaaataaagagaaaattatcaaactgaagtaatattatcagaaagatctttgctgattcattgtgatttttatatcatctttttcattctcaaaattgactataaacttttatattattttatattttaactgatgattaaatcaatatttagtgaaagtattttataaacaaactatctaaatattttatatataaaatatggatctgccatttaattaggtttgaaaggaataaaatgaaagggctcattctttttgttaagatatttattagtggactatataaacacttcaaagtattgtgttttaggtaacaacagagtaacactttatcactgtctcagtagaggagagaaaaatgaaacgaataaccttttcatgatcaatacctttgcaaaatactaattttccttcaaatgccataaatcatgtaaacagagtgcattatattgttgctttgtatcattcatctacttaattctatagttgttttttcatgagtgaattattttagtttattcatgatttatctctcacatatattcaataggacaaaaaagtttccatcaactagaacatattaatgacttccatttagcaacaaatttagaccataccgacagtcaaagcaaaaatgggaaatcactgagttatataatctgggaagtactcagaaagaattgtttttagagacattcatgtatactaccattaaaacaagaaacaaattaataattcaaatcttagataagatctatatcatttaaatcacacaatgttctttaaggaattatttcacttcattaatagtgaaatttatgtggaaatatacatatgatatagtaagacacagagataggttacaacatatgaaataaaagatggtaagtctctcaatgaaataattttataggggacttcaacatgtcttgaaattcgcctaactcaacactgaagattctaacaagagactaaattacaagttctgtaattttatttataaagcaaaaaatgttctttgaaagtagacctagagagagaaaactgatataaagtatatgccagacaattctacaccctaaaaagtagtaaataaatacacacaaaagtgagttgcagaatatatatacatacgtatttttttcctcatgaaagaacttaaaatggtcccacagtgtgacaaagaatctggaaaaatttggtgatgattttgttggagatattttaagagcatgtgaaaatttatgtctgaaaatgaatgtttattaaaacat

SEQ ID NO: 33754 - DNA, 741 bp, Bovine  19866880398428
  misc_feature (1)..(1): n is a, c, g, or t
ntgcataatgagcgatatttataaaagccaattactgctaatatggatgaccttttggcaccaaataagctaataacctttgaaatggggactagattacatagtgctaaaacaaaacttaggtataatagaaactaggcccccatgcatacataaggatgaaggttattttctattttggctgcactcttaaagatctattaatttgatatgagatttgaattcaaaatcaatgccagctcattttcaaatagggaacattagaaaagaatgaaagcgccttcttcttacaaataatttctaatggagcaacattaaccttaacattaaataccatgattctgacattttcaaaatatttctttgctaaaggtcatataaattttatatctatagccaactataagattttaggggacttattgatccatatataataaatattaataatagtgatcaatcaggttgaaattcacttatttttttaagtaggccaaaatataatgtctccatatacttgattcacatttttttcatgtgctataaaaactaatctattttacctaatgctagtagagcaatagttcattttattaaggtactttcatttctgaatattgcactttaaattgtttattttctggtatatatgatttaatagccatgatgtaatagtgtaatagaaccacagaacctctgtgtaatatagcaggggaagtactaatacaatgtatactggaa

SEQ ID NO: 33755 - DNA, 2359 bp, Bovine  19866880523948
  misc_feature (1)..(1): n is a, c, g, or t
nttgtttttcctgattgtatagggcttcttcatccttgggtgcaaagaatataatcaatccgattttggtattgaccacaggggtgatgtccatgtgtagtatcatctcttgtgttgttggaagagggtgtttgctatgagcagtgtgttctcttggaaaaattttagcctttgcctgattcactctgtactccaaggccaacttgcctgttattccaggttctcttgatttcctacctttgcattccagtgcattccagtccctatgatgaaaaggacatctttttttgttttgtttttttggtattagttctaggaggtcttgtagatcttcatagagttgttcaacttctgcttctccggcattagtggatggggcatagacttggattgctgtgctgttgaatggtttgccttagaaactaatggagatcattctctcatttttgagactgtacctaagtattgcatttaggactcttttgttgactttgagggctactccacttctcctaagggatttttgcccagagtagtagatataacggtcatttgaattgtttgccctttcccatactttttagttcactgattcctaaaatgtcaatgttcactcacaccatcttctggttgaccacctccaatttatcttgattcatagacttaacattccaggttccaatgcagtattgttcttacagcatcagactttattttaccacctgacctatccacaactggcagttgtttctgctttggctcagcctctttctagtattatttctctcttcttccccagcagcatattggacaactaccaacctgggtggtttatctttcagtgtcatatctttttgccttttcacacgttcatgtgattctcagggcaagaataccaaaactgtttgccattcccttctccagcagaccacattttgtcaggccctgactagtagggacatgcccttcagtcactctacgtagctggatgacatgcccagtgccctgattgtcctactgctggtcctcattgagtgtataaaccttcaccagctgttggatattggtcaacatgctgcccgggggccaaggcagaggccctgctggagtcacagagaagggaatccagggaaggctggagctgatgttggagtatgcccatgagcagagggcacccagcctcttcgctgccattggccaccctggggccaatccgtcacccaggagtgtagggaaacagtttttctactacctcagaaatgtactattctaaggaaagctattctagacaaaatttaaactaataagtgaaaacttggccatgatgtacaaacaataaatccaatcccttgaagtaatctttcaaaagtcaaagatcttgcataataaatgaccagaaatgtttttctgtacttgcaaggcatctatcaacttgattcaaagagtttatatgaaaaatgatccaaaatcagatattgtctgtttttcatcttatgccctatcatgccttaacttctatttcattttgctctgaaacatttcactagaaataattcattctagcagcaactcactcggtaatctctgaatctgtactctatttaggatgtgtaatataaatgaagacaggaacacacccatatgaataaatctgttaattggtttatagatcgacagcccccaagtgtagatcacaaatctgtatgatattcctggacctacttccacattcagattcagaactggatgagagatgggtgtaattacgtggagccagatggctctcttgtgactacacatttacagaagcttttgcaggttgtttattccaacaaaatttggaataactcaacctcacatgaggtttttctgattttttaactgaaaaacagaggaagtactttgtttacttaaaataagacatccttgagcacagaacatgtatatttatagctatttcacatcaaatgctttctggaaaatgttaagttggactatacttttgtgcactgatttttctcatttttgatgatcattgcttagcacttgtgaatttatgctatgcaattaaactgaaatactgattattaagtgggatcaaattatacagtttttgaatgtgtagttaaacacaacagtcaacaagacttacacaatggttaagtcttaaatacatttgctattgaaatatataatgaagactcaaaataatctaaattgtctacaatttattctgaaatatattttctttggtgggagtttggagttaaatttcatttttctggttatttttggattatacttatcatttaaccataatcattatttttcattacatatgtagtaagggttcccttag

SEQ ID NO: 33756 - DNA, 1073 bp, Bovine  19866880619500
  misc_feature (1)..(1): n is a, c, g, or t
nctaaggtttttattctaatcttttgtatttaatgacacacactcgcagtcttgatttcctgtaggttttctgtataactcaacaggtgcaggatctgcatagtttgttccaattctaatgtagaatgggcacagcatggaggtgaggttttatttagaataaattttaccatcaaagagtctaattgaacagtccttatgctggcagaaatttttataaacgtgcaaggttttattatgatacagttgtatgtttgttctttgtcctttctgatttaacttgttaaaatgtcttagatttggactagttatactagatttaagtaaaatttttcattcctgagtgtgtgagcatgaacctgtgtgtttgtttatgtgctgcctatatgcactcaacccataaatgagactgggttttctagggacctaataaaattgggggcaagagcatacaaaaaagtaacaatcatgcaagagattgcatggttggaacattttgaggagtccaaaggaaaacaattctgtgtcttgaaatggataaggaagatcaatgaaaacggtaggctcctgtgtattgaactgaaaatgaaagttggaagacaaactctttctctcatgctagagctcagtcatgtctgattctatgtgaccctatagactatagcctgccaggcccctctgtccatggaatttttcagtcaagaatactggagttggttgcaatttccttctcaagggcatcttctgacccaggaatcaaacccaagtctcctgcattggcaggtggatttttttttaccagtgagccatctgggaagccccggaaagcaaagatgagcacaaatagatcccaggtagagaagaaatagaccaaagaagccatgggatgaatttacatgtcatctccatgtgccagcaaatagttttccatgagtgtcaaataactgaaggtcttcaagctctaagtcaactgatcctgatgctcctacctgcaacttatacacacaatttggtgacagaggaaaaaaattacttgtagagtgcacagcataggcaattatgtcagagaaact

SEQ ID NO: 33757 - DNA, 2080 bp, Bovine  19866880631073
  misc_feature (1)..(1): n is a, c, g, or t
nggatggaggagcctggtaggctgcagtccatggggttgcgaagactcggacacgaccgagcgacttcactttcactttccactttcatgcattggagaaggcaatggcaacccactccagtgttcttgcctggagaatcccagggacgggggagcctggtaggctgcagtccatggaatcgcacagagtcggacatgactgaagcgacttagcagcagcagcagcatatgtttatataagggatacatacagaaactatgctatataaggacattaattttaagtgtggtttttcatacagagtcagtcttcaggatctgtagaaaatgcacacatacatgtatccagtagatcttgggagatcatgcacacactgaccctgtgctatgatctgatattttcacattactcactctcttagccttagttgagaggaaacagattttaaaagatggaaacttatgtctgtttcagaaaccaaaattcagtttcagattatacaactatgcatttatagtgaacccaactcagcatgttaatcagggaaagaagaggaataaaatctagagcaaatgtactagtgagaaggacaaactggagtagcgtcctgaattaggaaaccctagtctaaataatagaagttgattcctggagatggagagatcaactgaggagagcaattaccccgtaccaagtagtagtattctgagattgaaataggagagttgatctagcattctatagaaacttaaacagtaattgaattgaaaaactttggtgtttatatctacttattatgtacacacatccaaatgacacagacacattaaaaaaaatggagaaatcatcatttgacttttgtaagcagagggtcaacctcacgcatagagttagacaaattctacagccttttggaaatttcatcttatcaagcagtaccatttctttgtcttcatctttgagaaatttatatctctcctagggtttgtattaccttgagatattttttatgggaaacatcagtgcagttctgtatctgaagaaaatgtgaaggtgctcattttttctaagatagtaatgttcttaactagcaccagtttgctggcaatgtgagcgatgtctagaaaacatacttcttccctcatggattctttggtttggtttcgtttttctgtcagccattaaaaaaattaaaaaaaatgtttaaatcctgatgattaaaataagaagcattttattgcatttgtctaaaatgatacaattatacacgtatgctattaacaaaaatctaaatttttctggtcagcaatcatgaattttcaggtattaactaccactggtacagaatcaaatataagtagtgggttttttgctaaacatctgttatcttactagaaaattttctacaaatagagttactttttgaaaccaaggaaaaaagtatagcattataaagataattttaactccaaattaacctttgtcaataaatgaaccaaagtttgttacccaaatgtttacatttatttcattgtgataaaacagtataacaataattataattaaaaaaagaagaaaaatattcaccatttcattactttaacacaactcaggattatactctaatctctgtccataactgtcctttattttcaaatactaaagatgtatatatttaatgacaaaattttcatatatattatttagaaggaaatgtggaaatgttcattatttagccagtttggtaaattttatgttaatagttgtttaatcatttcctttccattcttagtgaaaagatgcaatgcccttagaaaattataaatactgcccaagttgccttgcaagtgccacattttgcttctaaaatccagtctggattctgtattgacactggcaagcagctttaataaacattatctcccaggcagctgcaacttccacttcagttttagtcacagcagctctcctgattagccccccgcaggagctgccacaaggctcaacccaaatctgctcttcagagtcacagacatgcagaacacaaggccacggttatcaaaattcataaacgcaacg

SEQ ID NO: 33758 - DNA, 897 bp, Bovine  19866880714670
  misc_feature (1)..(1): n is a, c, g, or t
ntgagatttatcatactgaatttctgaatactgaagacaaagaaatcttgaaaagcagttacagagaaactgagaagttatttacagggaaataccaattcaaatagcagtggacttcttgtgtgtgacattatggaggccagaaggaacagacctaaaaattttcaagcactgaaagaagaattatcaatagtgaattctatattaaatgtaactatccttcaggaatgaatagggaataaagacattttcagaagaaggaaaactaagagaagggtcctggttatttgtctctacctctgcccatcaaaatagaattcacagtgaaaataagacacagtgaatattcagacttttaaaattattaatactatgttagtaaaaaggaaggaacttaaaaaaagaaaaatccagttatgggtagctaagctttgcaaacaggtaaagataacatgggatgggcagctatgtgtcagagtgcagaaaatccaggataaccatggaatattcttctgaagtatcaatttcaatcagtgaaactaatttgaaacctccattatgtaattttcatggtagatcaattacttccacagagttagtggttcatgggctatgatgcataatattaatattacaaagttcaggtaactcctcaagggttgctcttatatggaaatggaatttataaattaactgtaattctgtccactgaaaaaatatttttattcagttcttaattagttatgagtcatgcacctctttcaagagacatcagctaaataactgatactcagaattaaaaattatggcactgtttcaataagaaaatattaaataatgtctctcgggaaattagataccattctgaactataataattgcttgctatttctttaa

SEQ ID NO: 33759 - DNA, 1731 bp, Bovine  19866880718702
  misc_feature (1)..(1): n is a, c, g, or t
nccaactttgacctattccggtgatataaactgaacaagtattacattttaatcagaaaaatactcagatcttagatattttttaaatcatttttatttaataaaaggaggaaattaacagccataaatattttacagttggagatattttaatgattatcaagccaattagcacaatttaatggtttatttacattagaaaagacataaataagtattttaaagttattgacctatccttttttgattaagcatgcaattatttctcaaataaatgaagatatgtcaggattgtaacacagaaggaaaatgaaataattatcgccccagcacgaaattatttcaaatgatgcttttagagttagaaagtagttctaagtgtatttcaaagttttgttacaaaatatcataaacaaggaaataatggtcaaaagcactgcctgtactgtgctttctttgtatattttaatgtgcttagaatgaaaactatttctgtttagctgatcaaagctgtttgggatttcttattaagatggcagagcttcacctgtgaatttttatagaagcctggggaaacgctcagcaggatctaactttttgttgtgggtaaaaaacattttctatctatggtgaaagtttgctctttatttggcagacagaatcccctggtgaggtgagctttagtagaaaaaaatacaataaaacatacatcttgagaatggaagacttcaaagtgaggaatgcacaattgaccatttatgcattatctgtgttatcaaaaataatgttctgcttttgaaatagatgatagacccttaaaagcatagctgttatatgaagcatttagctttgtttttactttaaaggaggatttatggatcttatacaatgttaaattcaaaactcctggttgcattcttcccactctattgtttaatgtgtatacagtattagccactatacaatccgatcatatatgtttggtacgataaaatttaagacatataaaagttcacaaacaagttaccaaagagatgctttcagattcaatggtggggttttttcggttttattttcaaaataaatgttttaaaaatgaatatattgtcagatgcttaaagaagtatgcgtactatagtcatggatgaatatatcccctctaattcatatgttgaagtcctaaccctcactacctcagaagaagtgaagtgaagtgaagtcgctcagttgtgtctgactctttgcgaccccatggactgtgtagcctaccaggctcctctgtccttgggattttccaggcaatagtactggagtggattgccatttccttctccagtggatcttcctgacccagggatagaacccaggtctcccgcgatgcagacagacgctttaccgtctgagccaccagcgaagtccaatctgatcttatttggaaacaaggtcattgcagatgtatttagtcaagatgaggtcgtagcagagtaaagggatgtcctaaccctacataactgatgtccttacaaaaaagggagatttggatacacaggcagggaggttactaggtgaaggctgaaattatgctgctataagccaagagagattgcagatagacatgcaaaagattcttccctaatgacttctggaggaagtatgcctctgctgacaacttgatctcagatggctagccttcagaacagtgaaacaatagatttatgagtttaagtcatt

SEQ ID NO: 33760 - DNA, 1660 bp, Bovine  19866880786749
  misc_feature (1)..(1): n is a, c, g, or t
nccatttagcttaattttattaatgaggattacattttctggaggtttttttttttttttccccctgttgctacagttgtgctaaatcagaagttattaaattacagggaatgaatggactgagaatattactgtgattctttagaaggacataccaaaagtggcagggtcgaataagttttactacaaccttttcattaaaactgatcattattcatttggaaatctgtaatactatgatctgttctcagcagtcattagtatagatttgtgaaggtcattttataatgtattatcaacttacattatatcttcagatgtgaagggagacataaaaaggaaaagaataatcacaattttcctagtgtgtcagagccatttttatttcaatattaggtcctgttttacagtgcctcttcagtcttaactctgagatgtccaatttggcttttaatcagggaaattttgcaatatataatttctcacataaatacttggtcattatactgagaaacagtataaaggatatatgctatataatctccttggggatattttaatatccattcttcctgtcagtaagatgttacagaaaagccaaagaaacatttttgtcaaccccaatacttagacagacatctaggttaagctctgctaaaacagtttctcttcatgagaggcttctttctctctctttttaagcaaaaaataatctatttgttagcaaatatgaaaaataaaatgtttccaggactgctaacttaaggtatgactggatccaggtgtccagataaatttctagtttttaattttctctagcacttgtctctactctctatgttcatttcattctttttcttcacatgaaaaataaaaatggctgcaggcagctcctacctcacattctgtaagcccagggaaaataattttcctttctttttttttttttctgaagtataattgacttacaatattgtgttattttcaggtgtacattatagtgattcaatatttgtatacattataaaaggatcaccaaaattagtcactgtctctgtcaattaaattataatattattgaatatatcccctacaagatacattgcatccccttgacatttgttttgtcatggaagtttgaactttttaatctccctcacctgtttcgctcattctctcacccctgtccctctggcaaccatcagtttgttctttgtatctatgaagagacttcactcttgtttctaatactaagtaacatctatataatacataagcagattcaatgagtgctgagaaaataaagtcattctttcaagaaaatgtagaattagagggtaggtttgtgttgtgttggatttttactatttaaaagaactgaagttgttgtaatctgagtgaaaagaacaagctgagttgtagaagttgatattactaacatacagtcaagtctgctaaaggtgggggggctgttaccagagaaacggagagttgaagaagactctccattggatctccattcttggtaaggacacaaagaagaatctgaggtcttactcatggcaaaacaagtttattaagtaaagaacagaaagaacacctcaagggagaggagagccaagccaaaagaggcattggccctgaagtagtgaggtactgg

SEQ ID NO: 33761 - DNA, 915 bp, Bovine  19866880797488
  misc_feature (1)..(1): n is a, c, g, or t
nttaacatatttcaaaacaattttaagtaatctcatggaacatatgcccacttaaaggcattcctatattttctttccttaacttgttccatagggaaaaattaccacacataatgccttgctggttcattaaaatgtgattattttgttaccaataagtaacatttgatggtttgcttatgctatttgtaagtaagttaataacagtgacagaacaagaagctgtagcaatatagcgtcttctaaaaaccatgtctggaaaaccaagcttcaagtctgagaaaactaccaaccaaggacaaattaataaatatatattcacctaaaatatttatataattggcatgtacttatacaaaaggactaattgataataattttataaagagattttatttctataataattccttcagaagcaagcatttatcagtgatgaactgtcagtaatatctgttcacattcaaagtggcttcaagggatacctggttaacagctagatggccctagcaaaaatcaaatcaaaatatgcagacagaacacaaatgtttctttaaaatagaaaataaaatataatgctgcctaataaaaaataaataaagatacttttgtaaaaataaatgaatgttatcctccccacaaaataggtgataattatcacctgtccttttccagtctctagaagaaaaagaaaaagtgttctcaaatacaactagaaatcagtaaagcctaattttccttaatttatatgcattaggaatactctgagaattctctgcatctcagctataaccctcaacaggatttaaacatgtacatatttacataaatctaaatagcattaggatggccagttaagaatagtttgaatatatggggtggtaaatttgcatataaaacataggaaaaaacaca

SEQ ID NO: 33762 - DNA, 2171 bp, Bovine  19866880800866
  misc_feature (1)..(1): n is a, c, g, or t
nattgaagcctagcatcattctttccatgaatattcagggttgatttctttaggattgactgatttgatctccttgcagtccaagggactgtcaagtcttctccaacaccacagttcaaaagtatcaattcttcagtgctcagctttctttatggtccaactctcacatccatatgtgactacattgaccatacagaccttttatagtaaaatttgaaaattttactataaaattttcctgtagtaaataagaacctaagttgaaattatttatttatagtactcacttgtgaggatcttttaagagacatacagtcttatattcatttttaggatatctaattgtattcagttttaggcatgtattttagtcaagaacatgtattttaggatatgtatctaggcatgtattttaggatatgtaaatgtattcacattgtcatgctgagatggaccacgaaactgctttatttcctcaacttctcttagttcatgtatggtttttcagagatagtaagaaatatcaactcctattgcatacaaagaaaatggaaattcccaatatctgtagctatcaatttattttttctctctctgcttattttaactggcatttttaaatgtcaaatttcaaaactacacaggcagtaagatttttaaagttatttttgcgtgcaatatgcaatttccttatttttcttcaaattatacattcttcgccttggtgaaattataactttttgacagtcttatagttcctatttatgtcatgcttacatttacctgtgacagccaatagtccagtgacactaatacagatttccacaaaagattatgcatttatataatgctactcttagtggtgaacaatatgatttggcaattattataagactttgtatcttatagcaatggcctcactcagtttatcaacagattgtaacacaaagtaactgtataaaattttcatttctatgtgactatcaggagaaaataccaatacttggcaaaaattaactttgctttatcttccttgtataacacacatgatgtttcactgaaactttttatcttttgcagtttgtgaatacatggtttgatactcattataaatatatcttttctgaacatttcaacacctgggggtgaattatgataattaagtactatatcgttatgttcttacttttccttttcagcccctactgtgaaaattcaatttccagatgcttttgatgtttccagtttaaaggtgtgaaaagatctgccttttctaagctctcaggtttgtcatattggagattcattttatagtattctttcagtagtttcttatttctctaaccaaaataggacatgtatttttcaggggaaataatagattctttggcagggtggatttcattgaatggattttaatatttcaagttattctaaacagtacttttaagaagacaagaatatgaagtatagttaaaataacatttaatttgttgtctgaagacgtaataaatctcagctgtgtaatctgagtgactcattaataatgttgtcacattatttgatcatatggatacaaccctttcttggtagaaatgcagtgtacattaaatgagataactaatataatgtattatataaaccctacaatgctgtacaaggaattaaggtagtgttgctgttgttgcattgatcttgatttcctttacatatatattcctaggtttgatcctggatgtagaaaaatactatatagggtattttattgttgcaaaatggataaaggtaattatttgtagaggatcatagaaagacaaagaacatgattttaaaattaacttagaggggttagctaatttcctttattccttcctaactgacaggtcaaatttgttggtaaaatatttaataatcatgtatgctgctgctactgctaagtcgcttcagttgtgtccgactctgtgcaaccccatggactgcagcccaccaggctcctctgtccatgggattttccaggcaagagtactggagtggggtgccatcgccttctccgaatcatgtatatgtttgtgtatatatatgtgtgtgtgtgtgtgcatgtgtgtgtgtaatttttttccttgagtgtttatctgaatcttctaaaaagtcctttgcaaattattttgata

SEQ ID NO: 33763 - DNA, 1998 bp, Bovine  19866880844973
  misc_feature (1)..(1): n is a, c, g, or t
ntaaaagagtacatgaatgtccagtttaggtaattaattcatcacgtagtatgactaaaagtgaaagtgatcttattcacaatagcgattctgtgtatgaacatgaatatcatatgtatacacatgtgctttcacacatactacttttcacacacacacacacaaacacacatgtgcacacatacaacacaaaatatagtcttacccaagattttcagggtcaaaaactcgattcaggtcacagtcaatatatctggtgcacttcttcactgctcttgggttggtaataaatggttttacctccagccctgttctttgaatctcagtgctgttctccagccagtgcttaactagaaatactcctgttagttcattcccatgagttcctccaaagatagccaccttttttatagggtcttcagcaacatgacaagaagtcatttttgtgaagtaggtttatctgatttcggcaattcagaagagaggagatcaaagaaaacttaatttcttaggcaaagtttagaaacttaaatctaaatgagactttaacctaagtgcaaagtacagacttctcttgagtggagtatattttaattttctgttacaagttctgagctgtgtttattatagggatactcccttctttagccctgccctttaccatatttgggttaaaatatgcagagatcaactagagatgcagctgtttactttaacttctaactccctcaaatggtcggtagacctaaatgcaataataagttagcatctcacacttaagcgaaacttctgctttctctttagccagaatgttttctaacagtgttttcatgattatttgtggtagtaaaaatagattacacttttcttatcctcaaaaatataaaataaaagactggcctatagtatgcatcttattattcaatatttatatttctgcttaaaaccatttcttctctgaaatgagttcaggccctatttatcttctgagggcatctgaatttcagctctataaacagccaacggcagatcctcagagaactcctctggaaccactatcctttcttttttttattttcagtacattaaatttattcataaaaaatccttaaaaatgtacactttttcctttttaacctagtaaaacacaaaaccctcaattgaactggcatttataattcaaaatcaaattagcagaatattaaatacttaagaatcttttaaaaatataaagttacatgcaattttgtagaactgacataaaagaatggatcaaaaatgggagaatattccttcattcctaaaaagaaactacatccagtagaagctgtgaagatgcttgggtacacactttcttcagttgcactaccaaagcctgtctttgtgtatctaagaactttgtgcatgtgaacggcttcttacaacagcacgatggactggctggcgctcccctccctccaattacagtgtagtattataacactgacctttggcctccaaccagcatagtacatagtttttgagtgttgattaaagatacttactttgatttagaacctcaggacttttcagtaagtgagcctcttcagaacccatgactgtaaatgtcacctgcctcatttttggggcatcatctgtgctttggaaagtacggccaacccactcaggtgccacaggcccatccgctggatgagtggtcaagctgagcagggtcatggtttcccttacaacatttaagacacttcaacacatcagctatcagtgtgtagaactagtaaggcatcaaataagccaccacaaaagtaggaagagtgataatgacagggagtgaggagtgtgcaatcacagtgcctacttggcaagtgctcactggcaacactggagtgagtggacagatgcaagccttggtcagcctgtgctcagactggaacttgttaccaccatataactttaggcaaagttaccaccggctctgcacctccatacacagtgtgcagt

SEQ ID NO: 33764 - DNA, 2578 bp, Bovine  19866881197673
  misc_feature (1)..(1): n is a, c, g, or t
ntttatagaggtaataaaatcttagaacaaagttgaaggaaacatcttaaaagttaaataacatttttgaaaaatacatagcttccagaaaattctaaaaaattattttcaaaatttttgtctcaagataatatacagataccttgcacatacaaataatttaaatattttactcaaatacatgcatttacatttattaagtaattaatgaaaactaattgaaggtatttttcaaaaacttcattctataataggacagagtaggagatattgctacagttctagcttaaaacatcagtcaatttgttagacatatccatcactttttagagctttataatactagagtgccttggaccacaaggagataaaaccagtcaattctaaaggaaatcaaccctgaatattcattggaaggactgatgctgaagctgaagcaccaatattttggctacctgatgtcaagagccaactcattggaaaagaccctgattctgggaaagattgagggcaggaggagatgagggtgacagagatgagatgggtggatggtatcactggattcagtggacatgagtttgagcaaactctgggagatactgaaggacagggaagcctggcatactgcagtccatggggtctcaaagagttggacataacttagcaaacaagcaacatcaactgagaaacagccttatcattcactagtgtttagcagatactacataaaatatagtattgccttatatgatgaaagcatctgttttcccctaaattccaatgagaaaatgatatttcaaaccttagcatttcagccatcactgcaggtaaggcagaataaccttacaataggatgatgagattagatatttcagagattaccaagtgaaactgaaggccagtaatccacagaataacatgcaggaaagcacagagaaaaaaattctggttatttcttatgaaggaattacataacttcttcttattctgggtatttcatttgattgaggatttcagatttacttttaggtgttttctaagcctgatatacaattattatatggttgtgatttaaccaatattaccctctcctcagcttaacattactttcgccaaacaaaattttatgatctcaaacaacttggtcagttccattccatacacacttctactgtattggagctactcacattaaaaaggtgtcacaccacagtgtagttttatgttaattttgaagtatacaatgaagtccttgaagtcaaagagcaagtcttggaaatacattgtttatataccttgctttaccagagatttattttttaactggtctgttcaacatcctttatataaaaactggttccagtatggatgataaattatgtggcccctccacttataaattctatatgcctaacaaccaccaggcagcacggtaaatgtgatcactcaatgattcatggaattaataaattaataaaaaaggaagtcaatgaatgaactgactccagttatccttaattttgtttttttagaagatattttggagtatacttttttaaaaacttgatcaatcactttgcatccacaacagaaaagaaaggagtaacagactaaactacattgtgttagaatgtgctaacattttcatatattacttgtgagaaaactacttctgcaatttatatggaaagttgtatatttttctgtttacttgtttctctgcctttctttcttctttctccctctctgtctctctttgattctttttagtggcttgttctttttcataattcttcatggtatcagtgcagacaggacttaaaagatctctatgcaatgcttctgttaagtataaaaatatttcatttatagctttcagtacttcttatctatttctttttgaaaaatttaatcatgaattatacataccagtacagcatgaaatattcaagtcatgttcttacatttcagttcagcctacaaaacaaagaaagactagtttaaacatagaaaagagagggtcttgtatagcaatatgacagtacaatttaatagcattattcccatagcagagcccagatgaaaagtctagcataaatagatttcataactcagtacaactcatatatgtcagtcagttaactgaaacagagacacggctttaagcatttaaaattacaagtaattttcaaaagccagagagaaacagtcttactgcaaaagtgaattattatacaaagccacaattaggcttattttatgaaacttgggaaattcatatagttttaggccaatgactgttttttgaatagtaacagaagatgcttctatcaatttgaataaataattgattgattgttaagtttgattctttacaattagaagtttcctatatttttctaaatctgaaaagagtaaagtcttctccatttactgaagaattctgttatatccatccaagaagtgtgagtgggctgagacctgacagtgggtcccagttactgttggcaagctcttccttagggaaaattcaatgcaattgcattttatttaggaaactgcttctcagaccaccaat

SEQ ID NO: 33765 - DNA, 1432 bp, Bovine  19866881348699
  misc_feature (1)..(1): n is a, c, g, or t
ntcatgtagaagagttaaaaaaggaaaatgaatatcattctgtaccagaaaatatccatataatttttatatttcatgtgtattgaaattaccttctgaattttgaaatcacaatagcattcaaatactgtctgtgctttgagtgagtacaatactactaatattattgtagcctgtctttccactaataaatatccaattttaaatcatcactagtttagaaatagtataatgaataccaaccctatatgcctgtatatcctatactggcattctctacaatcagttcacagccctctacacaaaattattatgatttctgcaaagatactaacattacaagactatagtaaaatttcgctcacgtcttctttgaaatattgtcccaaagcatttctcatcagaaggagagagtttacagggataaataaaattgctttgaaatttagcttagatattttcatactgtagcttcttttttaaaacagcatacctttgggtatttagtaattccctgaattcatttcagttaaggagtaatgacaaagtaagtcaagctatggtgagacaacaatcaagatgaatgcttaaatgcaatttcctgagcttaagtcaattctcattaaagttgcagacactacacatataatattatatgtagaaaatttttatcaataacctaatgaaatatctattttagaataagttatatattgatataactacagatcaactttaatataatatataaatatatttttcatgagagagttatatgtattgaaatggtggaaccctatctgaattgttttttccttcagtacaactgaataaccagtttgtttaaaaaataattacaaattaactttaaaattaattccaattaatttggactcctaaagatagtgaaatggtcaatgtttaaaaattcaacacaaatcataccctattttctaacatcaaatatttcaatattatttaaatatctcgggccatttctgagggaatagaaaaactctggatccattttgacaatgtaaaaatcttactgaacattttttatttgatttcacctaaaattagacaaaattcaaaattataaaagttatgaacaaaagaacatacaggcactttcaaaaatcaaaaaaagaaataaaaatcagaattgcaaatggtatagcttcaaatagatacatcaaaattaggtataatttatagatctcttctgtctagcttttttcctgtggttagagaggagtgaggggaacaaaataatacaagtggagagttgagaatggaaatacattccttctgttgatgccagtacagggatttaacaggtcagtcaacagtggagagttatcagttttgctgcagaaattagacaacagatgttccataaattccagcactatagcaacaggggtgttaa

SEQ ID NO: 33766 - DNA, 1561 bp, Bovine  19866880379341
  misc_feature (1)..(1): n is a, c, g, or t
ntccttggtgaaggcagaccccaccttgccctggccctcctgctactcttccttgcagttggcaaaaagaactccgggacagcacagtggcagagactggtcttctggagtcagacattcgtagatcaggatcacatctccacaacgagctggcttcacctttctgagcttcaggtctctcatccatgaaactgtggcaatggtgcccacttctcaagcttgatgtgaggattaaatgcagtaatcccaatcactgaggacataggaggtactcaataaatgatggcccttgctgtggtatttattatctgctctgattcttggagatggaagttttaaaagcacagaatgtggcaggcaacccctccccaagcatttggattgaacaaagagaaacgtgatcattttctggaagaacatccaggccagactatcaccacgcctggggcactgtaattcgtcaactgtctggactatgatgaaacacttaaaagaaaagatggctcagagctggaagtcagtggagcaaggcagggaaacttcacagttgggcagagaagggggaactctgaccatcaggaactgggtggcagtcagccatctgcccttctggggtttaaactcctatggaaaatgctggtcatttcataaagccatgggtggtcagatagcactgaatcccacccctcagcacagactccaggatccaggcgcccttgccaaggacacatagagggttgggggttatgctggcattagagcccggtgctcgggacactcgagtctactgctttgagctttgagggaatcatgactaatggtgttgcatttgccatgacagatgatacttctctagatttatttgtttatttgaactaaagtatcctttctgcagtcatcaggcagaactgtggaggaggctgggtctgtcctcagcctccctctgcagccttgccagtcctcctcccttctccccagaaaggagaactccgaggccgccccaccccagcccctcaccttgtttccatcatggggtccccacactctgtcatgtgatgggttgttgacttactttccacccagcttcccccactggactgtacacacccagaaggcaggaacaatggctgacatacccaggactatggtcccagtgcctcggaacagtggttggcacatagtaggtgctcaataaatatttgttccgtggatcagccaacaaactcacttatgctgaggtgacagggcctcatcatgcttcctccagtggtaggatataaaatttaagaacagatctttaggggaggaaggagcaagaccaggaggaggggactagggtgtgctgagcacttgctaaggcctgggcactgaactcggaaattagtacatgttattcatgatgatgactaaacatggtaggtcctcttgaccggttaagcctcacccaaagccacgagtctctgctgaagaaattcaggcatgggagaaagaaaaaagatttttcaatctgaaaatggaatcttcctggtgccccctgtaggctacctggcctgcccataga

SEQ ID NO: 33767 - DNA, 2493 bp, Bovine  19866880622354
  misc_feature (1)..(1): n is a, c, g, or t
ntgaacccgcctctcttgcctctcctacattggcaggtggagtcttcaccacttgcgacacctgggaagtcccacctataatacagggttgtgaaatccacccaccaggtaacggtctgcattaatccgagacctgaaagtggtgaacgtagcatgtagcacacagaagatgatcaaggcatgtaaacttgaaatctcattgtcctctcaagcaaaacagccacccaagtggtccccatctttagaggatcaatttagtttcaacattcatttcatttcatgcatcacataattatcaagcaccttctctgtatattatatcagtggtacctgctgcagagatggggtggtttgatttgtagccctcagttacagagacagacaagacaggacctcagtgtctagagggggtaacggatgtgagtccagtagtgacacaattagttatctaatgaagatcaggtttaggaaaaggaaggggctatggtgctggagaagactcttgagagtcccttggactgcaaggagatcaaaccagttaatcctaaaggaaataaatcctgaatattcattggaaggactgatgctgaagctccaatactttggccacctgatgcgaagaacctgactcattggaaaagaccctgatgctgggaaagatagaggggaggaggaagatggggagacagaggatgagatggttgggtggcatcatcgactcaatggacacgaatttgaacaaactctgggagacagtgaaggacagggaagtctggcgtgctgcagtccatggggttacaaagagctggacacgacttagcgactgaacaacaaccacaagggaaggaaaagtctgtcttccctaaccagctcaacccaccaatatcaccttcctgtgcattccctatttactgtctggtcttgtttaaatgcttctaaagtgtcagagccatttcctagagctggctgttgccaaggacctgggatcttaggctgcctctgccctacttccacgctgtccaaacatgtggaatccaggatgaaatacgttctcagatcagcatttctctcctgggaatggcaactgggagatgtcacagacttaaagaagctgccttccaatttggaattccacagtacttagttgttaagaggcgatggctactggagggtggatagagagcagggctgggtagggggcttggtgtctgaaaacatggtcactgcatgtaatttttaaaaatcaattcctggggtgtgaattcttcctgagaaacaggtcttttcaacaccagcactaatttgtgctaaggaaaattagtttcattcttttgtcttcaagttcatcggatggcaatcccaaatgaatgtgcccatgggggtgggcgttggaaatgcagggcgcaggtttcagatagcaagtgtgagttacagagaagagaaaccccttcttgatgtagtgacagcatcatttgggtgggcatttccctggggttcctggctaacgtgggtgactcttgcctgttgccagcaaggcaggtgatttgcttgatggattgggactcatatttccaaatgtcacgtagagtcacagggcctcttgactgatgggggttggggttgggggtcccatgaaacttagcagatagccccacgtggcccccagtctcaagcccaccactgttctctatggcccttggagtaaagtcctaagtctatgacatcccagtatggggacagggtcctctgcttgtttaatttcctggatctcagcagacagtacaggctaatggatccttgagtgatggatggatggagtgcatgactcttcaggaaatgtgcctctgctgatcttgccagccccccagtaccacaccatcagccacctggcacttcattcagtcctttgactgtgctgtgctctgagactctcacctcttttagggcatgctcacctcttgaaggcaacacaggcatcccctgaagagcccaaaggcctgggggactcctagtgactcttgcaaggccagagggggcctcccctcctcccccaagcccaccctcaccattgagcaaggagagatgccctttctctgagctggtggggtctgcttgtctgtgaccgcctctggaccatgaccatagatggatgcaggaatgaaggaacagggcctggagctggggccctaaccctgcagccctgacctgggcattttcatccagactggaggcatgaatggatggatggacggaggggtgggagagacttacgtattccttggacgggtcaccgatgctgccgttggtggtcgggggcgcggtctcggctccctcaggcttctcctgctgcttcccctcctccttgggcaagccgccctgcccggggagggccacctcgcccacacctagggcctcactcttatattgcttcacaaactcttccatcactttcagctcgttctccaaaagtccgcggcagcgagaggggtcctg

SEQ ID NO: 33768 - DNA, 1403 bp, Bovine  19866880714711
  misc_feature (1)..(1): n is a, c, g, or t
ncaatgaataataaaaatgctgctccagatgcccaaacatctactccctctgatgcccaaactggaagctttgcccatgctgacagattagttagggacagaaagagctgttcatttaatggtaccactgtggagtctcagcacatcaaaggatgctaagagaaatagacagtcagcagaaggaataggtgaggattgtgaatataaacgctgtcgattttttttttcaggttcaagttttatcttgacttagcagccatcatgattaagcaaacatttttaagttcaactcatcttgagtgaaaccagctgccgtcattaggcaaacattagatttgggacatctgtcaatacaaaaatcatttgctctattgattgccacaccaatgtagaacaaagtctggaccgcctgagtctatcagaatcagcttgtttcatcctcacctcgagggctccctccccttcaaataccctgtccaccagacaaaatcctcagttcctgtgggtctctttccttctccccaaggactattatggtccagaaatgtagacctcacaccctttacttcagaaagtgttagtcgcttgggttgtgtccaactctttgcaaccccacagactataacctaccaggctcctctgtccgtgggattctccaggcaagaatactggagtggatagccatttccctctccaggggatctatgcaacccagggatcgaacctgggtctcctgcattacaggcagattgtttaccatctgagccaccaggaaagtccacttacttcagaagaggactctaactccagctggctcagttgtctttcttaaggggacaaacctagtgaacaccctcctggctattgaccagtgcagtgttacagctgttccatggactatttcaaggtcaaacactctcagtatctgaactgtaaccatgtgttgcctttgctcccactcctcgaagattatcccagaactgttctgcaaaggaaaattcctagacagaagctggcatcatgctttgcgttttcaaccccagccttcaatctagagttttgcaatcaagacttaagaggcttcctgggcaatgaggttagtgctgacgacaatgctcgtgggatcagctggcagagtggattctgcttgttcggtgcagactctcctagttacgggtctagatcccaaggaacactcctcaaagctgtggtatgattttcatgctacagaggaaccagatgtatagtattgggctgtggaaatctgacctccagccatttacagggaatttctgtcaactttgtaagagtctgcttcaactgaaaatggctacaaattctttactactccttccatcaagaggtgggtccactactatgctaagtaagacaagtcagagaaa

SEQ ID NO: 33769 - DNA, 1188 bp, Bovine  19866880723610
  misc_feature (1)..(1): n is a, c, g, or t
ngcaggagccaagcactttcaacagctgccatcccactgattccttttcctaaattaggctccctggggcctcacaccggctggagcccagagacaaggaccctacgtgctccagaaagtaactaagtccatgatatcatcagtgacttgtcccaagaacaccgaagccccaggggcagagggccaagttcctcaaattaccattcttgtggcagattttggccttttgtccccatgggctcaagtctctgcaaggcgacacatgccaaacagcgcccgaaatagagctgagtgccgggacacaggctggcacccaggaaggggacacccattcaaggacacgagggaggcggcctctaacagccctgcccacctctccctccactgtcgtctgcagttgttttcttctgaatcagccaagcaaagtcaggggtgggagacgctcctccccaccaataggaggggggcaggagacaccctgagcggggcaggactggcgagtcttgggcctctgctcagtctcagttcccccagcagatgagcgagcgctctcaatgcggtaggcatcctgctacagctatccattctaccaatgggaaaggaaaggactaacaagccagcagatactctctcgcgtcgcactggaggcaactggagtccagagacgttcagcaacttggccagggtcacacaaggcctcagtgcaattcttaaacagaagtaggtccacgaggcccagaagcaccaaggaggccttctaccatccaacccaccggctctctcatctctggatcctcttttttcaaggaatcagaatgtgttgggaatcaaaattcctaaatacatagaaaatgtaaaatctctgggtgcctaaaggaggtgggtgggatctgaagagcttggggcttccagagacaaatttagctccttctcaaatttccgtcttgggatgactgtcaatctcgggaagatgagagaagagacggagacaggtaggggcaggagaagcaaagtgaagacactgccaaactgggcacaaagcctcagccaaacaaaccaactctacagaaatctgtgcatcaagtagcaattgcatatagttccatctaacacaccaggaggtatctgtggatgaaataacacaattctaggatttccttccaaattacctagtaggattaacagaag

SEQ ID NO: 33770 - DNA, 2009 bp, Bovine  19866880747511
  misc_feature (1)..(1): n is a, c, g, or t
ncagctgtgtgagggaaggacgctttctggtctcactcagtcagtgtcgcatcttcagctcagggctccaccagttatagttctcagctcagtgtttgctgaatgcatgaatgaacagggaaaagagcaagaaactcagagacaaaaattccacttaggacaaacccagtgacgtggaggatgacaccaccatctcgctctgattgctgactcttatcctgtaatcagtcctctacagtcactataggaggcagtgtaataactaaaaggacacagtctggagctaaaagccctgagtttgaatttcaactctgctacttgctggagtgggaccctgcatgaagcccttgactgtcctaaatctctattttctcccacaggtataattagaattattaagaaataattagaatcatatcatggttgtcttgaagatcaagtaagatgacagttgtcagtctaagagttccagtgatatttatcagaccaagacattcttgaaggggaagcattcttttatttacgtgggtgtcctaagcacctagaacaaggactggtttaaggcagacgccccaaaactacttgatggatgaataaagtttctaaaaatccccagcatcacaaagcaatgaccttggggaaatcagatctttccattgttccaacctggaaaagataccctattttcagataccccattttcctccaaacagaagcaaaaggatcctagccatggagtgaggcttaagatgtaatgggtcggctccggccatatgagcctgaaggtgcccgatctcgtctgatctcggaagatgtaatggatcctatttcctccatcttccagaagaatcccaattataagagtctgtccaggtgtccagacaaaactgactatagatcccctgaaacctttggcttgagagtaggatttaaaaagtcagagtcagcctcttcagctggggacagaacaagttccagaggagcagggagcagctttctgcccatgacaggttctttactaggaaaaaggaaaaaaagacaaggccagagggcttcacagataaagaatccacctgtcaatgcaggagacataagagataggagtttgattcctgagtcgggaagatcccctggtagaaggcatggcaatccactccagtattcttgcctggagaatcccatggacaaaggaacctggtgggctttggtctatagggttgcaaagaatcagacacgactgaagcaacttagcaggtacaaaagacaaggccatccaagcagtagcttttgattcttacattctcagaaacagccacaatatctgcctccttgattgaaactggggccaaggataaaaataaggagaggggaagagggtcttatttggattcgtttttaaagctcataaaagtcaaatttttccatgaaatgataatttttcaagatggggcaaggagtgtggctgggaagagagtgggaaatgacttcactgggcaggcttctgcctagtttgcaaaggataaagcttgcctttgttgttctcctggcttctgttccccgtagctctgaagtataaaggcttctggcagaacatcccagtttcaacaccattgttcctaggatttgccactgaaagggctattcacatggaaacctctcccaggccaggcttccgttggctaccatttacttacaccctggcttaatcatgcagcccacctaggaagtttggacaaaccagaccagggatggcccttcgccatctctcctagtcccaccttgccaactgactgctgattaaaagccagaagccaacctccattcattccactgacatgttctgagcattgctcgtgtgctaggtgtcagagctacaggtaggggcaagtgagacaaacattgacaatagcagaaatccatgaaagaagaaaaagatcattcttcatgttgtaaaagaggagtaataaatagaaagccctttccagaatgtaaaaaggagccacaattag

SEQ ID NO: 33771 - DNA, 2107 bp, Bovine  19866880842100
  misc_feature (1)..(1): n is a, c, g, or t
ntggtggtagcgcttggctactgaatgtgactgcactagaggtaccagtgactagctatctagaaagtggtcactgggaagtagctgcccaccatgtttctgggcccctttgcatctcaacagggtcatactcatcacttcctaaccaaaaaaaagaagtgatgacactacttgcagactttaaaagcttacttcctgcatatcctctatcttttcccctttctattggctggatgtcaatgcctgtgggacatcaaaagataggatgatctctgtcagcctggatccctgaatgactcagtggagcagagattctgctctcactctctgcactgccactgcaccatcacagattacatttggcatcactggaaactcaatttctattctattaagccactgagattgagtagttttctattactactgctaggattctgccacctactcataccgcaccttccagttcattcattcattcatttttttatttatgccagcataccatcgagagcccactgttaggctggcatagttccagacaacttggacaccttgggtgaggagggatagaaaataaaaaggtaaacacacaagagagctgacattggaatagcagtccatttgggctgttacaactgaatatcacagactaggtagattacagaaattcattaacaacagaaattcatttctcacattcttggaggggggaagtacaagactgaggtgccaatatggccacatcctgataaaggccttcatccagagctttctcactgtgttctcaaatggtggaaggacaggagctctgcgggatctcttactaagggcaccagtcccattgacgaaagccccaccctcatgatcgaatcaccccccagaggccacacttactaatactatcacctttggaggttaggatttcaacgtatgaatttggtgagacaggggtagggaagggacacaaacattcagaccatatgagaaggaaaaagcaaacatcacctgttagagaataacgaaggaggtgcctatttgatctaagacttgaggacataaagtagcaaaccatgtccatatcatgtatattaataggaaaacagcaaatgcaagctgaaggaagagcatatgcaagggcctggagttacaatatcactagcttattcttggaaccagagacgtgtgagctctaccagctaaaccaggataagaagcataaacccagacagttcctagtgaaccaggaggtatagtccactctaggagaaaaatatgatgaaagattcaaaaggagaggccatttcttttgtgtaagccattctcttacacagctttcaaaccgatgtgttttacacttctgaccttctgaccatcccagccactgggccaaggccaaggactgcttccgtgtagaaccaaagccttgctcgctttgcacagctccacactttggccatggctatctttggttagcactgactgaccccagaagaaagtgttttagtagctgcagcagcaagtacgattttagaacaccactcagaatcatctccttcaatcaatgaaaaaaatgttaatttctaatgtttttaaaactgggaaaagatctattgtcttgaatgtccctaagaatcttggccttagggtttcaagaaaccaataacatgcaaagtgctaagtaattttttaattaaataaataaataaaaggtaatcacgataagcctactatagaattttttttttttttttgtagtaggaaattgttatggttccagtttgggacctggggaccacatttgatatgaactctcctgcccttacatgaaatattgacttaatttctgttatcagttggaatatgttgctgtcttattcactgggaattaccctggctgaaaatatttgctatttttccttcttcagattctcctgtgtcaacagcctgagggataaactgtctgattcagttatagagaaaaatcactgtttttatttgatgcctttttccccccaaggggactagaaaaacattctcattgctattaacttgtttgtaagaaagaaggaggggccatttcactaaaaatctatcacacagtcca

SEQ ID NO: 33772 - DNA, 1472 bp, Bovine  19866880940982
  misc_feature (1)..(1): n is a, c, g, or t
ngccttgaggtggattagatctgctttttcttgaagttggaaccaaatgagaagcgagggaggtgaaggcagagggagggcagctggcggcaggggccctctgggggaaggcttggaccctggagccagcctctcctggaaggtctctgctgggggaaattctaaacctcactcagccgcttgctggtaatttgtggctagactcgagcgtgtcagctgaaccagagccaacgtcactgtggtttcctgggtcacaatccctttgcactcgcagaaaacccaagtgcactgttctggccctttcagcacatactacatctgggcttcattgaggatttcacagagttagaagcacaaatccccgctcctccccaaaaagtggccaaaacccaaagacataatgagtgcaaaggatttgctcacccacacatacccctggccacccccaagcaaatccgagaacagggtgagcgctccccaccctcactctgaagatttggtttcagagttctctcccgccctcttttcttttctctcctcccttcaggtgccccttcccatggctcagttccacggctccctctctggccttcagtttcctcaactgtaaaatggaaatggtgacatctatctcccgggataatggatcaaatgaaataatggaaatgaagtgctttataaagtgcaaatcagggtcagtaaactcctgaccctgtagtctacaaactacaacacctgtttttgtgacacccttgaattaagaatggttttgatattttttaatggttgcaaaaaagtcaaagaataagattctaatacccaagaaaattatatgaaatcaaataataaataaagttctattggaacacaactacatccatttatttacatactgtccgtggctgctccagtacaatggcagagttgagtaattgtgagagagacctttagactcacaaagcctaaaatatttactattttgttctctacagaaaaagtttcccaatccctattgtaaaggactgaaaaaataataattcttgttatctctcttatcttctccattacaacttgctctcaggatgaagtctgccacactggaaggagatgaaggatctgcttcaccaatcaatgattattgaaaggaaggttgaatttatgccagtttccaaaggcattttcatttcagtgaaaagtttgagtcctaaaaggaaagcctctcaaatatagtgagatttcaagtaatagttggggaaatagattggagtgagggcttcaactgacagctaagcagccgcctattataatctgcaagtgcatacatccatacaatgactgcatgaggaacactcctacggtggaaaattctagcggcacctcttattaacttcagggtaccttgacttggttaattctaattaaattaaaaatggcttcttgctcgtaaccctacggtcctcaggaatctgcca

SEQ ID NO: 33773 - DNA, 1953 bp, Bovine  19866880948384
  misc_feature (1)..(1): n is a, c, g, or t
nacagaggatgagatggctggatggcatcactgactcgatggacatgagtttgggtaaactccaggagttggtgatgaacagggaggcctggcgtgctgcgattcatggggtcgcaaagagtcagacacgactgagcgactgaactgaactgaaccagttactgataagagtctttttatcaccaccagcttttagattagtcttcctgcttcaaacctcacccagctccaatcaaatcttccttacatgtgaatctgttaaagactcttttctgctatgaagtcttcactggcttcccagcacttctagacaaatttgtactcttcagtatgacatttgagattcttcacacccagaccggaatcaagatttatcccctccctcacccctcagacaacatgtgctcaagccactacacaattctcagcattctggctcacagtagtcctctgatacaacttccctacctgaaatgttctgtgtggtaaacaccttaagtggctaaagccacttacttcaggaagtcttccctgatgtccagagtaagccattgcctcccatgggcttctaagacaagttctttgtaagtaactcaaatctgcagtatttgccacacattattacaattacttatttttctgatcagtctgtcgcctaaggctgtgggctccccagaaggcagggacagagccttactggtctgtttatcctagctcttggcaaattttgagatgagttggtgggtgataaatgaatgcacagaccctaccacctgaggactcagagtcttcatccttcatgcggcaggggccttgggtcatggctgggctgaagaaggatgcagggaaactgaccagacacctaaaagaggtgcttgcccgatgctcatgctgtgcttggggtccatggatagcctgaagctgtccctggggacagggcaaagggcagggtgaatatggactccacgtcccttccacatgtatcaaaaggcaaaggagggtgggcaaccccatgagtggcctccttcccatcttaccctcccccagccccaatccacgctgcagtccatcaatccccatccaggggaaaccccagagatgggaaaacctcagccctgctttgggccaccaaaccatagggcaggtgccaactgctccaacgagaatccccaccagagaccaatttcattctaaagcccttccccccacaagctcatctcgtctccacaaggctgagcagagccccgattggtactattatggacccattttacaagtggggatgtggtgcccagagaggcaagttgtatccaagctcacacagccagcaagaagccaagctaggggcgaaaatacaagtaccagggctgcacagcagccgctgactgcggtggcatcaggggatgccaggcccttgactcactcgtgaggcccagctcccacgcagccccctttaaggagtgctgggtcttccagcagggctccagtcttaattttagcttggaggcttgccactggacgcttcagccagcggcaggctgaagttatgcgggacagctgtcagccggcacgctgggtggggcctatttagccagcaggggcacaagtctgggacatttggtgtctgtgccccaggtcttttcagccccgctggccacacggctcccatctcctcccgtgggtcccctggctccacgatgatggccgaggagcacacagacctggaggcccagatcgtcaaggacattcacttcaaggagatcgatctggtgaaccgggaccctaagaacatcaacgaggacatagtgaaggtaggcttgagggcctgccctggtgctgcctgcccaagggtgtgggtttgggtgctagatgggagtgggctctgctccagggccattggcttccctgttcctccctggcttctccaaatacccgctccgaaaccagcttgta

SEQ ID NO: 33774 - DNA, 1231 bp, Bovine  19866880956263
  misc_feature (1)..(1): n is a, c, g, or t
naaatgtgaattccttgactttgttctacttggtgaatttctatgctatctcctgtctgcgccagttggtgaatgatgtacccgacagtgctctataaaaggtgcacttaataaatatatttttccatttattgctttgccctctttctttctcttgagaacagtgaccatatctggaggcttgcagacttcaggtcccttgctgagcttcccttgaatctgcataatctgtctgattgtgacacaggtgcatctgggctgtggcagatgccagggggcagggggtgttggtcagcaggagacctgatcccaatctcttggttcacaggttctctcatttatcagagttctgttggaagatgctctaagacccatacacaaacctcttgtatgatgtagccacacccagcatctaactctggacattatgggagtctagattgtcatcttgaaggaagcttaaggcatatcttttttcaaatggggcatgggagctacctgcagaatcacaaatgggtttgtggtcattcctggtctccactactgaatcacaacctgtgtcttaagcaagaatacctcatgagccagatgcagtgtatgagagtggaatgccacccccttctctggcccgttctcatcatacccctagtacgctgttctgactgctgcttttcagctggggtcacagaaggaatgactcccgtcatagtctggcccttagagaaggagagtgagcttgaaaaattggagtcagggtcaagttaggtcacagtaaatgccaagatggtcaaaaatctctgcataagccaagactccaagtctgaaatggttggcccaacaatgtgagagatgtctgaggggcaggcccttcgagggggtgtaaggggtactcgctttaaacctttcagcaggaggagcctaggctgtgagtccacttgagaatgtgcagggcccttgagcagagagcagtgggctggaaccacagcatgaatgtgactggctgtgcaccttttgacaagtctggcctctggacagtgactttcttgtttgcaaaaagtaagggatgacgatgagtgtttaagaacaaaatataccgatatctgcagcttctttaaaaatgcaaaagaaaggggagattggcagatgaaagatgagtaggaacgtgttgaaggcggagcagtaacacgtgaattctagagcctagagggggtagatagtgttcacagcagac

SEQ ID NO: 33775 - DNA, 2747 bp, Bovine  19866880983244
  misc_feature (1)..(1): n is a, c, g, or t
nctcgatagcctgcctcagaccaggtaccacccccgatccaacttctttggcccagagggaggctgactggtcagttccagtcacataccccaccaggtctgggtcacattactgtctccctttggcgttttccaatgttcctcacagcttccacctaattttttccctggcaggtaggaaccaagtgaccagtctgtgcatttcaatagtttctcctctcttggctgaacaacaaaaatgacttttaagaatcattccaaaccaagagcagggtaggtggttgggaaaagaagttcatgtttaattaacggaaactggctgtcttcaaatgatctcagtggtagaaacctcatttagcctaggtttagaacgggaacactcgggagattattaatgaagtttgcttttcatggccacagtgaaaacagagaggggagcgtaattgatgccatttagttaaaatgtggcaatttaatcactggaagattagttcggaggggagagagtggggacagggccagggcagaaccaacccagcaggcgtgtttaaacagtacacagcctaaagaatcatctgagctggctggctgcttggagatggagttggataaaacacatgactgaacacatgtaggttctatggaactcagaacccacaatcaatgcactaatttcagaagaatttccaaactggagccatcctgcatgagcctctactaggcatcaaacatcatcatgtggccacgtgagaaaagtaagcacgcaccgcgacgtagctttggtggggacagattctttgacccaattttcccactgagggacctgtgcccttactgactgctccccctccagttgcccctcgccatgatctctgagcagctggctcgtacttggtcttcagttgttgtttattcactaagtcgtgtccagttctttgtgaccccatggactgtagccagccaggctcctctgtccatgcgatttcccagggaagaatactgcagtgggttgtcatttcctcctccaggggatcttcctgacccagggatcgaacccacatctcctgcattggcaggaaggttctttaccactgagccaccagggaagtccctggtcttcagacctcaacctaaatgttacttcatcacagaggcctgactacaggaccaatttcccgatgtgatgtgaattctcagcatctcggtagctgatgtgtctgtggtctactggcacattcatagacttctttatggcctagcttaaggatgccccatatgacagagtactctccagttctggttgtcattgtgtggccagtgcctccaccagcaactggcactggtgaaagatgaatcgattatcaccagcatcccttagacattttgcccagacagggaccatagctgactccttgctcctctgcctccacatccctggacaatctcatgaatattggctccccaccttacagctatgggtgcttaggaaaacggttcatttctctgggctgcaatttcttcatctgaacagcaatggtcagaatagcatcaactaacagaattcctgggagggttacatggggtcaagaacacagaaaatgaaaggtccagctccagcatctcactcaactcttttaggattccagcattaatcacatagatctgtggatgtgtgtgtatcgacaggttgtgaattcttcaaggggagaaagatacgcagtttctctttgctttctaaagtcttgcattttgcctcaaacacagtaggtgcttagtaaacgttctgcattctgcaaattaaattggttgccattccaacctgacccaggcattcgaggggcttctgtactccttgatattcagctctccagagaaggcaaatccatatgactcgtgccttgagcaaaacattaagaagaaaggctgccagccatatgaaagtaatcttgccccacattctcacaccagatagaattgttttcagtcaaaagtctagtgtatgtgttctgcccttctaacccctgtttatcagggtgatcgcacagaaggagcaggaagtgacattgggtgggttgtcatctgggcctcatctctctctgaaatggatccatcttcacacccacttctcaagcagaggtctgttacccctcccccctgccaaaattgtccaaaaaacacaagacctaatgtcctagtcttttgctgcgtcaaattgcaaattcttcccttgtctagcctcaagggctctgtcaactttaagatcctgaccacagggtcacagagaagccagacgtgctaacaaaacatgatttgcttccctggtttctggtgtgtttgacaggagccttcaattcccagagtcccccagactctgaaaattcctgtcctggtccctaacttcaccactcaatggggcactgatcatttttccagacccctaaggtggctccagaatctcattccaagttctgactctgctttcctttcatccaacattatgaatatgcttcttttttaaaacatatttttcttggaaagatctgtatgtcctcactatggccttccagatttcactggagcataatatgccccttaaaaagtcaaccgccactgcctggaccgcttcgatgcagacgtgtaacagggaagcaacaagatctgctacgttgttccaagatggtactaggtgttgggggggtgggggtgggtgatggacatgtgatcccagacgtgccatctggaaacca

SEQ ID NO: 33776 - DNA, 1010 bp, Bovine  19866882061864
  misc_feature (1)..(1): n is a, c, g, or t
ntcccgggcactggatggcacatgaggggcgttgacaagcttaagaaaacaaagggattgggagcaggcccctgaccttgagtagccgagggctatctcttcatcagcttgctgcttcctggtacactttaacatctaaaagtgaaggctttgtctttttaagttatgatttttttatgtctacctagccttttgagtggagaaggcaatggcaccccactccagtactcttgcctggaaaatcccatggatggaggaacctggtaggctgcagtctgtggggtcgctaagagtcggattgagcgacttccctttcacttttcactttcatgcattggagaaggaaatggcaacccactccagtgttcttgcctggagagtcccagggacgggggagccgggtgggctgccgtctatggggtcacgcagagtcggacacgactgaagcgacttagcagcagcagcagcagcctttggagaaacccaggtcatgggatgcaggccttttcatctccactgtttcctccattaagtataaaaaaaaaatgttggtataaaggcaaatatattaacaccctatagtaaagtattttattcaccctaaatgttaatttttttttcttaaaaaaaaaaaaattaaagcctgttcaaggtcccctgaaagtattgcttcgtgtgcctcatgggtaagtcagctttggagaaatgtacccgatagagggaggggtgactgatcagcctctggttacgatctgatttcctggtggagtagtccgccagcctcaaacacacggtagagcaactcacggggtgtccggtgggaggcgtgagaagatgccccatgtcactcagctgagcctctggcagagctaagctgcctttatgaagtgattgttttgctggttctgaggaattacaaaccttcaaagaccttgttggcaggccgggaaccacttctcctcaaggcatctttaaaatgcaaacctggtctctcagcagacccactgcat

SEQ ID NO: 33777 - DNA, 1955 bp, Bovine  19866880111810
  misc_feature (1)..(1): n is a, c, g, or t
ntcatgtatggatgtgagagttggactataaataaagctgagtgctgaagaattgatgcttttgaattctggtgttggagaagactcttgagagtcccttggactgcaaggagatccaaccagtccatcctaaaggagatcagtcctgggtgttcattggaaggactgatgttgaagctgaaactccaatactttggccacctgatgcgaagagctgactcactggaaaagaccctgatgctgggaaagattgagggcaggaggagaaggggacaacagaggatgagatggttggatggcatcaccgactcgatggacatgggtttgggtgaactccagcagttggtgatggacagggaggcctggcgtgctacagttcatggggttgcaaagagttggacatgactgagcgactgaactgaactgaactgaactaatcctcggatttacttctcaaaaacttgtctggattttggatagccaagccatgcttttgagaaaaatgtaacaataaccaatattttcaaagaggattctggatggtactggccagatctgcggctggaccccttgctggtgagcctcactttttgggaagtggcaggcacgcaccatagtgcaggaagcttcatcattttcaaacataaagaaaatataaactctaagtgacctcgtaaattacatgcagtatgtttttaaacgcttgagaaaatgatcaattatatttaacaattatggacatgatgataaagttaatgtatgcagtttaaaaactgctgagtaacatggagagttctttttataattggcttgtaaaaatgattcctgggggactgtgacatttaggtagaaccccaggcatggcatttgttctctgtcatttccatgcattagacaaagtaatgaagacaaaccaaatggaaatagatttcatccaaaacaatcaatacaggcaaattaaataatctaatgtactggctaccaggctttgggattccacgaataggaaaattttcaaaagaggtttggaaacccacctagaactgcaggatttttattaaaacaaaagacatcttctatggaaattattccataaaaataagtaacaagggcaacctcaagacaatgcactgtttcccaagaaaggaccgtattttaacatttccattacagactgaaaattctggcagcaaccagcagaatatggtctagtcctataactgctagaatatagtttctggggaaagatgtgcttttcaaaaaagaagtcccttttcatgtgtttgttagccatcatcactcattatcagagaaatgcaaatcaaaaccactatgaggtaccatttcacaccagtcagaatggctgcgatccaaaagtctacaaataataaatgctggagagggtgtggagaaaagggaactctcttacactgttggtgggaatgcaaactagtacaaccactatggagaacagtgtggagattccttaaaaaactggaaatagaactgccttatgatccagcaatcccactgctgggcatacacactgaggaaaccagaagggaaagagacacgtgtacccccaatgttcataccagcactgtttataatagccaggacatggaagcaacctagatgcccatgagcagatgaatggataagaaagcagtggtacatatacacaatggagtattactcagccattaaaaagaatacatttgaatcagttctaatgaaatatcctatttttaatgacatttttcactatatttttatctgcagagaaaaatcagattacctctttaatgcatgcaggcactgctacatatactattttgaacaaatgagtgattctttttctccttagttcctcatctcttcttaaccaattctgctttcataggcacatgtttacctttttttctgaaaaggcagtcacgataagatgagcttca

SEQ ID NO: 33778 - DNA, 1069 bp, Bovine  19866880361576
  misc_feature (1)..(1): n is a, c, g, or t
ntgtcctgtccctagagtcgtcatcatctcacaaacgtcaactaaaaaccacaccccaggctccctgctacacgagcggacaggacagggtgtggtggacgttctgtggccaccagcttggtatgagtcagattctgcattcagcaagcctgcccgtgtcatgtttgctgtggtctgcttctgtgcccgagttctcccccggggtgagatgtgtggatgtccctctgcatggagctttggagcatcttgcaacgcccgctggcagtgagagtaagcgtttgtccccatctgctcgctccagagtcgaacacgactgaagcgacttagcagcagcagcagcagctcgctccctgcgtctagttaacggcaactgaatggtcagctgctgattcactggatgctgtttagtttgttctgtcagctgtttattcatctgtaacttcctgttaagatgcagggtgtgctttttaaagaagccttgcacagcataagttttattttgggactggatgtgctaatatataaagaggatctccgggagttatttagccccatgagctattttctctgagcaaaattttgtggacactccctgggtgccaggcgtgcttcaggacaccgtggtgcagcagtgaatgagactgtctcagcctcagaagcttgccgtccactcctgcaagacgagcacaagcgtgagtgcagtgaagtgtggtacacgtgcaaggggtgcggggtgcagagcagggctggaaactcccaggaagcaaactgagggagtccccgcggcagaggctctgggagggaatttagcaacatttcagctgtgggtgatagtggtttgtgtagtcgcttagtcatttccaactctcgtgaccccatggactgtagcccaccaggctcctctgtccatgggatttccgaggcaagaatactgccatgggttgccatttccttctccaggggaccttcccgacacaaggactgaaccctgggtctcctgcatggcaggccgattctttaccgctgagccagcagggaagcctggtggtcacatacaaagatgtcacgt

SEQ ID NO: 33779 - DNA, 1096 bp, Bovine  19866880402339
  misc_feature (1)..(1): n is a, c, g, or t
nacgagaaaaataacattgtaggtcatgttctcggtcttgagcagtcttgagcctcaataacagggctggaagaggctgccagcctgcagaggtgagggtcattcttaggaaggcgatgaccagcctcttggaagaggcctgagcacagcttctttgtgtcctccctcatcatgatgggtggcaggtgtctggctgggggcaggacccagcagacagccgtgggtcaccctcatcagctctgcaggactctggccctggatccttggcccctaaacagcagtttggcggagcttgcatcccactgatgccccgcagctctgatgctgtctgcctgactcctggtccctgcggcatctaactctgctttctaactttccttaaagccctcccgggacttctctaagagaaatgggggcttcaaatgtcaagaaagaggagaacaaggcacctctttttcctcctcttgtaaaaagaccctaccgttgatggtgccttttttaaaagcctgtctctcccctttcccttcttttccaaaaataggtcttgtgaaagtcagtgtgagctgcagcagcctcgcatatgtggcttcccatctgcagctcggtctgcacaatgcgccatatatttagctgcctaaatcgggactgttccgtgtgctgattcaagaggggctgggaagtcacatgggcgagcagggctgtttgttggtcaggactggctgctggatgctctcggctctcacccgcggatccagaagtgagagatatttggggacatcaagagagcagatggcccatgaaggcagctggcccaggcagtaattagtccagggaggtgatgggtcattttctgagcttggagcagaatttcgcacctgttgttgccattcaagttgcagagtgaggcttcgggtagaactggtagggctggaaactgtcagtgagtcaccacagctgagagacaacagctcggctttgcttccccagtgaaaggttcctagcaagaagatagaaggggagaggttctgtttggtttaagtttaaaagcagaggtactcaactcctttttcaatgaatgggttattcctttttaagt

SEQ ID NO: 33780 - DNA, 3377 bp, Bovine  19866880452874
  misc_feature (1)..(1): n is a, c, g, or t
natggactatgcaaatatatggttgaactaacatatatagtaataaactatattcatcattaataattaacaatatttggcttgatcaaatagttcagccatggatttgtcatgttcaaatgattagtctttgaacaactgtcccaaattatctcagaatatatttatgcccacaagctgtaaaacatatgtagtttgtggtctgggggctaatggtgcctgaaagtatctttccacagtaattggaaaaagcctcccatatttggctggctatttttaaacacagacaacctctcactccttccaaatcagatcgctttaaacttggaaaaaaagggctcttattcaggacatgtgtgtaccagctctacagcccagttccttcaaagtatctggatcgaaatagtgcccggaaaaagtgattaaagcagctatgagttttaaaaacgtcaaaaacagccatacagattttacagatgtatttaaaaacaaatgaacagaaactaattctacccaaagtacctggaaaaagaaaggagccaggaacagcattactctaaatattagagaaatgagcagtggagaggaaaagtatcgctgagctgagtcaaagccaagaggctgcctctggccaaggggctttcgatggctattttattcccgagttgtctctaaatccaaaaatgttcagtgaagccaatgcagcaggagggtgcggttctacgtggctgaggtgccacgtagaacaaggtgccgttggacgaggtgccaagagcagagcttgtggcctgcccaaggggggcgtcaggagcccacctcgagggtgagaagggccgctcctctctcttttcacctccccggcattcccagcacggtgcaaagcagagaaagtgctggagaaagagcaaaagtgatggggctcttgagaaaggcagctgaataaattaggacagaaagccttatatgaatccctgatagttctaggaccggagtggcttctgtgaaggaactgtagtgaagagaaagggaacagaggagttctagtaaaagaaacatggcccatctcttccaacagatattcacgactggagactgggtgactctgtgcgggtctaaacactgtacgaggacaggcctctgccaggcactgggcctagggccaccttctggggcgtctggagggcagcgggtttgagccagacctctgtgtcctctgactccaggacctgggatgggcaaccttccgtcttacgacagttctttcctctccttagaccgccgtgttgcccccgccctaggaaaggaacgtgaaagtcactcaatcatgtctgactcttttcgaccccatgggctaaactccttggaattctccaggccagaatactggagtgggtgagccgtttccttctccaggggggtcttcccaacccagggatcaaacccaggtctcccgcattgcaggcagattcttgaccaactgagccacaagggaagcctaagaataccagagtgggatcttcccaacccaggaactggaccggggtctcctgcgttttatttaggcacatcctccaccaactgagttctgagaggaaagaggaacgacctccctgggactaactaggaaagagtctgcaggcatggacgtgtcaggacacagccgagggccggcccagcctgacctcgtcctttctgtacgctcgttcactaagaaccagggcccacgagaagggaaagtttggacggaagtctgagcaaacagagggccaggaaaagctggcaaagcacagtaatgattacaagcacagacaagcagaaaacccagcgccagcttcccagaggtggccgcatctcccaacgtgtggagctagaaaatggaaaccctggaccggcggactttccagggagggcagggtcagagaatgaagagatacggcagagtgccagcccttattgaagattcacggagcaccttagcatagtaagtgttagtcgttcagttgtgtccgactctttgtgatcccctggactgcagcccaccaggctcctctgtccgtgaaattttccaagcaagaacactggagggggttgccatttctttctccaggggatcttccccgacccagggatcgaacccggatctctggcactgcaggccgattctttaccgactgagctaagagggaagccctcacatagtaaaggctctgacaagtcccacagcaaagaaacaggatttcctctttcattttgaactggctggacgatcgaaactttaaaccatgggtttgttaacattgcactgaacacagtagataaaacgttgtgctagggaataaaaacccaagctccccaacgggcatgcgatgccctgcaaggtcagccccctctgctgcctcaccagggagcccagccccctgcggctcatctttgcactgagcccacacagtcctcaagctgcataccgctggcctcagggtttcggggggtgtgttttgctgatggcaaacaccgtttctggctctcctcttccgcgttaagggtggtgtgagactcacgcggggcaggcagctgccagggatattctgtaacctcgagtggagccgtctacacctcggtccccagcaagatccaccctccacacggcttcccgacacagcatctcgcttagtcctcgcttctgttctgcaactgagacatcacttccgtcatcattttacagatgagagaaccaggatcacaaaacccaggggctcgcccaggatccctcatcagggcggtgggggggctgttgcagtggagtggctccctgggttggaaaccctcggccccccaggagctacttccttcacaactcaggatgctcctcgcccaacagggccctgccagcaccgcggcggctcccagacagtcctctgctgacgtggaagacagaggacagtctccgatggagggaagctccttcctgtccggtgcgcacgtccttctcacagcagctgcttttcccaattttccccttggctggaatagtttagtcttaaatgttttttttttcctctcactaaatgaaaaacaaacaaaaagcgtagtcacgtgagtgaacacatgcgaacgtgtttcttttagaagcaaatatttgtaataacaaagagctggaaaggatgaaacgtctttttttatacatcattttcactattttaaaagaagcaagtgactaagggaggagcctccaactgcagctggaaacactgagctcatgaaacctcggtctttctcagctgcccgtgtccttggcctgcccggagctccctggcagaaagcttgtccccccgtgcccagctggtacccatggactgtcctacggatggagcttaaga

SEQ ID NO: 33781 - DNA, 1315 bp, Bovine  19866880656428
  misc_feature (1)..(1): n is a, c, g, or t
nagatttatggaacggaacaaaataattactgtacagttttaaaaatttttaaccattgctttaatgcactgcttcagttaaccaacatgatttcaatttattatgcaaatacaacaattattccattcgaaacattagaaagattgcatactttgtttccccagcacaattaatggtgttgaatgttccatttgtttgtttggttggtttttttttgacttgcttatttggtctttagtgacaatccatttaaagtaaaagtcttttaaagtggccgaataacatggtaacgtgtcttcactggtaatttagtactcgcatataatgagttagtactcgcatataatgagttaatccaagggatgtcattaaaaacagcacggtgcctgaattcccaagctgagatgtttttaatcacagaattacagtaattacataaatcctgggattttcatcagacggaaacatgcactaaacatgcactttaaactcgacaccgatacccaggtactgtgctaaagtataggctggagaatcctcaggccaagggagacattggagagaatgttaggtgttgcatcttaacggaaaattgggaaatcagctattttggtaacagtaatatcatacgaggcacatccccaggagcaggagagaaaaacccccggctgcggctgcaggacaaagggacgactactcagactcagtgaccctgctgttcgctgcattttcagcacacggagggtgcagaaggatcacctcctccttttccctggggcccagaagctactaattgcctagagttcttccggtccatcaatgagacagcccaccggtaaatgaggcgagaatctggatatctaggtctagtgaagactatgtgaaaataactttgttatcgcagggattttttttaagtattgaaatgacccagacacagtaccctcagggagctcgtttcagggaagtgatatgttgagtaagaagatgagtgcatctaggaaaatttattaaaatctcccaaaacaagaaatcttatttgattcatttattgttctttcttttttgtggctcagatgggcaggggagtcgagaaaaggggattgaggaagggagggggttgagagggtgaggaagagagggtcattgatgggtggaggaggaaggggtgcctgggaaagggggacagtgggtcagagccaggtggccctgcatttgtttggggggatggtgaagttgaggtacagagtgtgtgcgtgtgacaggccgtgtgggtcggctgggtattccggtagccgccaggacagggaatcc

SEQ ID NO: 33782 - DNA, 1606 bp, Bovine  19866880656746
  misc_feature (1)..(1): n is a, c, g, or t
ngggcctgcctgcctccctgtccactctttgttcctccccatttaccccgagaagccgggcgggaagcagcccagtgaggtaggcgggcttttactgtagttactggggaatccacaccaggatagtgaggtgggtcctgctgccacaggtgccccccgggggcttttccagggaagggcctaggtgagaaggaccaccaggctgcctcccctgccacttcagggggtgtgagacaggccccagcgactcagtctttgatgtgaggcaggcgtgtcaagcttgtctttaccccgttgatgtgtggtcactggccccaccatagagacgacactgggctcaccagagagcataaactccggtggaaagtgaccccgtcctgtgaatgtagggtggagggaagagccctcactggcctctctgggtgctgggcagtggcctgctagaaggaaggggaccactctctgcatggcgttcacgcgctgtgtcctccgcttcacacctggaatgccccctttcttccctgccgcagtcctgggaagtgagcttcttgactaactctccaagcaaaaatgagagacgtggaagctcagagagaaaacggtcttgtccaggggtggcttgagagtgcggggctggagtgcgaacttaaatctgctccgttccaaggtgtgcttgggtgcccccggccccgtcctgcggactgttgctggtccccatggtcaaggttgccatcgctcttgcttctgaatatcttctctgcggtgtgggtaacaggctcttaggaacataacaagatgccttgtagtgctttattacctatcagctgctttctgtcaccccttgttctgggacagattctgaaagaaaagaagatggtgaccgaggattctgccgttttctccgccgagtatgtttagattatgcttcttttgattttataaacgggtgattggtggttggataagccgttagcagtactcactggcagtgtgccttacatctaggatttgtggcattagctagaattttataatggcgtaaaagaatttcatggaggaaataagagtatcaccatgttgtataaagctaacattagtagaataaatattaatccgaggttaaatgtttttagcctaagatttctcttaattcagtatccagactgagcctttctgtgttggtttttttttaaaaaaagagagagaaggaaaaaaacttctatttcagctcagtttgaaattctgatgtgaaaatcaccgtggccttgcagaagcgcagtgtgagtaataccgtgtccgtaacttcattccagaagccgggtaccactgcccagaaggcaggtggctatgtgcttccgagttcctggaacacaggtttctcagatgtcagctctggagggtgatcggttagtttgactaaacataagtcataaggacctaagtggatggaaaagctacagaggcaaacgatcttccaaaagcctcacagctgggggctggcagacaccgcttctgattttgtcatcatagataatgttgtctgtagttgccgtatttaagaaaaataaagttggccagctattacagtagccagctgtccggcttg

SEQ ID NO: 33783 - DNA, 1417 bp, Bovine  19866880707840
  misc_feature (1)..(1): n is a, c, g, or t
ncggcggtgctcagctgggaggagcgtcaccgcgaccacgtcgggagcctcaagaggcagatcgcgcagctgcaggaggagctgcaagagcggagcgagcagctgagggccgcgcagcagctggcgggggagcccgcgggcgccccgggcagggcccaggccgacctgctggccttcctgcgctcgcaggtggacagggcggaggtgcacgccggcgtcaagcaggccaccgagtacgccgccgtgcccttcgacagcttccacgctgcacaaggtgtaccagctggagaccggcctgacccgccaccccgaggagaagcccgtgcgcaaagacaagcgggacgagctggtggaggccatccagtcggccgtggaggccctgaacagccccgctgagagcagccccgaccagcggccctacacggcctcggacttcattgaaggttggccggctcgccacgggggtgggaagtggtgggaggggcccggggtcccggtccaggcaggcccgggctgtggaggtctgcggtggctttggggatgagacagtcggctttgtgagagccgcattaaggacgagggaccacagtggctgtgacctgcaagacgactcagcgtggccagggaaggtgcagagtcaaggagggaacaaaggaagctgaggggaagctgaccaggcagcaccaccaggaacagactgacagtactgttgactgaagcaagcacaaatccaccatgagcccaggcctggactgatttagaccagttcagactggtttgaactggctggaacttgtttagaccaacttaaaaagcctctgacactggtttagacctgtttgagctggctgagactagtttagaccagtttaaaaagcctctgaggctggtttagacctgtttgaactggctgagacttgcttagaccagtataaaaagcctcagaccggtttgacctggttgaggccagttcgaaccagctgagaccaggtggaaatggcttagacccatttgaactggctgagaccagcttagaccagtttagattggtttagaccagtttgtaccatcttagactggttttatggcagcttagccaagagcggttttgagtgtgacaggcagttttcgttttatgacttcttacaggcacttctggagacagggtcctttcatcaggtcacagaacaataataactaatgtgtgccaggctggtctagctctgttttggagaaggaaatggcaccccaccgcactcttgcctggagaatcccagggacgggggagcctggtgggctgcggtctgtggggttgcacagagtcagacacgactgaagcgacttagcagtagcagcagcagcagcagcagctctgttttagcaagtttacacttacagtgaccccttggagggggtg

SEQ ID NO: 33784 - DNA, 1027 bp, Bovine  19866880714713
  misc_feature (1)..(1): n is a, c, g, or t
nccagcagttctgctgggacaggacagtagcatttcggtaggaagactgatggcggagggcaggtaagctgggatgaggctgaagccagaaatcgggggaaggcttgcaggctggggctgtggcttaggttagatgggtgggcacgggaagagggtggggggctcgtttcaaggtaagcgttacattcgtgagcccgcatgcagcacactctgttggctgctttcctaagccagcattgcatatcgcgttgcacaacactgaaacgcgcttgctttaaatagtcctcatgatgcttgccgttatcagctgggcagggcccaggacagcccactcggacgagcccgttcatggctgagctccagagctctggcctggccagctctgttctcagatgtattcctttatcaggaggacccgagggactctagctgagcccagcaatatggttggcagcctgaacctagttttttcttgttgttgttctgctttgatccggtttggtttttattatatcatgataatgttgtcaaatgattaccctgccagacaaaactatcaagaccattcacaagattgatttaatggcggcgtacttgaggttgaagagaatattgctttccagagtatataatgaaggttttaaagactgaacagatcaagcttgttctatggaaaaataatatgaaggaagtattaggcagggtccctagtagaatttagatttatgcaaatcttcagtgtcccataatccaaaattaacaaactcagaatgacacaaatttgttaaaatgtaatgcaaactaaacatcttaatgcatctttctagaattcaacagaatgttgacatctaaattcacattatgcaccacatttaatttccgcatgatgaaccaacgggcagaaatagatgagttgctgacacattgacttttttccaactcccaagaagaaaacaaaggttttcagagataagggaggagttcagcggtccattagtcttgtaaatccataattacacacacaaga

SEQ ID NO: 33785 - DNA, 1505 bp, Bovine  19866880749150
  misc_feature (1)..(1): n is a, c, g, or t
ntgtataatgtagagaattttgaacctagggtgactatccgtattcgcatttatttcagcacatcttaggatgtgagttttccttctttcttgttcctgccttgggacctccgtgttccattctcaagccccaagcctcctgtggctggagtgcaatgattttgcgatccctgcagtgtcttcctgatgagaatcctctcgggagatggaggcaggggaagggtctcgcggttggcgtgtgaaaaagcatttctgtgctgagaactccgagcggcagacgaggaccacgccccggggtggaagctgcaggctcctttgttagcgctgtgacttcgagcctgctgacgtttacgagtagtggagtccttcaatgcccgcctatttttcttgtctgagatttcacccatcattcttactgactccactcatcatgttaactgcgatttagatgcttgtttctctggccccagactcccttgtcccgcctttgaacttggtgcagactctgtcgtgaccttggcatgtggtggtccctcctgccttggtggggtggggggaccgtgtcctcactcccatgacagaaactgaatgtccagtgctcttgggaccccggaccagtgggaccgagcaggagcagaaataaaggaaatgcatccttttctttctggacccacagctaccgctgggaggtggaatggtcacctctttgggggtgttggttggagtgaaattgtttgtctttctaaagcaatactgtattttaggatatagttgatttcgtagtgcttttcaaatattaacccgatatataagtttctgggggcagatcgtgagtaaatcttaaagcacaagctttcaggaataaaatttaagctcttcagagttgtcaacttgaggaggaaaaagaaatgagataatccttcagaaaggaagcgtcatgtggaagtgtgagttggcgtctgaatgtaggttaactttcttccccaggagtaactgtgaaaggatgcctcttcaccctcggcgtcctgaaaggacgtgtggtgaatcccgaggcagtcacatgggcattagcagcagcagcctctcagctcctgctcctctgggcaccatcccgggcactgggagcccaaagtgcaaacccagacagagcacagctcatggagtttgcattccaattggggaagagagtaaatataaatctgaaggagcagctcacacagcaagaggaaagatgggttcctttatcagggaaataaaggcactgtggctcagatggtcaagagtctgcctgcaatgaggcagaacctgggttcagtccctgggtcaggaaaatccgttccaatattcttacctggagaatcccatgcacagaggagcctggcgggtcacaaaacattggacaaaactgagcaactaacgtgcatacacaagtggagggcttctggggagaacacttcagtctgaaatacagtcatcagcatgagcgtcgtgctggggcggacagg

SEQ ID NO: 33786 - DNA, 3489 bp, Bovine  19866880929396
  misc_feature (1)..(1): n is a, c, g, or t
ncacgccaggcctccctgtccatcaccaactccccaagtttgctcagactcatgtccatcaagtcggtgatgccatctaaccatctcatccacactggaaatctcaccatcactttgacgaagcccacacaccctagattcaaacattcaccaaatcctgtgtctttttcttaattttcaggcttttgcttatttattttcttacattccttagactactactcagactactgcaaaactcatggtagatttaaaatgaatatccacaaactacaacttaacaaattcttacaagagaactgtaaattgagcaacaaggttatttccatttgaccaataagaaatgggaggttcatcgaagtgaaacagcctgcccaggaccacgaagccagcagagaggatgacttgacctcctgtcttccggtcccaaatccccacagttacaccactccaccaatgtacactgaattttatgagagaaagggaagcttcaagacacccattaacaggtgtttcagacagctcttctccaggttattactgttgacagtattactattctacatttatatcctactatatgccaggcattgtgaatccacctacctatctattcttgatttttcacttaatgtcatttgcttctaaataggtgttattcattccattttatagttggaaaggttccctgatgctctgtaatttactcaaagtcacacccctagtaagtatctgaaataggatctgaacccagatatgactggctctgaaaccctggagagcctccaccctcagcaccaagcagggactcctttggagttaaaaaaaaaaaaacaactcaccatcacaactacttcaggaggctcaaagagaaaatgaaaactgactttctacagaaaaacttctaaaacatgagaggaaagtctgaagacatcactagagcaggaataatgaatcggcaggcagggacgcctcacctgatcccccagcacaagttcaccagatcaagagctttccctgtcaccagcttagctagcgccaagggactttaatattttacattatagtaaaataccttcagggaagtcccaggactcagcactttctctggcaggttcagttagtcactcagtcgtgtctgactctttgcaaccccatggacggtagcccgccaggctcctccgtccataggattctccaggctagaatactggagtgggtcgccatttccttctccaggggatcttcccaacccagggatcaaacctgggtctcctgcattgtaggcagtttctttaccgactgagccaccaggaaagccctccactgccgggacccaggctcagtccccgtggggaactaagacaccacaagcagcgtggcacggccaaaaaaagtattaattaattagttaaatacctgcaggttttacgtttgaatgtcaaaaaatatttgaaatttacttcaacaagtttctctaaacattgtttcatgcgaccttttcctagacagaaagacactaaagaaaaaggaaaactgaggaagaaaaaagcacttccaatgtcagcatctcatttgataaaggggggaaaagaggccggcagaaaaaccacagctccagctggagtggacggactgactgagcactccccaggcataacagctgcacacagatgtcatccacccctctgctgggctcctgggactctgagcgccatctgaaagaacaactgggatgccagacatcgaacgtacctgttacaccgaaaaagtaattttaaaacgcagctctgttgtgtatttcagagaaccaaaagagaagctcctgccatatggctgtatttgctgtccctcttttcctctctgtctgaaccgaagctcaacagaaataaacaacactcagccccgttcatgctcacagcagccgcacgtgtgccctgcaggcctcagatcaggactcaccaacgggagccacagtcctcaggggatgggctggcgaagaagcacccagacataaaggaacccatcggacacatataactgaaagtctctatttgtcccttctaatttgggagccatgtgactggattccacacagcaccgctgaccccatcagcccgggtgctccacagctggaccacaaagggagggatgctacgctttgctccttttccaaaatgtcacgttccgttcacggggtgagctccttcctgatgggcatgcagctctcaggccaacatcagtgttcaagcacctgagtgagctccttcctgatgggcatgcagctctcaggccaacatcagtgttcaagcacctgagaggatttaactattcctgccagagcgattccaggatcttaaggggccttttcagatccacctgataacacaaaggtgcataatcctttacaagacaaagagtcagcacacgcactctttatgtccttcccaacctgattctagagggttactgctttgaagtactttcttcgttgatgtgagtggagctcagtccccctctggccacaaagcctggctatacccaggcccgggcggcaatccagatagggcatggagctgggctggagtgccgcgcgtcctggccaccctccccagccaggctgcctcctacagggagcgaaacaacagagagcagtgtcatccactgttcagaaggagaaaccactgtcagaaaccaccgtgaaatcatcttggctgacagtaaaagcagacactgatacagaaaagtatttaaaaataaatctaggcaaggtcaagcaaaaatactgttgttttgagaccgaaataaatggtctctggagcctgaccgcctgggtggaaatcctgggcgtggcactgaccattcctgtgactgggcaatctactcaactgctctgagccttagtttccttatgtggaaaatcagaacactaatgcccctttctcttagcttattatgagaattaagaaccttttctttactaaagaaataaaacctacggcatacatacgatgcacacacacaagatggtgttcagagactacctaaagtcagcctgcaatattctctaacactttatgtatcaacatcaatacctcagcaggaacgggcttcgttcttttggttcaagtccagctggaatcaaagcagtgttagcagtgtagcttagtcttatcaggccctctcctttctgccttcttcagagttcactttatccaacagagtcagatccctcagtccgctcccaaggaaacaggagaggccagtgagtagagatggaaagttgggcacacacacttgtttcatgtaccacttttgctgtgttgttttatcacatttctgaataaattttgagtgtttttctccttgaagccttgactcccctgactaaggaaagccaattggggtgacggctgtgttgtcagcgtcctagtccagatttccttaacaggctcaatgcctctgtctacgccttacctctgcggaggg

SEQ ID NO: 33787 - DNA, 1269 bp, Bovine  19866881040921
  misc_feature (1)..(1): n is a, c, g, or t
ntttcatcaccagtagagttcaagtctgtgcactgagattcttttaataacgttttcttatctattttctgtttccccaaatgaataggattaattgtgcctagccacaggattgtggtttcataggttcttattaagcataggtatgctgttttaataatattgagcagtccaacaggaacaagtgaattaatgctttctgtccttgtctctcttctgttagatggagtccattgcctcacctgtgcaatgatgcttcttaacacagatctccatggccatgtaagtgtaggggtgtggagctgtcttacagagagagagctccagaatttcctgggcttatctttgcttttgtgttcatacatgtttactctctgccttcttttatctcgttctctacatggcaggtaggtaaacataaatctttggaaaaagaaatagcttttttacatgctagcactgagcataattttaagtatgccccatgttgtctgcatgtctggagttctagctataatgcgcgcagtctgttatcttctttgtccactagatggcagactgagcttttacttttggttttggtttttggttagctatgagggttgatacagaattgcagaaagaggatgttaagttagatctgaaagtgttgattgtgttttcactaaatatagtagcaagtgttaagagctaagttttttaaacaccccttagcttacctggtcttttgcttgttgaaatatcaatatagtctacttaaagtataggatgaacttcttaaatttatgattgtaactatactttcacctttcacagaggtggaattttagcttttgcttaaattgttcatattagagaaaataagaaatgttgtagttaaatatagatcaatatagatcaaatatagatcaacatgtacacagcacaaaaaatatttcatagtcccacgtccatttattttgaagggaaaatcatgtttcttgtgatcagtctacatcatcccttgatttgccatatggtttttaccttacaactaagaaatcatattaaaagaactaaaactaagataatggccctaatttgttcttctgttccaaaaggtcacaccttattttaaacaagaaaaaggataactccttttcttgttctcctctttaagaaaggcaagtagagctgtatggggtccttaagatggactgagggggacaagcctcagtttaacagggcggtaaaatgtcttgggaaatgaaggtactgggattcccacag

SEQ ID NO: 33788 - DNA, 2046 bp, Bovine  19866881126780
  misc_feature (1)..(1): n is a, c, g, or t
nagtgctgcttggatccctcaggttgattccatttaatttaaaaatatatttcaatttattaaaaaataagatgcgaaacagaacacactccaagatgtattcctgtttatcagtttttccgtactgtgtataccagatgctaactcacgtttccaagttacgtcgctttgcatatatgccttggaatcaagtctttcacgtcatttccttgtatatattcagacagctgtcaaatgtctcactgaataggaaggttgcggcttgcagtgcttgaaaagcagtaacagaagcagcaggtgtcctcgtcataaagccgtctaggcgaggacgctgcatttccagagcacatgagaatactctcaatacgaggtaaccaaaaccaagttcagaaggagactgaatcctggggtgataggactgttatccagaaatcctcgatttaaaattgtgtttgtcaggatgtcttcatttttctcagtgactgccattgtaataagaaaaggttgttaattggatcctatatagtaaatatatactgttgtttttactgcttcgtatactggggttctgcataagatgctgcttaaatttcatgcagctgggatcccagaaatctttctttatacatcaattttcctcttcaattttgacttcactctcattccccagagatgttctgaaagcatcttttccccccacagaaatcccacagtgcaggggaagtttccagctgaaaaaaatatttgctaactttaaatagatcatgtcttttttccttggggctccgtctcagagattgcactgcagcgatcctgttagttcagtcacaaggcaatttgttgttgtgcccagtataaatattttacttgctatttcatgagcgatatttggaaagggatacatatccttattttaacctgtttttgcatatgcagcaaccgagttgcatgtgtgggaaagaagctgggttaaattggattgcctctgtgtatgccagaacctctgtgggttctcgtgtgtaagcccagtggaggggaccccccggcagcgtgttgagcagcttgtgttgcagagggtgggggaggagccagtgaaagggtcacctgaggatgaatgagcgcctgatatgtgtgggaattgattcacacacacgggaatgtgctgttcagaaggagtcacgtgtctcttctcttctctttgtaggtgatcatggaggaagcactttactccccccgaatgtcacgaatgagtttccggagtatgggaccatggaggcaagtggagaaggcctgagagcctctctggagtttgatgccgagtctctgctgcgctgcccggggggcccgcagggggcccagccccttgctggccgtcactctgggcctgtcactgtcaccggaggaccaaaagatgtcagagggctcccatctcaaagtcacttcaaggaaccaagtttacaacccattgactctctgatttcagctctgaaggccacagaagccagaatagcttcaggaacgtcgcaggctacaaaggtactggatggggctgcggtttctacttttccagctcagcagggggggcaggagccagacaccgccagtcataaggcacggaaagcccacgcactgttccctgctggctgcgaaaagtcgcccgacatacctctttcagccaaagttccgactgaggaacatttttatttgagcatccaggaggatctgactgcactattaactggagagattcaagcagagccatccctaagagctagtaatggaagaaagggggctgtccacgtgcaagagccagctggtccagcatccttggtgggcagccccgcgacccccagctcggcgggcggtgctggtttgttgagagagaggaggtctgaccagagagagcaccccgggcaatgtgctccaggacgcccgggccagggcaagcatgtggcgtttcaaggggtggacacactgtggaccggaggggaggagagagagagccggcgccccgcggatgcctcagacaccaccgggaaggacagc

SEQ ID NO: 33789 - DNA, 1213 bp, Bovine  19866881145007
  misc_feature (1)..(1): n is a, c, g, or t
ngcaggtccggtcggagacctgctccggaaggtacacaacctgatgccatttcccaatataattttgctagaaaataacataatcagaaaggcagcaatcgtccaattacatcgtctgtgccactgactgttacgcccagatttccccttccgtcagagtcctgtgactcaatccacgctactgtgcttaccaaataacttcttggaaagtaagagttgttgaaaaatgaaattcaaaacagcctgtaagttatcatatgcagagaaaagcagttccactgttccttaaccaataatcacgggaaggccaaacaaaagaaacaaacaaaaccatctatttaaatgtttccactttaattgtccacagactgaagagccataggaagaaccagcttcatttctataagtcgctttttctcagcagaggtctgggaacagaaggcaagagaatgggggagcaactgccacgtgatcttcttatgactgccctcggctcagcccctcaccgtcctcctattgtttcagacccctctcccaacaacctaaatcccagctccctagaagaaaaaaaaacaaggaaagcagactgatcctcacacatatacaaaactctaggtcacttctctgtgtgacgtaactgtaagtcaaaatgggcgagctttacattcagtttcaaatggtgaatctgctttatttgaattccaattaagtacttataactatatggaattccttacataatccctttagtatccttttagacactgcatttttgaaggaaaaatacacagtttccatctcttgagccaaacaacaatcccgctcccaccatttaagccaatagacatataaaataatgcttgctgacaaattagtcatccaatttcagattccaagacccagagaatctaaatacgagagccaaaatcctgcaacacacaatgctaactttgaggacatagaagcagagtggtggttaagaacactcgaatgccaagtttaaatctcagctctgtggcttatttagctgtgttaagtaacttctccagacttcagactggaagtaatgacagtactgaccacacggggctgtaatggggactagaggtaacctgtgttaaaacagcaactagatctcaataaactttagctgtgattgtaacaatgtatcatgcttgaaaatatcacataaaataagcattttcccaaaagt

SEQ ID NO: 33790 - DNA, 1924 bp, Bovine  19866881170202
  misc_feature (1)..(1): n is a, c, g, or t
ntgtgtgtgtgaggccagcgtgactctgaccagcctggggagacctcctgacctgtccgtggagggaggcctctgcagttgtcccacatctgacgctgatcctggggccttaagaagagcatcatgctgggaggtgggagacgtgggctctggccctagttctgtttacattcacagtcttaacctcattccgcggcctttatttactctttgggaaaatgagattaaagtaattcacaaagtgtattttcaactccaaaaattcattacttggctctgtgttaaagtgttagttgctaagttgtgtctgactctttgcagccccatgggctcctctgtccatggaattcgccaggcaagaataccggagtaggtagccattcccttctccaggggatcttcccgatccagaattgaacccaggtctcctgcgttgcaggcagattctttaccagctgagccaccagggaagccttggctctatgaaatcatactaattctggctccttaggttagctctctgtgaccagttaggatcttctatataagagcagattgaaaagcaattaggagcctggagttggagcaggtagaggagctcccgggttgagcagccatgggtgccgctggctggatggaggctggatggaggcaggtggcttgagagaaccggtttcattctcccactgtctgccttggggctgtttccacagcctgacatcctgccctgtaattctgtggaggcagtaaccactggttacccttcctcagcctgagttgactgagaagaagcacttactttgaaacccaaatacgcctcttccaggaaggcgaatgcacagatggcagcagactataattcttttcttggctgcataagtgactgaagcttgcgtctcctccagccctcatcagagggtccttgtttctcaccggaacgcagaagtgggagccccagcagctggagtgaaaccagggtggaggaggtgcgcgtccacgggcccctctcctgactcagcgttcggcgtgtgaaaccagggtggaggaggtccgcgtccacgggcccctctcctgacttagcgtccagcgtgtgtctgtgtgtgtgtgtgttgcaggcctgtacgcagggccacgttcccgccctttggagctgaagcggcgtgcagggggctgtcctgagactgggctttctggtgcctgtgactcgctctgtgactctgggcatgtcccttattcctttctgagctgacctcatgtttcaaatgagggagttgggctagcagggtagtatttagggcttgttccagagccagtgtgtgccaggaacttgagatgcccctcttcatccacagggtgtgggagaggggcagtggagagaggcagcggagaggggcagctgagcggggcaggagggagcagccagcctgtgcagatgccccacgtctagcctggaacccaagcgggcaggagctgcctcctgacttttgtgcagcacaaagtcccagttaccgcagagcgccttacagtggacagtgcctctggtcagtgtgatggtttgggcatctatttatctaggcgtcatagcctgaggtaccctgttaggagctgagccgcccaggaacaggagaggcctcccagtctgaatggttccctcacggccatggcgcctttgaactctctgtcccttcacaaggagtgtctctgtccaggggtggcagagccgtttctgcccatccctctcgtcttgtttctttgtttttcctgcgacagaagcctcaggggctctcaccgcccggcccttgttaagtgtctgttcacattcaggttgaagacctgctagtgcctttgagccttgaagggaggtttagcaaggaacatctgtgctcctccaggggacctcctattcgatctgtaagccagcgca

SEQ ID NO: 33791 - DNA, 1498 bp, Bovine  19866881206957
  misc_feature (1)..(1): n is a, c, g, or t
ngggtcgcaaagagtcaacatgacttagcaactaaacaacagtgacaaagataaagcactttctcaagccacataagcaacatgggcagaagcagaagatagcttcaaaggcatcacctttattatatgctactggtcatcctgctttaaaacaacattcttatctgtgctaaaccataacaaaatacatatcacagaagctcatttgaacaagactttaaaagtcatttagtccaaatgtttttttagctgaaccccttgttcaatatccagactaactgcccagttactgcttggacacctgcaggccaaggaatcacgtctcatctatggatacctccagctctagaaagactgactttcttattccaagatgtttgatgttcattcctaaaactgcttacatccacaattttgtggtcacgtagtttcattttaaccaaacagccttttaggcatctagcacatgtgtacagcaaaactcaacattttatattttgttttgtcaaacattttaaaggtaatagctaagaaagtattttatataccataaactgtatactcacacacaggattaaaaagtacaaatcatatttctttacttgataatgatataaatagtacattcatctcacattaatctcagagaagcaaagctatgtaagttttcttgccttcaatgcccaaaagtgtaaaatagaaacctacaaatgattatgactgtaccctgtaacatgtccattaaggactactgctatgcccacagagcagaactcgtatgtatggagaaaacctgcagagatgggcctgtgtgcctgagaaccccagggagctcaaagttctgggtatggtataaaaacaaaacgacgcttcattggaccaggcatcaaacgaccaggcacacacttctcactccttcctacctgagataccaggtgcttactggattacacaattgggcacaaaggcattctatgacctcctaagaagactctgaatttccaggtgtttaataaaatttctggggggaaaaacagttttattgagcaaaggacaagcgatgctggaagcaagtcttaaaaagaaaaagaaaaaaactacatccacatcctcaaactacctggaactatgcatgtttacagctatttacaaccgacaaaatgtagccagactcagcagctcttgatggggatagaaatataaaacatcatatgcaacttgatcaaaagaagaaatgaacagtgaaagactcttgaggaagtacatattaaacctgctaggaaaactgacggaagaatccagccttgagtactgaacccctcctcccacctgaccacccacccgcccagcactctcagttcagtcgctcagtcgtgtccgactctctgcgaccccatggactgcagcacaccaggcctccctgtccatcaccaactcccagagcatgctcaaacctcatgtccatagactcggtgatgccatccaaccacctcatcct

SEQ ID NO: 33792 - DNA, 1041 bp, Bovine  19866881210667
  misc_feature (1)..(1): n is a, c, g, or t
ntttttttttttggtgctaaagatacagtttctattccatagtccttgtcaaagtactgcttctgagaatggtgggtaacctgttttaatcaactttattgtaggaaagggtggattgtaaaggaaagacaagacccatgaaatggaacttaaaaacctaaaccttattcttttagtctaaatgtagacccatgaagaggcactcctcattgaaaacagataaaacacccccagaactagactgctgccagcattctgttcaggatgcgaacggctgcctttacggcattgctgtgtccccacaccaaggtgcatcacagaacagccctgctgcacggcaaagtggcgaggggcggggcaccttagcctagttttaaaataattgctttgctctgtctccacttcaagagtctctctctaacaggaagagacagtgtcttctggggaaaaaaaatcccacttttattagctcttaattatagtgtcgctgttcccgatgttacacaatagcaaggatctctgcctgtactgccattatcaactattttcagtatgggtgactcagaataatgtctgcttcctcaaatttgacatgcaggactgaattttcaaaaccttcactgataggcgatgtgtaaatccctctaaagtgggtgaaaccccctaaccttctcaagacacttcccaggactctttacatccaaagcgcttaaaatgagattaaaaaatgtgaaacaaatatggctcccacactcttaaaaagcaatgaacatttccatatttcaaatagaaacaaatctcaggtgggtaaaatcactgaagaatctatactgcaaatgtgattaaaatatttcaaaattattaaagtgatacatccacacaattagcttcttttaattcacttctcccaactcttccaatccactttccaaaaggaaccactttttaacatttactgtgtctcagggtataatgcaggagatgcaggttctatctctgggttggggaagatcccctggaagaagggcatggcaacccatt

SEQ ID NO: 33793 - DNA, 1526 bp, Bovine  19866881358817
  misc_feature (1)..(1): n is a, c, g, or t
nccggggctggaccccagcacaccaacagcttgactgttcttggagcttttaaacaatgagttgattgtgggcaaacagaaggcaaggcacatgagagataattagcttctgtatctggtgctggctaataagtaaataattttcacataaacatagaaaccactaaatgttaactgcgtttatttttttttaatagttgtaaaatgtaataaaatgagattttcagaagcatcttggtgactgagtagaacagtgtaatttaaaaaacaattaagtcactgccgctcggctgtgttggaagatcccacctcacaattgtctgtcccaccggctgctggcgggtggagtgacctttcattaaagacgtttcctagtgtttcttctcgtggaagccagaagccaggaagagcaccctgcttagaaaagagagcgtttggttcatacagtctgctttggtttatttcaacaggtaagaaagtggtccccagttcccctgaggagaaaacgtgttttctgacttttatcaccagtctgaatgagtttgtttccttctctgttaaggtaaaaagtacattttctattcccaccagtgttcagttgctccactttggaaatactcttcagataaagtatccgtgtgcccatgtggtcagcagccccaagccacgccatccccttgatgaccgtctgctggccactccccacaggatcagcgtctgccatatccccggctgtgggtcacaatctgatgctctgaactgaaccaaggcagcaaaaagtatcttcttagaaaataccaaaatgtagctaacttgtgctctcttcataaggcttgcaaatgggtaattaaataagcagaatataactcataagccaaaaaaagtgcatttttaaataaaattaacagagatggttaaaactacaaccaaaaagatgagtagattacttctggttaatattggggggagatgatacaatagctacgagtttctttgttttctcatttttagtccatttggttttgtttactatattcacaaagatcaccatgagtgtatctttgaatttcacacggtctccttgccggcatcctgatctctcagctcccagaccccagagaagggctgatcacccctcagaccgggaggcatgtgctggccttccatcctaatgaactttttacaaagcttcccttccttcatgaatatttcaataagcgcagaacaacagcactcactttgctgtaaacacaatcacaacctccacgccttcaagctcacaatgagaccgtctctgttggtcgccatggtttggtgtgtttgggctgcttctgcagccaagtaggggggcatttgatgcttgttgcataagctatacaggcagaaagaaacccccctcgtccgttttactaaccagtcgaatgctttccttgcccttttggggcaatatttttccttgttgcaacggcaaaaaggaaagaaaaaaaaaataaagagtctccgcacccctgcttccctgcaggggc

SEQ ID NO: 33794 - DNA, 1360 bp, Bovine  19866881515960
  misc_feature (1)..(1): n is a, c, g, or t
nacgtacaaatcttttccattactaacatagtgactatcattctaaacacattataatgccacataatgatcactaacagccccaactgaattatatttcaggaactaagagtgcatttgatggatacaaccatttctgtgcatctccactaccatggcaaccaattaaaataggttagcttaattaattagttgttggtaaagcactggggagatgaaaattgctattaatagatgcacagagtttggtattaatgctagtgtgataaacatcaaagcaaagtgcttatggctggaatagaccaattcattttcctctaacctccataatttcatcattgaattttatcaccttcttatttttaacaaattgtctagtctctcttttattcttctcttggccaaatctaaccaactcacgttatacactcaggcagaagagaaaattaacacacataacgataaccaaagttttctgatgaaaatgaaatatcttctgagggcagtgacaaagctcaaatgccactgctgagcctttcggtttccgatagctgagtgcagggtggagctcaccccgagtgggagcgggaggaatggtcacatcacctgccaggacttttcccaaaacggcacaagtggttgtttgcagacagcttgtcaacctctcctatctccccttgatgcttatgccattgaagtaaaagcagccatttgccatgcagatggagctattacacacaacaagctctccagactgtcaaaccgcaaagcagatgggccccgggtctgctctagattgaaattctggagctgccgttgttcctttcctacctgcctcctgccatgacctctccagcagctgagctatgatcgtggaatttagaaatgagaagaactgccattgccctctacttcagctccctgcattctaacaggtaagatatttcacaggtgagggaacacaaggcttagagtgagctgagctcccagggtgctgggctgggctctatctggatcgaggtcaggttatgtggctgggttgaagtcttctcctcaaggtagactgagaacaccttcagctatcttagcttaaaccagatccacgaatctcttgacctgacttgttcagtggctcagtcgtgaccgactctttctgaccccatggactgcagcccaccagcatcctctgtctgtggaattttccacacaggaatgctggagtgggtttccatttcctactccaggggaccttcctgactcagggacagaacccacatctcccgtgtctcctgcattggcaggcagattctttaacactgagccacctgggtatctggccccactcggctgggtctatcta

SEQ ID NO: 33795 - DNA, 956 bp, Bovine  19866880366019
  misc_feature (1)..(1): n is a, c, g, or t
nattttctgatatgcagaactgtctgtattattacctgtttagaaccctgccatggctcctcagtacctagacaagcaaaccagatcttcttcaaagacttttcactccttttgcctctattctttactcacctctctacctcatcttgcatccttttgtgcaccctgataaccccacttatacaccttgctaattcatcctcttctttgctcaagttggatctacttctagaaatgcctttgcaacaaaaagttgtttgataagaaagcccaagaagtttttcctgaaccccatttgctgcccccaacccctaaggaggaaataacttcctcctagtcctgccctctggctgtctcataccaaattgtcacagttcttctcccttttttactgctgtacccccagcatctagcacaatgcctggcatgtagacagcaggtgctcaagacccaggctccctgagtctttctcactcagtccagagcttagtgtctgggcctcccccaccctctctcttaccaccctatcaatacttgtgactctcaacctcacctgcatttctctatttctccaactctgggagaagggccctggtcatcccaggactctgtttttcctggttcccacttctagttcctccaagcaacagtgaagcttggtttgtcgggaagtgttagccggtatccaaggtaacagaccgcaccactgcagctagaggcagggacagggaaaaaacgttcctcaccctggggaagaaattaccactttgttgcttgtaacaacctctccctgggcactctgcttttctccacccccacaaaagccaggaacaggatttggaactcttctctagttttagaacctctgggtcatcggaaaactatggtttaggccagtggagccctggtgcctgctgccttcctgtgcctaggaactaagacagacagcagaggac

SEQ ID NO: 33796 - DNA, 1312 bp, Bovine  19866880395844
  misc_feature (1)..(1): n is a, c, g, or t
nctctcctttttcctgcagttcccacattcatatcataagtctgtccataacatgaagtaaactctgtcacttcagcttcagaaataatgattgctgtttttcttgtgacctaatcacatgatactaattggtttctgaattctgaacaaccttcagattcctgcaaaagccctctttggctgtgacagactttttttaagatactagtctttatttgctaataccttatttagaatttttgccttgtatatttataagtgaggttgggataaaagttttcttttttggtgttttgtcaaattttggtgtaaaacgttttgcaaatgtcaatcactctgaaaaatgttaccttgttttctacaatacaggtggtttttacggcatttggatgactggatcttgaaagtttattaaaagaacttatctataaagccatctgggccatcagtctctttggttggcatgtccgattttctaacagaagtgaaagccagtttagccctcttctacctggtgcttgccccctccaatcacaataaccaggggccaaaccatcactcacggaggtgctccagcttctggctatgtggtgtggctgaagacggagaggaagggagagagtcaaaggtcacgtcgctcatgttgtcatctccggagttctctgagaggcgaagcagcagtgggggcctgctccctgagagggtcctcacccgggggctcccgcacttttcctctgtcccccttaagatggtcttggctgactgctggagaattaacagtgacatgcacatcacacaggcaccttttgggaacaaggggttcttcctgttgcctgttggtccctcaaaacctgaggccctttcagccacagaggccttagggactggcagaaaatctaaaaataatcagtgggggattaacccaaaggcctctaagaaggggcatctggaacaggagctcagagtgccagcactcccaaagcgatggccaccattcatggccctgagctgggggatggcctgtagaatcccaagctggtctttgccaacatggtcttatagctggtccacgtactgggggtggtaatgggggtacaacagggacacagagaggtgctcagtgagccaagttcaagcctcatttgtcaacacatcagacaaaccacataccacacaccccactcacttatctgtacacgcctggtcccctcactgtgggcaaaaatgggcccaagtcaagcagaccccaattcctctattagtggggatactcaggagggctgtgtacacggttcaaaaggggtaagggaca

SEQ ID NO: 33797 - DNA, 1751 bp, Bovine  19866880421593
  misc_feature (1)..(1): n is a, c, g, or t
ngaaataaactacaagtgtcagatttttttccccttctctatacaaatttaaaaggtttctcttacaattctgtgttgccataaggacacctggctcctcctgaacttaactcttctcaaaccttgagctaaccaacgtgttttccttatggaaatgcttttcttaagctatgttaatgaactatgcatttaccctagattctgtctttcttcaagacggttcgcattaggactcagaaccggtaagggtcaacaaaccagtatgttttactgatacactgttctcctaacctatgttaacgaacctatatatttacttggaaacctatctttcttcaagattcatgtcatgttttacacccgggatgactcaccttgcgcccattatctcaaactgcatgttgtgggtgaggggcctggtgccaggctctgagttttgagacattccctttctctaattagcagcctgtagccacacaacatccggctgaacactagcaggggtgcactctttctgccccttctgatgtctctgtcagaagctttctctctcttttatactttaataaaattttattacacagaagctctgagcaatcaagcctgtcactgaccccgaatgaattcgtctcctccagaggccaagaatcctggcgtctttcacggctcagcaacaacctttcagaggcagccttcagggtgtcctgtcctggccccagccctccccctgcttcccccccacccactcagccctcgcagcagcccagagtgggtaccttgcctgtagagcgcagcagcataacgggacgtgttactggtggtctgggaagagcagaatgtctgcttgtccatcagcttcctagaagcacagggagaacgagggtcaaggggaaggaagctcaagcctggacctggaggcacagccccctgcaccccgacacctgaactccaacagccagagaccaaggccgcacgtgccgcaggaggggcgctgggatgaggaaactcaactgtggcccgagagacacgcagcagatgggagctccctctcccatcaagggcccagctttcctctcggcccagttagaacttggtcagaggagccatctcaggagggaagatgacttccctggggacgagcccgtgccaggcccagtcatgcaaagatgagccactggtggggagcccagctgtggggcacagggccctcggtgtcgctgaaggccgtggaaggctcatatttgaagaaagcgaagctcggcaccctcggggcccagggcactcacgaggaatacgtgctggtctcatcagcgcaggccccatccacgttcagcgcaatctgctcccctttgctgcggcaatagttgggattcagcgtgtcgatggccatctcaagttctacctggaggcaccaagcacccccaccagctatggggaccccgaggcacagcgctcaggggatgccccagccccaccacacccacctcctaacctcagtctcaggactgacaccatccctccccgaaggcccctggacttcagtccacacaaaggctacagacccacattccaagagaagggcctgagtgctttttttggagggggttcatgtagttttgcttgccgccacattccactccccaaagtctacattaggtacccacatgtaaacatcaagagcttttctcttttccttatttccaacttcctttcaaatgtcagcagaattggcaatgctggtgtagcttttt

SEQ ID NO: 33798 - DNA, 860 bp, Bovine  19866880563370
  misc_feature (1)..(1): n is a, c, g, or t
ngagcaggctacctgggctttagcctgggttccagcctggccaagagcggcacttctgtcatcctgcttgacctccgcagaccccagtgggagctgtgcccagggaccgagttcatccaggtgcagtgatgagtcttgggggatgggcggggggggcagggtgggggtggaggtcagaggttggtgtctgatgtgtaaccagtcactggtagtgaatgaagagcacaggcttcagagtcagactccagctcccagctgggccgccacggccacagggccccacacctctgagcctcacgtcttcatccacagaaaggggacaccaacagtatctgcttcaccagagacttatggggagttgagacagtgcgtgtaaaactctgagcgcgttctctgtgacttagctccatagacggggctgatgatgatgaagacggacgcccagtggaatcatctagtaaatcctgccccacagcttgtccgggctctgcaggtgctgggcctggtggggtcagggggctggctctgggacctgccacagctgtaatgtctgattaccttgggcccagacctcctacctccgtgtctttctcctctgtttcaggctgatgtccgcaatgcagaagccctgcaccgtaccttcgaaggggtggactgtgttttccacgtggcctcctacggaatgtctggtgctgagcaggtgagacacccccccacacacagggcttaggtcctggctctgcccgcccccctaatccctgggtgttcattatgctcttcacctattccagggaggatttgggctatacccagcctacatttggcccatgagaccaagtgccagttctgccattttctag

SEQ ID NO: 33799 - DNA, 1371 bp, Bovine  19866880714893
  misc_feature (1)..(1): n is a, c, g, or t
ntgccacggctgtaggccctctgcaaagctgagcaggttaaaactggggagcagggagaaaaagtgaggggtggagagaggaaaaagagattttttagcatgtgccagtctatactgagggcttcactgatggctcagtggtaaaaatccacctgcaatgcaggagacgtaggttcaatcgctgggtcaaaaagattctctggaggaggaaatggcaacccgctccagtatttttgcttgaaaaactccatagacagaggagcctggcaggctacagtgcatagggtcacaaagtcagacacgactgagcatgcacgcagtctattttgatcttgggggagtaacttccatggggacacatgcttatccctgaagaccctacagcaagccctgggccccctgcagaccaaccaagtttgagaaggtacacggtgaaaattctagatgcagacagatttaaatccgcactcagtaattgctacttactggttatatgaccttgggcaaatgccttaatctctaagcccttgtttccttttctgaagaatgaggataataacaggatcatggtgcaggctgaatgacctcatgcatgtaaagtgcttggcacaggaaacagctctataaatgcctgctcattttaatattaaggcaagaacgagtcccagcctggggtctgagtttccagctgtccctccggggtcaacccttctgggtagagagaaccagccacaccaaaacctcctcttgaaaaatccacaatccaaggcgaccctggtggttcctctgatctgcttgcaattgtcactgggcctgagacggatttctaaaaaccactttacttctacagtagaaggcagtgttccttcccgctattcagctgagcagttaggaaccctccaggccctttggaagcatgaagagggagtggtcttggccagggaagcatccagaactatcgcttggatcttcctgcccccatccacccgcacccctgcctcttacctgtcacagtgcttccgcagctgttcccatatcagcagggtaagctctgtcttcacctgctgcaggtaggggcccatggatcccgatgtgtccagcaggatgcacactttgctctccaaaatgacaccgaacagtcggcggctgcctgctccagggtgggtgggggcagaggccaggaaggagcgagggtggtttttcccactgcagctatcaaatacaccacacccaccacctgatcggatgtgaacccagggggagatagcctctgtggtgttgctagagtggtcatcgttcaaaggcagagcaggttggtggcctgggctttgggaggtcaaggtttcctctggactttgccggagataaact

SEQ ID NO: 33800 - DNA, 688 bp, Bovine  19866880748925
  misc_feature (1)..(1): n is a, c, g, or t
nttggttatataatactgtactataatcgtttataatacctttccacaaataatacataaaaaacaaacacaaaacataaagaaagcatttttaatcttatagtacattaccttaaagtacaacagctggcattgagtgaacagacaagaagagttactaactggagaaggaagaagagatgagacaaggtagagctgaaggattgtcagcagtaggagggcaagctgaaatttcacttagcctgaagttgatggaatacatgcacatctttgaaagttcacaacctgaaggttcgtatgtaggggactttctatattataaaataaagctatctgagatttcactttggtttctgagatttaaccttgtagcaccagccgtatgaagctttgggatgaaaaattaccatgtcctttcaaaaacagggaaaagttgcctggggtgaacaattatgaatatcttattatgttctgctctctgatttccagtgctgcttcttatgaccctctctcagttacgtgacttgtagtggcaatataactgagattcggagatactaatatgttctccctccctgtgatatctgtatagctaatatttgaaaaatatacttactgccgattgaacttcagtaagtctgcatcgaccatgtcagccagtgggcaaggttaaataagcaaaaagaag

SEQ ID NO: 33801 - DNA, 1318 bp, Bovine  19866880781703
  misc_feature (1)..(1): n is a, c, g, or t
ntttcagacttgtcctgggcctgaagaggaggcgccttaggagcttcttcaggctgcagaggaagggtagaagtgctggcagcagcgccggcgccctccactttccctgttacagtttaccttgtctgagtaacatctgcttcgtttaaagaaatgctcctgctgtttacgggaagtttggatccctgccctagacagactgggattgcagagctagaaaacaagttctgagtagggacacattttatttcccgagacagtgcttccttgagacttggtgtgatctgtagctgcttttcttagagcactctttgatttctattttaactcctctattttcaaagacattacaaagttttagaggttttttaggatttttagaattaacaggacctagccaattgtataacatacaaactgacccccaagtatgaatctacttttaaatgcaaattaactgatatcacaaggaccactcttcctcttttctccagtgtctcttaaaaatctattatctagacctatttttgatactcattgttcagtttcatattgtaaatgcccccccccccaccatttgctttttctgctcagtgttattggctagtgttgtagtctgattctgttggcctgacatttttttaaactgatatacatgttttctattactccttcctattttgactttaatttttcacagtcatcttttattttcttatatttttcttcctgccttcgcaccttttattcctctccctgtccccactcttttgggtgtactgtttgcagcctcagagacagatgatgatatttggaggtgttttcttattttgttacctttgctttttaaccatgaatcatatagacgatgtctattttaatcatatactcttataagcattttgtaaattcagaaggctcttggtgccatgtcactgttctgtgtggatgttgggtgggagggcttgttttgtacacagtcatccatttttgtcctttttctcttttccaggttgctaggaagaggctcaatgtttgtgttttcaccagatcagtttcagagactgcttaaaattaatccagactggaaaacccatagacttcttgatttaggtgctggcgatggagaagtcacaaaaatcatgagccctcattttgaagaaatttatgccactgagctgtctgaaactatgatatggcagctgcagaagaagaaatacaggtatagtttttagacatgttttagagtatatttcttggttttagatgtttttcttcttagtattatttatttaaagtatacaaatcagaaacaatt

SEQ ID NO: 33802 - DNA, 1439 bp, Bovine  19866880827346
  misc_feature (1)..(1): n is a, c, g, or t
ncagtgtcttacagctgaatacgaagaggctgtaggaaacctgctctgctcatccgacctgggagcatcacagctgcgtgtgctgtgcgttacacactggacacccttctgccccaagacacacacacacggcaaatcaaacccaggcccgagcccagcacgcaccagaaggtcacactgtggctgatttggattctctgctctaaccacctccggaaactgaaatgaaccctgctcttcccagaagcttctgcctgtgccctcctgccagtgccccgagcagacctggtctgccacctctgaatctgccgactcaccctcagttcccagaggagggcgtccactcctacccacccccactctaccccctccactcacccggtggttgtccagagggtcctggtctcgaggtgccatgttatcaaggtcgctgaacacaggccaatctgggcagggagaaaacagagcaaggcagcagttccacggctggaacaggtcacaaggtccatctaagctgccatcagacctctcttattttaaatttatatttatttttagggccacaccacatggcttgcaagatcttagttccccgaccagagatgaaacccaggccctcggcagtgaaagcgcagaatcctgcagaaagcaccaccgaaggcgccactgggccactagggagtttccaaaccttttttatttgacatttataaagtacaaaagcgggagaagaatgttgttggcacctgagaggccacagttcttctttgagaatttacccaaactctctacttgccagctgcctgtacttgtcctgatgagcaactagcttagctgctgcgctgccttggggtttccataaggtaaacagtgatacgattgtgtaatgtactggtcagccgtcaatgaggtgcagttgtgaatgaaaaaagaggcatttgtccatttggggtacaaatgggaggtagctacaaacgggagaagtcttagatggtttaaaacccaacaatttcctggcagattccagtctttatctcctgtcccaaacgcccactaaccaaatctggcttgtctgctgtttttatgccttttttaaataatctttcttttttttaatatgtatttatttatgtttggctgtgctgggtctgtggccgtggtctttctctagttgctacaagcgggggctactctctggttgtagagggagggcttctccctgcagtggtttctcttgctgtggagcatgacctgtagggcaatcaggcttcaatagttgtggtgtggggctcagcagtggcggctagcaggcccccagcgcgcaggctcagtacttgtggtgcacaggctcagctgccccggggcatgcgggatcttcctggacagggatcaaaccggcttcccctgcattgcaagggggctctcaaccacgggaccac

SEQ ID NO: 33803 - DNA, 1156 bp, Bovine  19866880903551
  misc_feature (1)..(1): n is a, c, g, or t
ngcaatccagttgggcagccgaggccaatttttctgggagttcctgaagcgtccctcacttgcacagcccttccagagcaccacaccctcactgcatattcataaatttgtactctttttatctagaagaggattcccccaaactggatgcctgcctatgtggcagaaaagagggctagacttgggctaacccaagtgtctccccaccagaccatgagcaacgtgagggcagagactggatctgatgttttccaggctgtatccctgttgggtgtgggtgctcagaatttgttggatgatgactgtccaaggccctggagaagtgtcctttagaaggaagctgggcctcagaaacatacagctaaaagcgagaatcgctcatgtgcttcagggaggcagtaggggacacgcatgttggctgtgagcaggcccccagtacttacctgggagaggcgtcccattggccatgaggatcaactggtcagcgatggctttggttcgggagtagtggtccgtgtgctgttcaaggacagggagaatagagctaccagatggggtcagggacactgctgatcacaccacccagccctcctggccccagggctgcacttttgcttctgaccatatgggagttcacttctgggaccctcaccaggaaatggccaagccctgagccctactgccgctcctttccctctaggtgggagccacgaacagaggagagagttcagagcagtaacaatggagcttcccgtcagccacgtcgcctgcactgggacatcggctgcactgggatgtggatgctggatgcatgtcagatggactgtttacatggaatccttgtgctcacgtggcattttcacataatcgtctcatttccagctctccacatccccacagagtggtgttatcatgcccaggtgtagaaggagagcctccaagtgaagtgatctgctcagggtcccacagtagaaagttgctttgctggttcaaggccaggttggtgtgatttcaaagcccttgctggcatgactgaagtaggagagggcttgaaccatgctatttggggactctttgctcctgggtctcaccctcagttgtgaagttgaccctggctctgcccatccctacccttgaactgtgggtcccaggtccg

SEQ ID NO: 33804 - DNA, 1544 bp, Bovine  19866881049876
  misc_feature (1)..(1): n is a, c, g, or t
nattttagatcctgttagtgggatgcacagcagttatgttcctgggtgagaagatggcattgactcagcctgggtcttggaacgccacctcagagaaaagaagtgtatctacactgacattccaccacccccaacctggtgcaaaggggaaggagcttccaaagaaaggtgggcttctggtcccagaggatggcatacactcagctccccaaactgggagcaggctgcttggggaacctgagccttgggggaagtggaacatctaccaggaggcactatctcagttaaggagatggggttgggagtcaaataatttacaaatagtaactgaaaaaaattttaaataaattagaataaattgaaatttttgtagactttcttaagacttgaatatgtttggggcagctcttcaggctatatacccctagacctccccccacagggtgacaggctcccacttccaccaatggggacccctcagcagagaatttgggaagccctggaccaagctccatcttagtctggagactctgctgacaccgcagagaggggggacagacctccagctctcatgctgatggctctagtcttcctttctggttgtctggaaagggtaactgcaaccactagttacaaagcatccaggtgaagagaccaaggctgagagagctgagggtcagggggctgagttgttagtactgtgccaccagaggtgttagcggaaacagcttgaacctggatctccatctcagctccactaggttgagctgtgtgcccttaggcaaatcacatctcttctctgagccttggctcctttatccataagacagggataataacagctctcacctcctagggctgcctggaggggaaaattccaggcttaccagagcatcagatgaaggcaccagacacatagcaaaacctctctgagagcgctatggaccttagctaatgactagaagaaagaaagagctatagctatcggcatgagggcatgtgggtccatgcacatctgtaaaatgggcacagtaggactctcgtgggagtcaaaggcgatcacatctatcagagctggttaaactctcatgggccatgcacataagtgttgcctctgttactggcctgtgagttttgtgagttcaggcaccatttcttggtcctcctgggattcttcacagcatccatcccaggacccagtgcagagcgagtggggagggggatgattctcaatagtgtttgttgaatgactagctgatctactgagagaataattaattgaatgagaaaactccaaggacctgcctatcccactcacctgtccaggtaggaccaggagatgtggacagcctttctatcccccttcctgctcatctaccccttcctaggcccctgactgcgctcccctgtgtcataggaggaggctctctgaggacatgtgtgctccggcccccagggatctacggccccgaagagcagaggcacctgccccgtgtggcggtacgttgttcccacctgaggccggaggcacgggggggaacccg

SEQ ID NO: 33805 - DNA, 2168 bp, Bovine  19866881286276
  misc_feature (1)..(1): n is a, c, g, or t
ntgtcataaccaagtgtgtggggtaggaatagatgtgaaattccaacagttacaactgtgaatttggcctgtgaaagaatgaaggccacagtgtgaataaaagggtctctttgtcccattctcattacattatatgttcactcctaaacttctaatggatcttttgttaatttttcaaaaattgtatttattccgtcctaggtgttcattgaggcactaggactacagtgcctgtccacaggacagacaggatcctgctcatttactagggatctgttgactggaggtgctgcctcctggggcgcccactatagtgctaggcagtgggtgggccctcactagataattttgctgctgagtaaggtttgggagcaagtctgtcctcttaggctgataagcagatctagtgggattttatcaagtgcagacacatgtctgttcattttttaacatcctcattattaattttactgagagccttattggaacagagttgctaaaacagttttctgagatcctgtgctcagtcatagaactacaatttttttttttctttaacaatagaagcattacttaagtatattgaatctctttaccaaagtttgcttggggcattctttgtaaaaattaaaattgttgaaagtttctaacctcagaaggcagtggtctaccattcataccttgttagaaacatgtgaaactgtgcaggcagaagaagaaaacccattgcttttataaaacactttgaagagagtgtcttttgtcagagggctgagttgacaaagtaagaatactgactgtgatctctgtgagtaagatcctttctgggacagcaggagccttctctgtaggtaatgatggtgattgctttgaaatgtgcccctgagaacaaggtggaaagacttcagagactgggttttcttttagaccagctgctgttgtaattgtcatttggcgagctgtgcaagcttagaataaggatttgggtttctactgtaaagatcagcaaatgaaatcttagtttaaattaagacttctactttttaagatgagtacgttttccacatgagcaacgaatttgctgaatcactgtttggagggtcattaaaactgacaccgtcatttttcttgatgtttatattcagattttttgctttcccaattatagtaacatcggctacaggagttacacagaagcatcaccagatgacgcatttggttttgtaataggaaaaactttcagccttaacgttattgaatgaatgctagagactacagctaacatgggaatatgtcatcctctttaaagaaaaaaaactaaagaaaaatgtaatagcagtgaaatgtaaagatttcggaattctggaaggaagatcttttttaaaaatcacctgactactagagttaattttttacctagggcatagggctgagtagacttatctgtttaaagctaatagtttatattgttaaaatagattattgtcacttgcaaagactgattagtggaaggatattaaacatgaagttattgaaagttgcagttctcaagcctgcagtaaatctgtggtatttttagtgtttgcctacgccagttcaataggatttagaaaagacaacctcttaatgaaaatcctttttgtaaagtgagatgaacaggtgtataaggcttcaaaactatattgtttccttttcttttgtgtgttaagtaagaataaaggacattgaatattctctcattccctccacaaattatttagaaaaccttcttgggcttactgccagcttttggctccttttggtaatggaagccagatgctacacaacaggaaataaacttctttttttttttttttttaaagaccaagaaagacttttgtctttaaactaacagatgaagtaatatcctattatacagtgtgacttcacagatgctttcttgtagttgagacttgtttcgccagaattctatcctacacatccaatgaaatatttagaagactgagacttcaggttactgagccaggcttgggttttgtttaactcaaaataaggattgcgataaggacaagtctcaaattcttctctgttggatgtttactgcaagagtgctatacttggcgtctcttctgcggcagcaggaacaggaaaggtgctcccggctgaca

SEQ ID NO: 33806 - DNA, 840 bp, Bovine  19866881743208
  misc_feature (1)..(1): n is a, c, g, or t
ngaagcacaaaatgctttaaaattttaaggaagacatgagctcttgaaataagggcccctaaggccaggctcctttgactcctgtggggataatgcaggtttccaagcaggtttccagcagtttactcaaggctgtaggctgctcacacaactgtcagaaactttaagagaatccaaatgtgtttgatggtgtcagatctcattattctccaaagcttctctccttctcttcagccaagaaaaaaaaaacttgctctggaatcttgaaaaattagttgctgaataaaagccacacaggctacataggcatctctggagccaatcattagtttcaaaggttattttttttttaaaagacacaatgcctaacaaaatactgatcaatttttatgagcactgtttgaaagccacgaacagcttttgagagcatacttgtagttctactgagaaaatatcctttgccagtttcctagttgtctatttccataatgagtcacagttttggggattttatcctagtattttcaccagttcctcatcattcttcatccactcttgagtagtttgttccaggactattttctggctgatttaaaatttctctgggttggtacagaggttcctttttggttttcaatatattttctaaatttaaaatatgatcatgtattacttttccaatcaggaaaatttccaatgaacattctaaaaagttagtttaaaacttgtacaagtgactccatttatgtaaagttcaaagataggctaaactaatacaagggtattagagtggtgcttagtgggggggtggtgactggaagagctgataatgtccttatt

SEQ ID NO: 33807 - DNA, 780 bp, Bovine  19866881914684
  misc_feature (1)..(1): n is a, c, g, or t
ncccctgggccccagcacccccctttctctggcctctctcgcaggaccctcagctctgcatctgccctgtaactctggctgtgccgcccggccctcgggtaagacgggcgccccaggaccatggccgaggaagacctcatcttccgcctggaaggcgtggatggccgcccagcctcccgggctggtgattcagacacagacagcgacgatgatgaggagggttacttcatctgctccatcaccgatgaccccggggcacaccagaatgtcaacttcaaggttaataactgccacagcaacctagcaaaaagcgagcgctacggctccagcgggtccccggctggctccttccatttcaaggtgagtggtccctggtgccaccctctccaccccaggtgagccccagctcacctgccgtaaggattggagagttggggtcgctggctgaggtcgtttccagactcttgccagtgctctaaattctagatctgaggcagtgtctgttaagtgggaagatttcaatacaagttttttgtttgtttcaatcgttgaatcattgtttcaatacaagtttcattcctttccagcagtgttttccagtatctgcactgggcccattagtgtgggttgtgggaaccttggccagttttttaagacccagaatagaacagagtagaaaatattgggagagggaagagagagggaaaaaaatatcagctctgacagtcgtgataatattttagggacatgtatacatgcctttacacacacatgcgcagt

SEQ ID NO: 33808 - DNA, 4992 bp, Bovine  19866880420320
  misc_feature (1)..(1): n is a, c, g, or t
naacaaaacatttaatatggagactacatatataattttccaagtcatctaactcaagaggttaacactgatggatcatatattaagataaaatcgtctaaagaattcatcctgttctttttttccaatagaaaggtgaaatattcatttgtttaatttgttaatgctttagaattattctctaaacggggttggtgctgtttcatacattcatagtatctatcttactacacatgtaacattcactcctctcgttctttcagttcaagtagcaatgtttctttttttttttttttaagtagcaatgtttctaaggaaaaaatttccaactagatgccttacaaaatgacttttgtgcttctcttttcaaacgctgaggtaatcatgcaggaaaagcaaataaattattctcttttggggtgaaagcattcatatttgataagcaatttgaaagtcaaataagatgttacctaaacattttacattttttatggacttattttatttggtattctttccaggaaagatcattactaaaagaaatatacacatcagaaatatttatgacaaagtacagttacagataatttgtgttgctgctgctgctgctaagtcacttcagtcgtgtccgactctgtgcaaccccatagacggcagcccatcaggctccgccatccctgggattctccaggcaagaacactggagtgggttgccatttccttctctaatgcatgaaagttagagaaacagaagttttgggaagtgaatgtgaaacagaacctagtgataaaaagtttctaggcaagtagtgttaaagacgaaaaagtaaaaatgttttgttttatgtaaatatgggaccactactagaaatacaatctagaagatacaaagaagaaggggaaacaacaaattactcagagagaaaatatatatatcacaggaaatgtaccagtaaatctctgtttttagaatgtcatctgtatcttaatgtggcccctctggatggctgccaaatcagaactggactagaaatgtggtttggggatctaaagtttgtttcacattctttctccagccctaaaatttgtttctactacatttaaaacatcaactggcaattagttcagcatttcctaatgtatacagaggccccaggctctcgtggaatcttatgaaatggtttataacataccgcagtggagaaaaaggcaaactgacgatcgacctgcgcctccacccccacctttgactttgcaccctccttctggctagaactatatataaaagcaatgaaattctatttcagtgtgatggctgctgagaacaggggtgatacacagccacctcagagaatagccagggccaggttggacttcagagcattttgtcgggaggtataggatttacacctggggtgtaatcttggcacatatcaatgtgtatttattgtgcatccagtctgtgccaggtactaaaactagtctctatggaggatgcaaaaacgaatggaacacaattatgtcttcaagagggttgcaatccaactaggagatatgaatcatcgcaaccagctataataaaggtatgtctagtgtgaagctttgattgtctgatagattcatagccaacttcaaagaaaaacagctaaaaattgttacttattatatacatgttgcatctcaatatgctttgaagattggatctgaaaccaataccaaaatcccagaggctgtctggggcacaagctctgcccaagataggagtctgaaattgatgagtccctcaccagacagcctgatgaagttcacctttcaaaagttaacactactgaagttgaagaagtagagatagatgcttactgtcactgtgatgacagaaaagaagaaaaaggagcaagcagtgatgtgctacttgagttcgaatggggacggctagctgagcagatggctagagtttcttttgagcctgcagagtccagagcactgctatgtcctggatttagactccccaatgacttgactgtagagactgtggttctttctcttacttccctacagagcttcataatgtatttctatcaattaggggattgcctgaagcttctctggtggctcagctggttaaaaatctgcctgcactgtggaagacctgggttcgatccctgggttgggaagataccctggagatgagaatggctacccattctagtattcttgcctggagaatcccaaggacagaggagcctaggggactacagttgatggggtcgccaagagtcagacacgactgagagactcacctttcacttttccactgggtgtgcttattccttgaacactgaaaaaactctaacacacacacacacaaaacacagacgggttcagtgaaacacataggagcaggatcattctcaccttgtagtttctgacacaggacacctagaaggccccacagataatgaataaaagaagtggatgcagtataggacttcattggtggtccagcggttaagacgccactcttccagtgcaaggggtgcaggttcgattcttgatcagggaaacaagattctgagtagcatgggcaaaaagttaaaaaaaaaaaaaaagtggatatagtagtgagagctgagaagagtggaaattactctttgctaagtgaatcagagacaagcttttgtgaagattgtatcatctgagcagagacttgaagtcagaaggtgcctagttgggaatgagagagggatggctcctccaaacagtctctaaaagtgggacttttaaactgtttttaagttattatgttgtcatgaaagttgttaagggcaagatgaaaatgcattggagaggttgttgtttagtcgctgttgtgtctgactctttgagcccactaggctcctctgtccatgggatatcccacgcaagactactggagtgggttgccatttccttttccaggggatcttcccaaaccaggatcaaagcttcatctcctgtgttggcaggtggattctttgccactgagccgccagggaagcccactttgaagaggacagtaggaaaacagcatttaaagagttgtactgtttgaaggtacagtgggccctcagcaaccctggggattggttccaagacccgtgaagataacaaaacctgaggaagcttgagtcctttgtatacaagggcatagtatttgcttataacttacacatattcccccatatactttaaatcatctctagattactattaatatctaatacaatgtaaatgctatgcaaatagttgctggatatgtgacgaattcaagttttgctttggggaactttctgaatttttttttttccaaatattttcaatcccaggttagttaaatctgtgagtgcagaagtcatgcatatggagagcctactgtattcatctcataaaacgaaaacataggtgtcacacctgtctattcctcctccattagaacctgtttttgctaatgtttgaggattagggaggattcaaacatgaaaacaagaatttcaggaagcaaattcttagaggcaggaaaagtaaggaagtaatgaagtttagcttaaagtacctgaaggaggatactaatgggaaatgagactggaaaagtagattcagagttgaattttattctgcaggtatctgtgttataggctatatgaatttttttttggctgtgcctctcagtttagttccccaatcagggatcaaaccaggaccccctgcagtgcaagcttggcgtcctaactgctagaccaccagggaattctctatgatttctaaactagggagagatgtcagcattgtgcctcgagaggattaatctgataatagcatgtgaaagtggatttaaagagggaaaaatagtgggaggagagaggggcaaaagcccaggtgagaggtaatgtggattatcctcattgtaaaactatgtactttacagtgatattatttactaattgtgtaagtgtcttgcatttatatgctgctgttgctaagtcgcttcagtcgtgtccgactctgtgcgaccccatagacggcagcccagctggctcccccgttcctgggattctccaggcaagaacactgcattcctcattatttatttattacagctctttatggtaagtcaggaccacagcaatactacacatgtttctttaatttatagaaataggattgcatactagatgcaaaattccacaacagcttgtttcttcaacagcacataaggaaaaataaaaaccactccacacactgtttactattttgggtagagatgttactgaaacctaaccagccccaaattcttgttacgaagtaatgcttttttctcagctgctctatgaatctttagatttgaaagaaaactgaaagcaatctacctttggatgttgagttttatgttaatgtctcaatacataatattacaccttttaggatttttggattttatatactcgtgttttaccctatgaacgtatcatgcatcccagcagcctgtctctgaccatctgaaagcaagctcccaatgaatggttgtcaagtgttctacttgagaactatttgaaaaagatggcctgactctatattgataatggcatcaaaacttttccttccttctttttctttattttgcaggatttctccttttttcttagaaaaaaaaccagaccaatgattctcagtcttttctgagatgcaaatgattgaagataatcacattcatcatagactcccatgggaactagctgcaactcctactcaagaaagcacatgagaattcaagtcagcttgagaagcatgtgctcaagatgactctgaacatgacttaaatttcttaaagccaactcaagtatgaaatcttttaatatcagttacaaatgacttatagatattctcacagctaaatcatctcaacacctgcttagtgacagctgctagccttgatgacgccctcaccagcaagca

SEQ ID NO: 33809 - DNA, 1653 bp, Bovine  19866880489402
  misc_feature (1)..(1): n is a, c, g, or t
naacacaggagtgggttgccatttcctcctccaatgcatgaaagtgaaaagtgaaagtgaagtcgctcagtcgtgtctgactcttagcgacgccatggactgcagcctaccaggctcctccgtccatgggattttccaggcaagagaactggagtggggtgccattgccttctccagtttgttaaagggtacttaaacaaagttattgatttagctgtgccaggtcttagttgtggcacataaggtcttcagtcgtagcatgcaggatctttagttgcaacatgcaggatctagttccttgaccagggactgaacccaggcctcctgcattgagaatgaggagttctagccactggaccaccaggaaggtccgtaaagggtaattttttaaaagttaaaaatacaacacttgtacagatatgatatgaacaaagattttatttgactcattaattaatacagggccggtaagatattaaaaccacacacacatctcaaacaagaatgctgacatgaaatttctcatagaggcaaaattagttagtataatgcaaaattagttaatattctatagggtagcagttctcaaaagtttccatctcaggatccctttacactcttaaagcttatgcaacacctcaaggagcttttgtttatgtgggttagatctaccaatatttgccatgttagaaattaaaactgaggacatttaaaaacacaggagcataccaacaaacactcattccataagccatcagagcaatgacaagtaacattgcaagtcatgtagccccccaaaaggcaccagtatgcctgtgaggaaatgagagaaaaacaggcaaataatattaatatgaaaatggttttgatctaacagactccctgaaaccatcttgggcaactcccagatggacacagatgatgcatgagtgagctccactgctattgggcaatgaaatggaatgtctgaggttagattttccttattgggtagaaatcaattatatctctaccagataaaattcatttccatcatcatggacaaggatcatttgcatcactatgagtttcctacaacttctataaagctggaaaatagctttgttgattgagatctgtttaaggtgttcatcctggtagaagaagataatccctttgagatctactaggtaaagtccagaactccactggcgagacacttgattttgcctatttctgagtctttacaaaatttcccccgacatgagggagccatcctctggtctcccaggtgacagggtgttttggctctctgttctttttctggcttgttgttatggcataagtagcatcaccagcttcccttgggtctgtctctttggttctaaagagcttactgaggaagtaaaaagactgcagtagaaagatcatcataattctaattattctccaggcaatgtggaagagaaaaagcatgaggataaacatattgacatttgttcctgctacagcgtgattccaggaaaggcctcactggagcttgatattccaggtggtgtggtgttttcaacgtggacagagttgtcaggaggcagcactaggtggaactgtaaagtctgggtcacttcagtgtgtaagccatctctaccttgagtctcatcctgatacggacat

SEQ ID NO: 33810 - DNA, 2518 bp, Bovine  19866880495798
  misc_feature (1)..(1): n is a, c, g, or t
ntgcttcctctctaaaagatgttattaggaaccactcactgatgagtgttttctcctgttttgcaaaatgctttcaaaaatgcatgaaaggacaaagttcaccagagcatctttttctaagtcagttatttaactttatgactaaaattattacatattataacttagcttcaaaatcttacaccaactggacaacttccccacagtaaacacgtatcacaggggtttgggtctttctgtttgttttttacctgaaacagcaagccatgaagttgtcctttaattaacttctttcttagtggctgaattgttgctataaagagaatgtataaccagcttaatatgacaatttgtaaactgcctccctttatgcatttcataaacttttaacagctttaaatctggggcctgaggaaaggagagagaaaacaatggcttttgagaatgatgttctcaagactcatcaaactgggaaagcagaagaacaaaacaggagggagcaactaaactattattgcccttgagtatttaaaattaaccttgatcaatgcaagtgaattatctcctacaagtgagtcaccgaattattcatgttaaaaagggaatacacctcagaggtcactccatccaaactcctacccatggggaaattgtctctttaataagcctctgctcaagctacaaggaaaggaagccctggaaacagagccccagagccccagaatcctacaagtaggtgtgatgacactgatgtccagaagactgaagtgcgtaactggctattcatggagctaagatcagactcaggacagtgctccattcactatcctcttttgtgaaattaaaaatatttgtctttctacttaactgaaaatttgcttcccagcaacttccaaattctcatctctgaaataatgaaagtgagaaaaacacctatttaacttttaagttaaatagtaacacatttcttatttgacaatccataccctttgaaaagtagccaagaaccagaaaataggctgaaatcattggaacaaccaaaatagatgttgatatccatgccctttattcatgtggcaagtcctatacttcactcaaatagtgggctcagaatttatacataattctcacaagcttgactgttttctcagcccacagatgattaaaaacaaaaattaaatgagggtaggaagctctgctagatggaggcatattaatagctgccacttaaaaaaaagtcactaagagccaggaaaattaacagcagatactctggtgtccaaaacacacagaaatctggtgtttcttattttaaagaccaacagttttatatctcagtagcctgaagaaattctgagccatagaaaataatgctaatacatgtgaaaagtacaaaatctaattataaacattttccagggaaaaaagcttgaaaacctccaatttgtggaaaattaccaatgtaaaatttattttatatgaattttttttggtaaaactaacatttttcaactaagcttgacagtgtttatgaggcccacaaggaggagaatatattttaaatctattttaacatatttaagtaattttaaagaattaaattctgaatacttagaactcaagtatagactcaattttttaaaaatccctgtgttcactatattaaggaataaggctctgttctcctaatcagttttctgaaggctctgttctcttaaccagtttccaacattatacttctgaagctgtatatctcaatacactgtctttgaatttctaaataagtttgtgtttcagaagaaataacgagttagtataagactgtctaaattgcccatctgcttccccatcaggcagtcttgggttttagaaacagtcaatctcaaaacattcaagctgtaaacctcatttcaacagatgttttgtgcaatgggtagcaacgattttcatatgtttcataaggcaaaacaagctggcttatgaccttaatttgcatgaatctttgcattcttctttatgtgtttggagttgaacctgccatgtctccaggacatttaggttttacatggaagcgagtaaaacaatggccactgtattccctgctgttgccatctgtgatgtaggatgagaccagttgtcttggatacattcagcctttgaaggaagctgaaataaaacaactttctaaatgattatgcactaagacattgcaattgattggctgttgaaaatcaagaccataatattgagccataataatgttagtcaacttcatagcatttctgaatgttctattaaattgtgcattaaaaatattaaagttctttgaaaaccacagactagaagaaaataattcacaacacatatatctgtcaaagttcttgtattcaaaatatataaagaaaagaaattctacaactcaataacaaaaggacaaaggacttaacttgaaaaagggcaaaagatttaggtagctcacaaagaagaaatacaacaaggccaatcaatccaaaaaata

SEQ ID NO: 33811 - DNA, 1171 bp, Bovine  19866880558796
  misc_feature (1)..(1): n is a, c, g, or t
ntgcctacctgctaagttgctcagtcatgtccactctttgggaccctatggactgtggcccaccaggttcctctgatcaagggattctccaggcaagaatactggagtgggttgttgtgccctcctccagggcaccttcctgacccagggtctctttatgtctcctgcactggcaggcaggttctttaccgctagcaacacctgggaagcccttacccttttatattcatgcctttaaaacacaacaacaaaaaaacttttatcatcactttagtgggatttatgtctgggatgaagacaagaacatgtatcttttaactgggtattaaggataatattttcgatgtaaatttgttccttttttttttcctgctaggaaagccgggttagtaaagcagttgaagtgatgattcagcatgtagaaaatctgaagaggatgtatgccaaagagcatgctgaattagaagaactgaaacaggttcttttgcaaaatgaaaggtcttttaaccctcttgaagatgaaggtaatacaagtttaagataatagtatcagttacatttttctgacattctcctttttctttctctcttactaattcttattatacactgtctttagtacaacaccctttacgttaaggttgttttagaagaatataaaaagcatacaatatataaaataatacaagaagtaactcattcctgttatttatatagcccaaagtaagatgtcagcatacaaattaggagacaagtattttatggtagacaccaaaaattcattaaattgttgatatgagacagtcatatcaactcattgacccccgtgttgtcctacttagaaactggctcttttgccacacataaaacaaggccccatagtataaatgaaccactttcgccaacagtggttttgtatccctcgaagaaggaatgaccatggcagaataagctgatgagtgtcttggaaaatagtgagactactgagaccatggaaagtatctcaacagaaggcctatatatacctttactaattttattttaaatagataatataaatgttcataaacagaatgttcgttttaatgatatgttctctcttttgtaaaagtaataatgtttgggatctgatctgtaattttgggctcatttattcagcatacgttcattt

SEQ ID NO: 33812 - DNA, 668 bp, Bovine  19866880602093
  misc_feature (1)..(1): n is a, c, g, or t
nttaggatggatattatgaaattcaaaagagctatggagcaaactatctttgttttaaattatcgattttcagaaagttaggcaagttacacaataaaaattccaatataaaggtgttacaatctgagaatatgaaaatctaactgattaaaagggtaggcaacggaaagaggccaccccccgaaaagcagaataagtacagtctgcccttttagcttacctgtgtctttcagtcatagccaaagcaccatcctctatttcttcatatctgggcctttcatgcgaagcacggattaggttggccacacatgagaaaggagtcaattctagtcttggaattgctgtaaaactatccagatgcaaggcatctgcattagaagagaaaaaaataaaaatagaaattaatggttcaaaggcagatgccacaaaattcaaaatctttggagggactctccaaaaattccctctttggagatgagaccatttctgagacagcaaaaattcagttttattaatattttaacataatcccccatcccctaagatttcatgcctttcttctttcaaggaggagtgagggtggaggaggggaaacagaaagccttgcctagtaagcaactagaggtttcaacagcaacttgctgtcacaagcaaagtccagccagcca

SEQ ID NO: 33813 - DNA, 2672 bp, Bovine  19866880625768
  misc_feature (1)..(1): n is a, c, g, or t
naccatatctcttacatcattacatctcttacatcttacctgcattggcaggcgggttctctacccatagcgccacctggaactacttctacacaccacccctccccaaactgctcatttcctctcttggatgccttcagcttaacatttactcattcttaaaggacactcatatatctaatagataacatttacatttacatgatataaacttctacagctctaattttgtgaaaagaagcaacaggaaagaaattctcagaaaaagaaaactgctggtcacgggagggtgcattcaacaaatcccactgaagacagacagatgtttttgtctctcttccactcatagaagatgctctcagatgatgtttcacaaagcaagtttctcatacttctctccaagtctctgcatcctctcatactttagatatatgacaacagcacgtttaacttcctccttgctgtcagttggaaaaaagtgattgggctcttattccagattccaattagaaggcaaagacttcctaatccaatagtgagataaacttcagcaccagaatgttgccagctgtttaacccctgttcagaattataaaactttacaggctggcatcttggcatcactattacctcagaggacaggggataaaaacacatcgctgtggtagattagccaccatgtcattcagtcttggcagttcggcttggtttcaaaagcacactaaaaaaaatgacgcgtctttgcaacagaatgtcaggaaagcacagtcctcagcagaatgttcaagactgcctgagaatgccttaggtgaagcaacatatgtcgctctgcatccttggcaggagatattcaaatgatatttgccccaaggacattctctcctttcaaggtcatagcacagctgtcaacaggagaacattctggacaaatctatcatctaccaacatgggaagaccatccaagtagtgaaagaaagcaatctgccagaaaacatttcctagcattccaagcacacaactggaaagtgcaaaggaacaaaaatatactagggagtcaggttccaacattgcattcacaagaaggtgtgtgactgtttccacccctgttgtaaagcactaccaacaggctggaggttttaaggcactaattcattttgctattttaaaattaaccccaaatatataaaaatgctaatttatgttcagaatataataatcagtgtcattaatttaagtctgtacaattatattctcaagcaaagaaatttcatgtttctgcataaaacaatgtaaatgaaacaagtaaatttttggtagatacatttactttgggacttgaagaaatactaaaaatagtccatgatctctaccacaatctttcagaccccaggctggggatcactgcaggtagtcctgaaaaatatcaagatagtaaagatttcttgagaattccctggcagtccagcgggtaggatcccacgctctcactgccaaggacttgggtacaaaccctccttggggaactaagatcacgcatgccatgtggccaaatatatgtgtgtgtgtgtgtgtgtgtgtgcacactgtatctgtgtgtatacaaatatatcaagatttttaaagtccagattcactgaacacacatttccataccccatgctggagtctcactatagttttcagccataacttgaaaaagattcattcttccaggataagaaactttagacttaggttccacaaactatcagtggagtccctcaaaatgtcatgggtgatcttcagcaagatacagacctttacttaatagcaagctattgcacatgctgattatttttgtaaaggtttccatttgatggtaattacctacctctgcagactgagcaagaatgagttcgcagtgtagcgattttactccttcagagtcgacacttttatgctctccactgacatttaattgcattccatttcttaaaaaaaaacaacagtagtctggtctggttaggtatgccttatgttttaagtcacaagaataagatttatttatcaccaaacggtaagcacttatgtgtgctgtataaggacgtcataaggtacgtaagactacagagagaaacagagggtagtctttgccctccaggtgctgcacacactagtgattctaggtcgttgcaaccaggtaagccatactttctttttaagaattggagccaatagttgaatttttaaatttttcactaaaaatctagatgtcttgcttttctttaaacaatcagaatacgtggtcacactgggtccatatattcttgatgtaacaactatctggagctaagcagagtaacaccccgtctttacctggctaaggtactttcgttttcacccccctaatataagcatgtgcgcttaccccactgactttactcattttgctgcttatggacttctggactagcatgttatacaaaatcagaatcaaatgataccacaaggtagagtgtgtcaggaaaaaggtaaaaacaacatgccatgcatgcactcagaaagattacttaatctcaagacatgagaaaagtaagggtgagtgagggaggttgatggaaaacgtgtgaaggaatctgtactcttaggagagaagctgagaaaacatcacaaagttacaggaggtaagaacg

SEQ ID NO: 33814 - DNA, 1833 bp, Bovine  19866880633259
  misc_feature (1)..(1): n is a, c, g, or t
natatttggtccttaaaacctaaactctttgtactttcttgactggctagttcctagtggggttgtgatattgggaaagtacttggcaaacccaaatgaaaggcaatgctattacttatattatgctacttacatttactgagttaatgaacccttgcctcctcaatattccaatggaatttctgtgtatatgtgtgagtggtggggtggcccctttctcttggctgactcagagttatggtttaaaaactacatttaaattacttaaagagagaagtgatcatcatttcatcttaatgtatgcagaacaataattctagatgatctaatgtcaatgtctcagcttacaaaccagtagaagcgtaagttgtcttcccaatggactcatggcaaatagctggtaactctatacagtctgtgaagaaagatctaacccaaacgttactaaggctgggaaccttacattccagtcactgtaacttttagtttacaaacacaaacagcaaaagccaggaaatgcaaatattaaatgtcttttagccctgggttttcaaagttgatattaatcatctatacaaatgtttcattcattaatgtaggtgagcgaagattgccatgagactattgtattagagtgtttcatttaactactccctagagaaacagtactttttaataaaacgttagattcatttaacactttggtccccctaagatcttcaaagactttatggatattggcttattaaagctcaccacagcttaggtacaagaagacctaggaagtatggccctcatttaagagatggagacaaagagaaccagaatgtgatgattcattaaggtctgacaataagcagatggcatatttcagagatgtttgggaacaaagagagagaagcctcaaagtttcctactccaggacactaagagtcccatccaaatatctgcctattgtgtcaccgccacaggttcaagagtttaaattggactgaggagtttgagaaggatgcttttccagaagaaatcctttccagtgtgattcttctgctccagaagataatgatagaagaaacctaagcccagcctgacgtgtcctcccaaataatgccacacatgtgctgtggggccatggtattctgcagatggagaggacacaattatgatggtgttaagcttctgataaaaagctttctatgctatttgttttgttctagtgttatttgtgcacatggcatcatggaaaatgaactccaaaatcagaaaaacaagccaaatcttgactatgccccctactggccacatgaaatggagttattgtaccccaagaaagttcagtttcctgatctgaaaaattgacacactgaaaactcacgtcacagcattattgtggggatcaaatgataaaatattagacatttttggaacttagtggactaaaaaaatgttatttttccttccaaaacaggagatgttctggggggcagggaggttggctgaggggaagtgagggaagaagtggttggaagtgctgtgtttttgtaactggctttgttgtttgcaaccgactccaaatttatctgggcaagatcctacatagaactctacttagttcaaaagtcaaaaactagtttagatcattagaaaagcaaagtaactcaacttgaaattttctttgttcgcattactaattgagagattatcatgaagccagtggtttggttcaactggagcttaaataaaggggaaattgtgtgccttttacccagggcttagtgtctaaaacccaaagtcaagttatgagatgcctcacacagtgatgaagccttaagt

SEQ ID NO: 33815 - DNA, 1836 bp, Bovine  19866880643848
  misc_feature (1)..(1): n is a, c, g, or t
ntttaattggtaggtttaaaattagtattggtaggttttaaatgcctaattatcttcatataaatggcaccctatcatcctggtagtgttgtactcctgccttgcgctgtttattattttgcattacaattatcatgcaaagcagagaaggtgactttaagcagctcatttaaagtgctttttttttccttaagtgtaaaatctttgggaggctatttacatagatatttatcattgggtgttaaaaatcagtccaattataagtacacaaaagtttttattaggggtttaattttgaaatgtaaatggccattgtaaagtgcttgttgaaaatttcatttgtgcttgtatttttgtctgtggattaacaagccaccttgtattggaattaactacagagatgcacaaaacattcaaagatcacagaagctgtagggcaaaattgcctaaaggtgtgtggtgcgatcctgtctttggagctggacattagagatgctgtaagaaagtgctcctccagccacccaagccactagcaatggctgcaccagtgataggctccccctccatgttgcattctgttgccatggctatgatggccctaatattgtgtgctcacagcaaggttgcaattagtatttggatttagaagagaaacataatgatctcatattgaagaaacacttggttaatactattttggatctaggcattctttcaagttgttaacgagcagctctgttggtcagaaaaaaaaatccctcagccattctgtacctgcatcctcagtttctttccaaccaagttcacttacatgtgctctctgccaggttgcaaaaacacagtccttgcatacttttaaattgatagcaggcttttatatgttttccttcacaatgagtggtgatgaagccgcaatactttaatgatcaaatgaactgtatactgaagtgaagtgaagtccctcagtcatatctgactctttgtgaccccgtggactgtagcctaccaggcttctccgtccatgggattctccaggcaagaacactggagtgggttgccatttccttctccaggggatcttcccgaccctgggatcgaacccgggcctcccacattggaggcagacgctttaacctctgagccagcagggaagcccgaactgtatactaggtacccccaaaaatgcatccaagggatgaattgtaagaggtttagagtttgatccatgcacagtcaacttcatgacatacagctgttttgggtgaatttaaggtttttacttactcatgaaagaatctggagacaaaccaataggtaagaagtggattcatttaaagagaaacatactccatagagtgtgggccatctcagaagaagagggagagcctcaaaatatgacatggttggtttttaacagttgagtaattagacaggctaatgagtgggatgactatttcaattattttgaggaaggggtggtgatttccaggaattgggccattgccccttaaaattgagcttttatggtcagaactgtcatggcactggtgggtgtgttatttagtatgttatttagtatgtcttattgcaataagcataggtctacaggaagtggaatcttctgccatcttggacccagttggttctaatcagtctttgtcacatccgttggttctgtcgttcttttaaacattgttcccttcccccttccctcctttttcataactgtggatcaccagccaatgagaagggcttatcattttttgaagcagagattagtttctccatggtattcagtgatcatctagtctgggtctttttacttggttgtttatt

SEQ ID NO: 33816 - DNA, 1308 bp, Bovine  19866880715566
  misc_feature (1)..(1): n is a, c, g, or t
naactgagaattcccgcacacagtacccacaccatggctcacctttttatctgaaggcgcagttcagtacagtcctctgataactctctgtttgcttcctccaagttttccaatgccaatttcaatttattattttcctcttccaatttctgcttgttgaaatgcatgtctgctatataggtaatcaaatcaggcacctctctgcggggaaaaggatgaatgggcataaacttcaacatcactaatcccttccagtcaaagtaaggcttatggttaagcccaaacaagcttaaatattcctgtgaggacttccctgtcggtccagtagttaacaatccatctgtcagtgtaggggacacaggttcaatacctggtctgggaagattccacatgctgcagagaaaccaagccttgtaggccacaactgccgaagccctcccaggctaggccccgcatgccacaacttactgagttcttatgctgtaactactgaagcccactgcctagagcctttgctgtgtgaaagaaagaaaccaccacaacaaagaatagcctccaactgccacgactaggaaaaacccacatgcagcaatgaagatccagcacaaccaaaaataaacaaataaagaagattttctactttattttcattcatcctcataaacatagttcacatacacagtatttattcaagcacttattacaataacaccaaagatttttccaaaattgccagatatttagcatctgccacttgtgaaatcaacttttacagctttcatttcttcctcttcactttgctcccaacttctatctctatcgacactgaagagttcctacttctgcctgggttatggaaaatcctgaaataaattgacactggatgctttcaatcagaaatcttggccggtttcaacaggcctttaactaggaaataattcctagagttttatcattgtagcctgtagctcacaatttagtactcatggttcctagtattttctacagcttgttaatatttgtagctgtcacgcttgccctgacatttgatcctaaaccctttgagagtctgaactgtgtttttcaaagagtaccaggcctcctcttctttgccatcttttcctagactttagcataggttggctacacggttcctagtccacactttttgcacagataaacctgaagtggcaaagataaaataaggaaggacaggttcagtgcttcaattctgagcttccaaagcagagacttgggttcaatccctggtcggggaactaagatcccacaagccacatgttggctcag

SEQ ID NO: 33817 - DNA, 1092 bp, Bovine  19866880749054
  misc_feature (1)..(1): n is a, c, g, or t
nttgagtcttaagcaggtttggctgggaagaagcactgatttctgtttaagtgttctgtgtgaccctcccaactctcccctcttcagccccaaagggagaactttggaagcttgggtctgaattcctccagactccaccttctgtgtcttttccccttgccgggcctgctgtgtattactgtgctgtaataagtgatagctatgattacactgcctctgtggtaatgagcccttctccatgtgggtggtcctgggacaccagaaataccatccattgtatttttcgtgtcttaaaagttttgagtctttttcgtgccatccacatctccttttaacaagctaaatcttttctctaccttcttgaacatttggaatataattattataattgttttaatgttcatgtctgcaaattttatcatctgtgtcatttctgggactcttttccttgaatgattgtttttttcctcctcatcaggagctgtattttcctgccttttggcatacttattaggtttttattggatgctggatatggcaaatttttcttgttgcttattggatattgcagtaccactttaaatattcttaaactttccccccttgcagttaggttgcttgaaaatagtttgatgcttttgaggacccttttgagccttgttaggcaggaccagagcagcctttaggtcattactaggtgctgctcttctgctgtcttctctgtctgatgccttgcatattagggcatttttccactctggctggtgggaacacaaagtccttctagtcctgtgtgagtcccagggatggtcctgccagtttcttgaggtggtcctttcctttttttttaattttactgatttatttatggctctgcgggatcttcgttgctgcacaggcttttcacttgttgtggtgtgatggcttctattgcagtggcttctcttgttatggtacacgggctctaaagcgtgcaggcttcagtagttacggcacatggggctcagttgctctgaaacctggagggatcttcccaacacaggaatcgaacctgggtctcctgcatctcaggcagattcttaaccatctgag

SEQ ID NO: 33818 - DNA, 1868 bp, Bovine  19866880774689
  misc_feature (1)..(1): n is a, c, g, or t
nactgtttgaactatattgcctttaactgatttatatttgttcttaaatactctatatgaccaaatttttttaaaaaacatttttttatatttcttacaaactgctatcaaattctaattaaagatatgttggggaagagtgtaatttcctcagttctgtctgccacagcaaagatttgaaacagctggccagtgtcatagctcagttacagttcagagttttatttggcaagcaaggaaagtacacccctgaggcgtgaaggcagactgaccccataggagtggcctcaatccatcctggcttcctccttttatatgtttgtctcttcccccttgagcttgccctatgaaaatcaggctagccaagaagggggtgtgtttgtttcacctgaagttctcacaccagtccacaaattttcttttgttccactttcacaggtttttcagtttgtcttttatttttttttttctttctaccaaaaaactaaatatgatttattttgtacttaacactttaacatttatgtattcgacatataacatataacatgtcatttccatttggttgatatgatatcaccatctttttagaattattactttaattcccagacactcttcaaataaatcattcctccaacaaactacaatcagagtatctctaatgacttggcagtccatggaaattaaagacaacatgaggtaaatatagacaaagtcagaatcaatcacaaattctagtaaagaagtttcataatatagaaacaaagaaggtacacttctatagaagctaaatgttcattcattccttactatgggccaggctgggggatgcaaagatctataaggcacaagaccctcagtcctgtagtgaagcctgcccacgaattaaacacaatctggagacagcaggggtggtcttgttgatgtaccaatggagcctggtgcagactgtgatatcaggaaggaggagagattctccctaagaggacttaggggacctggaagaaatgtaagggaaagaaatccagtttctctaagttttgatttataaacaacaacaacaacacacttttctgagaatggagatgtggcccgggaaatggtacctatgaaatgtactcagattagctttcaaacacaaagacactcattggttgagaagcagaacataacttatgctaaagaataaacattaaaaaaaaaaaattttgagtgaagccctaagggaggcactaagattatggaggaaaattctacaattatatggcttccataatcaactctctagagaaggtaaggaaaacttctaggagcaagtttagaaacgatcattggacgattgcgattcgtcttctctggcatgaggaaataatcgccctggtaacgcagatattatgaacaacagcacaactaaaatcaggtagccaaagacatttcccataattcaaatgcacagtctgtcccaagtgcacacgtcccgttcctgtccattcaggctaccgtgattgtccagtcgctctcttctcttccgtactacaagaaaagcaagaagacaggtttcagtgtaaaagctaacagcacaggaacagcttataaataaacttaatgatataaccaacgttgaacaaacggttcatttctgttttgtacattaaaagcaggttcatattgaaaataagactatgtataaagaaacagtcaaatacctgggaagaatcatagattgtataattattgttgagctcaaatttagagctggtataggttccttacatatgccttttcattgctattctgtatttagtttctcagatcatgtcccgttttcgcttgactcgcctctttagtactaatataacttcagt

SEQ ID NO: 33819 - DNA, 2845 bp, Bovine  19866880820491
  misc_feature (1)..(1): n is a, c, g, or t
ncaattaaaataacaagtgtactaaaactatccatttattgtttatttgaaactgaaaatcaaatttatatgtatatatgtgtacatacatacaccacacatttaggaggaaaaaatacatatatatatatataaaatacatatatatatatatatatgtgtgtgtaatctggcagccctagttagtggcatattttttatagttttgtcaaagtttccagtacactgaatgtcaaatcctaaccttttatctaagaataaactcacttattttgttctttggaggctagttattctcagaataagtgaactgcataaactaagaagaataaaagacattttcaaccaaagaccaatgactgaagatgaaagaatgaacaaaattcagtgattgtatcagaaacaatgaacatgagagcccggaatctacagtgccttggaggtgatgcagaagggaggagaaagttgtctaaagatctagataggaagaagggttgggaaataacttaaatgtgggaagagatagtggagggaagttttttttttttaaagcaaaagaaatttaaacatggaaaaaatgaaaagttgataaaactaaacagataaaaagcaaaagatgaagaaatagaatgaggattgaggaagtatgaggaatagcagacacacaaacatacatacaaggacaaaagcctgattcccgggatggtgccacaggagtaagttctagggaaggatcatgggctaagaataaaagtctttttaaaataaattaaaattatatacaatagattatctttcaacctttaagaagaaggaaattctgcaatgtgggacgacatgggcaaaccttgaggatattatgctatgtgaaataagcctgtcataaaaagataaatactgtatgaatcagctcatatgaggcatctgaaatagtcgaattcatagagtcagagtggaatggtggttgccagaggctgacgggaggaagaaaagaggggttactaatcaacaggtataaagtttcatttaagggagatgagtaagttctagacatctgtcaaacaacaaggtacctatcaatcatataattgatatgatcaacaattgataagatcaacaatactatattgcacacttagcaattagatctcttaccaaaatatactaaaatatgtttaccaaaatatataaaataaaaaatattatagatcatgaaaattatacactggagaataaaaatgtcaagttgataacattactacctgtatttgtatggtagctcttcctgaattctttcagacacttttttcccttctctaactacacagggaagaacacagtataccaaacatgtggcttgcctggtggctcagtggttaagaacccacctgtgtacaggagaccaaggttcgatccctgggccagaagattccctgaagcagaaaatggcaacccactcctgtattcttgcctgggaaatcccacggacagaggagcctggtgggctacagttcatggggtcacaaaagagtcagacacaacttagtgattaaacaacagcaacaacaaaatacacgggttgaataccaactgtcatctctggctttttgtggactgggagacttgtttttccttactataggaagtattgaggcatgagatgggcatagataagtaacacttttaactgatctacttcaaaatcctgtgacttttctccaacatcttagataactgcttgttggatagttttgtaagacaacaacttgtttccccaactagttctctgcctcgttcaatagcttcttggtcataccatactaacaaatcagaatttcttttaatttagaatatattgaaaacacattttgcttataattctcattcttgacatgtattttgtaaagtgtgtgaggggcagagggaggagaaatattattattttgtttctaaaactaatgaaaaacaaagaaaacctgccctgatggtccaagtttgttttcagttcaacttcaaagagggaaaacctgcttttctaggaacctgcaggagggctgctcaactgtcctgccttgaaaacttgtctgccacataaatcagttgtgttggcagagagcatttccctgaaagaaactaccattttcctcttgtcttccacttatctttaatgcataacatttaccaaacccagctagggtgaagaattctgggctacatacccttatacttatatacattattaattgtatgtccaaaaaagtaggactgaagtttttatggtaacctagagggtggttcctagaggcaaaccaaaaggctttgtcttgtctagttaatctttttggttagagacttagatgatgatattaaaaagttacttatcaaatttgcatttgagcatgattttgcgagttgagaaattccatgtatgatggagttaagagttaagatccacacaccaaaaaaagctccaacatgtgcgaagaagggtcaaatctaacaacatgaaacttaattgatataaatttggaacttaacacttgggtgtccctggccttcccttcaattccttgcctattccttcggttcccttcccatcccttctcttttgtcttctctccctctctctctctctctctctctctctcacatacacacacacacccctgcattcctgtcagctaaggaaagcctgacttattggtgacggtgtaacaaagatttatgaattttatttcaataaaaaccagcagtatgatttggctgctgagaaagctaatgcacctttgaatgtggtaatagacctataaaggtttgagtgaggaaagtgattgtcctgctccgg

SEQ ID NO: 33820 - DNA, 2554 bp, Bovine  19866880846539
  misc_feature (1)..(1): n is a, c, g, or t
ncgttcagatagttacactttgatgtctcatagtctcataggtaacttcaaattcaacaagtcccacactgaactcaccatcccaacctctgccccctcttcatcaccatcaaagtaaaacaaaagttgttctgccaccactgttccttatcttagtaaaagaataccatctaatcctctttttaaacctgggtagttaatacagagctgttcgttttacttttattcttttaaaattatacagattattttctgccagagggcggtccactggttaggatgccacgttttcactgccatgggtgtgggttcagttcctggttggggaaataagattctgcaagctgcacagtgtgaccaaaaataaatgaataaaaaatttaattaaaatttaaaccacagagtattttgtagcaaatagaacttggaaaatattttgttccttccttttactaaatatcaaaaacaaagtccaatttttcccattgttgttatgactaggtctttttagagctgggactagaaacccagacctcctaacttttattctgataatttttctctaaaactcactgtgccatattaactcaattattttgaaacattcgagtaaagcagcagccaagtgattatgaatttgtcattatctctattattcctcagaatgatattactttgttgaaaacatcatttaaatatctaaaaagtaataaatatgaaattatttttgaaagtattagtttttaaatacatattttaaattttttacaatgttgtgttggcttctgccatctaacaacacaaatcagccataattatgcatacatatccgcttcccttgtggctcagctggtaaaaaatctgcctgcaatgcaggaggcctgggtttgatccctgggtaaagaagattcccctggagaagggaaaggctacccactccagtattctggcctggagaattccatgccctgtatactccatggtgttacaaagagtcagacacaactgagcgactttcactttcactctccctccctagcctctctccccttcccccatcccatccctctaggtcatcatagagcaccagactgggctccctgttgctacacaggaacttctcaccagctacccatcttacacctgatagtgtatatatgttgatgctactttcacagttcacacaaaataaattttttaaaagcttcagactgtcccgtagaaagtacctatcacttctactttttggtggggagggaggctgagtgagtgaaaaaaagaggaagaccctgatatctagtcagtgtgtatttatactagacatcctgttatggatgacctttatatgtattaacatttaatcttcagcccaatcctattaagtgataaaaataatttcactgttgatatactgagaccttacaaggctaagtaacttgcctaagataaacaacaggtctcagaattaaaccctaactggctgagctcctaagatgggttttgtttttttttttttctaagatgggtttttataagtacgccatgctgtaatgcaacaggcatctgcttggtcatgtgactctaatgtcttcagacctatagcatcacccatggcaataccttggattcttcttgaggtttgcccatatatagagagtaacattttcatcttgaatgactttttccatatttccactgtccagatctgctaaagtgctagcttgctgtaagaaaaaaagaaaacattattaagattagaggcctcacaaattatacaatttaggtaagttatttcatcagttaggtgttggattcccttcaatacttaaaaaagtaatttgggtaaaaataaggttcaataaaaataacaaagaattgttttaaataattctctaaatgatacaaatgcatttactcagttaaatgtgttcccccttttctactcagtttctcttaaggtgtctaaggatggttcagttcagttcagtcgctcagtcgtgtccgactctgtgactccatgaattgcagcacgccaggcttccctgtccatcaccaactcccggagtgctcctatattcccagatagctcttgcagattgcttttagattacccttttcaattttaacattatcatgacttctcattttaactgtatatcctaatcttaactttatccttaccttatgctactgcaaaagttagcctattcctgaacacaccaagtttacaaaatatacctatgagttctgtgttttactaatctaatacctgataatcaacataccatttaaggatattctttagaattctttaataaacactaaaatagattcatgcctcttgcttaagacattagttctttaaaaggacttaaataagtcaatatgtattcagctcctataatgtaaaaacttaaaagtactgggaattgaatttattgctatttgttttcaaagtaattgttctgtgagttccctggcagtggttaggacttcacgaagaggggcacagattcaatcccgggggagaactaagatcccacaagtcattcag

SEQ ID NO: 33821 - DNA, 905 bp, Bovine  19866880888132
  misc_feature (1)..(1): n is a, c, g, or t
ntcccattagtgcttgaatttgggaagtcagatgaatcctgctgtcattgcttgtaaactcttccatctccccccaaatgatttctctgtcaaaaacaagctgcgttcgtaggctctgttttcctcctgttgagcaatctggagctcattctggctcttgtaagcttgtttgtggttgcagaggaaaatgaatatttctcacccaaatgttgtcatgtcatcatctctgtctggcaaccagagaagcagatgttctgttccttgacctcaggctagtggttacagatttgggtgttacatatgtttcacaaaactgcatttgcccacgcagggccactgttttcattgaactctatgcagtcttaggagaagggcatggcaacccatttcagtatttttgcctggaggatcccatggacaaaggagcctggtgggctacagtccatgaagtcacaaagagttggacgcgactgaatgacttagcacatggtcttagagcccagcaagctttaggagaggtccggtttggggacactagaattgtttgtttatatgtgtggggtgtatgtgtgcatacacatgtagatccatacatccatatatccagcttgcttgctattgcaaaacacgtgtttatcttgagatcaaagtagcccccaaaacattgccaaaaacaaattttcttcttttgaaacagtggttttcagcagatgattttttgactcaaaattcaaagaaatcatactgctataccctaacaaagaggattttttttttttaactcaaaaacatgtattacatatcactccaggccaggcatcttattgagttttggggacacaggagtaaacataaagtcttggcattccagaaagctgtgttgttgttggggacgtctcatgtgg

SEQ ID NO: 33822 - DNA, 1390 bp, Bovine  19866880910097
  misc_feature (1)..(1): n is a, c, g, or t
ntttgcatttttaaaaagatcattctggctgtggtttggaaaatggaatgaataggtcatcagttctgtagtgattagagtagtctaaataagaagcgttgtccttgtctccaaacctattcttccatttttcagggccttatcctgctacaagtctaaacgggtccttgaaatacttgaggaaaagcagaacctaaattcatcatacatataaatctttcagtatccccaaagaccaggaatagtattttctatagtgtactttgcttaccatttttccttttgtatttgtatttatattcacagttccagcacgtcatgttttcaagacaataggaaaaaagggaaaggcattcttttaagcctgtaccacactattgattttctttgaaaggacaacaagtgtgtttattttatcactgtgagtctaaaaattaaccatgaaacatcattttctacttctaaactaagtgtaacaaagaaatgctttattgcaacttcatcaataattcaaatgcaacttaaaagaaactagggcagcacaaggaaaaaaagcacacttgttccataattgagtcgattaaatagtattgagtcccattgtcatattcatattgatgaaacaactttcataactgcagagactctaataagaaataagacctcagaattatgagacaatgtcatagacatttctgtattattttttttctactgtaaaatacaaatagcgaaagcaagcttttccttgtgtgcgataatgaagaaacagcttttgaaaggtgctcttattgggattttagtagttttcaaggctgtgcagtaatagcccaagctattttggaactgtgcatacattagtgttcttgtgcagcaagatacactaatgtgtgaaaaagtatacgatcgcaccttgtttaattttgcagtttttgtgcataatcccacagtaagctcttgtcaggatttgactgcacagaggagtagaaagtttagagcaggctacagattggggtcaggtgtaaatatccaactatgaaaataagaaattttaaaaattacatttttttgaaagatcaaaagagttcagtttatatgatatgtataaatcaacttatggtgagtttcgcccgtggaagcttcagaatatgcataaataaccttccgaatgaagatgtatatctgctttattttgtatttgcagagtgtgagtgaaaagtacggagtgtgatttttaaagacaatgatcacattataatttatgcattcatattaatgttgtttttcaaaattgtcacccagagaagcagaaccctgattccattgatgcccttgttcaaaacattttggaaaacttcctccccgaattgtcttttgaatcatttgcaag

SEQ ID NO: 33823 - DNA, 1079 bp, Bovine  19866880997308
  misc_feature (1)..(1): n is a, c, g, or t
natttgacttggatattctttgcatcgggtccttttcctatattctctactgctgccatacgtgattttcagtccctttccttccgtctctccctcctccctttcctcaccgtccctcctccctcctccacttagcatgagacagaccaggactcattactctctactcgctgggcccatagttatagcttattaagtgcctgggaagtttttacttcctgtgtgtattgttaccttgggaaaatgcaaaagaaaaagagtaaatttacaggtcttgatttcaacctatgacaaactcctcacatataatttgcaccccattaattaaaagtgtttttatcattgctttcaatgtggcctattaaaccataaagagaactacatgcaggagctagaattctcaaagggtgaagtacaagcaacaggaagagatgtcctgataaaaagacagagacgggcaatgcattcaggctagtgtgtgcaagggaaaacatctgagcattcaagaatggaaccatgggacttccctcatggtccagtggctaagactctgtgctccaattgtagggggctgggattccatccctggtcagggaactagatcccacatgccataactaagatcctgcacaccacaactaagacccagcacagccaaatgaataaatagatatttttttaaaaaatggatggaaccacactttgtagtacgcattatctttttctttaaagatacaatctttgcattcaagaacaaaatacatgtgtatgtatacatgtatgtgtatgcacatatacaagaccagcttagtgaataactaaactataccattgtactgttgcttcccttgtggctcagctggtaaagagtctgcctgaaatgcaggagacctgagttccatctccgggttgggaagatcccctggagaagggaaaggctacccactccagtattctggcctggagaattccatgaactgtatagtccatggggtcgcaaagagttggacacaactgagtgactttcactttcattgttgcacaggactccagacttagaagaatctgcactcggttta

SEQ ID NO: 33824 - DNA, 1106 bp, Bovine  19866881045471
  misc_feature (1)..(1): n is a, c, g, or t
ntttgtttgtttgtattttccagtttgttctgtattttccagtctcctgtaaatgtattatcatactttcatacttttaaaaagaataaagaaaaaagcataaaaaaaaataaataaagtcatttatcaactaaatagtagaggccagagctcctactctttcatcaccatttaaatgatacacaactacacagcttccacagtctccttaaccagaataagttttttatactattaatactttgttgctcataggaactaaaatgtactggtatagctgcaaaatggtttttaaagtttggaaaggactttcttctctttttagcaatgaatgagaatggaggtttctcctcatccttgccaacattggctgttattttttttttttaatgtttgaggttttaaaacttctttgaacttatttttatttggaggacaattgctttacaagtgttggtttattctgtacaacaatatgaatcagtcataaacatacatatattctctccctcttgaacctccctcccacccccacctccatcccacccctctaggttgtcacagagcatttctgtaagtattctaactgactctgaatttcagtcactcttacccatcaactaggataggatgaggatataaaaggtaggatgaaggcaaaaagtaaagatgtgctatttctctgtttctcattcttagaaagtttatcatacaacagagatgacaaaaattgatggctccaaaagcaacataaatatttaacagaaaattaatcattacagatatatgaaaaaattccatgatctgatggcttctaaagatgtatctacaaattattttagctttctttttctgcaaagaaggcaaatttgcaatatctctatatactcacctttagatgttgaatcgactgcctattgctttcgtaactcagatgtcctgttttttcttgatctctgcaaaccccaaaaaaggctcgaggttaggcagatgggcaagatcctatatgccaagcattattttttccacattaaaataaaccctggaataaactaacaaccaaaggattattttcattgaaggaaaaaatctaaggtataaggaca

SEQ ID NO: 33825 - DNA, 684 bp, Bovine  19866881067353
  misc_feature (1)..(1): n is a, c, g, or t
ncccgggagctgtcagaacacacacaaatcagcccccacagctcctgctcggggcattaccttcggagtttcttcctatgggtatgagactccggggaggcttgttctcgccttcctgcgccgtctccacggtcgcagacttagcagtcaaagcccagccgccaagccttgttgagacccctctaaacatcaatctccggttcttgggcattgggatttggggctttaggcacacaaaaccaaaccacttcaaccaccccagaggcagagatgagagcgcctcaaaactttttctccccctcacccacctccccaccggtcaaggagtaggtgggtgcggagtgccgtcggcggggacccgcgggcgcagagcggctcttcgggggagcagtggtctctttaaaaaccaaaccactcgccgctccagcctcggcgctgggcggacggcggctcgcctcccagaaggttccgcggacagccgcagacccccacgcgcgccctccgcgccggctttcccgcgtgcaaacgggagtggggggcgccaaggggcccaggtgatgcttccaggacagcgggtgaggttccagcgcagggaagaagttgacaaaggagacttgactaaacacgaatgcatatttatagacgcgagctccatcaagatctagagatagtctccttctccct

SEQ ID NO: 33826 - DNA, 2196 bp, Bovine  19866881163710
  misc_feature (1)..(1): n is a, c, g, or t
nctgctctgagtccgacacgactgaatacttactttacacataaaggcaacccactccagggttcttgcctagagaatcccagggacggaggagcctggtaggctgccgtctatggggttgcacagagttggacaggactgaagtgacttagcagcagcagtagtagcagctctaagtctgggcttcctgggtggcgctagtggtaaagaacccacccaccaatgcaggagacataaaagattcaggttctatccctgcgtcgggaagatcccctggaggagggcatggcaacccactccagtattcttgcctggagaatcccatggacagaggagcctggcaagctatagtccagagggtcaaaaagagtcggacacgactaaagggacttaacaaacccactctaagtccagggtcaagaaaagcttgttagggaggaggtggctgcttaggagcaatggtagaaagactagtcgtgcatatacttacattacaatagatgaaaaaagttaggagagagaaaatatgtgaggtgaggcaggggtgtggggtgcacagaacagagagtgggatgcaggtctcggcaatctccagcctagatgataactgagacacgtgacagattacatttctgctcatgccagaattttcatagtcagcacagaagtgctatataaagctttcccctcttctatattatagtccttttaagatttacggagcaccagctatagggagaacactgtgttagcagctgtcagagaaaacaggagcttatcatgtacttgaaattggacaaaatacatctgtgatttacattgaagggtgactacaaagcaacatagaaataagtgcaaattcattcagtaacgaaaactcactgtgtccatcatgtgctgctgctgcgaagtcgagtcagtcgtgtctgactctgtgcggccccaaagacggcaggctaccccatcagactaccccatcaggctaccccatccctgggattctccaggcaagaacactggagtggggtgccattgccttctccaatgcatgaaactgaaaagtgaaagtgacttcgctcactcgtgtccaactcttcgtgaccccgtggactgtagcccaccaggctcctccgtccatgggatttcccaggcaagagtactggagtggggtgccattgccttctagaatctccagggtgtggtatatcagaaggtgatgtgggtaaatttaaaagcagattttgttaagactacagagacttttgaggtattctgtctaaagaaggatttagattcacacagttcagaagcagggtaacatcagttattcaacattccatgcacttattgagtgtctattgtttttgtagtggtaagtaaagcagacaaaaaatccctccccttatggagcttatattctgataggagagagacaagaaagcaaaataaactgtatgttgtgttagaacaagtggtaaatgctctggttccttggtggctcagacggtaaagaatctgcctgcaatgcaggagacctgtgtttgatccctgggttggaaagatcccctggagaagggaatggctacccactctagtgttcctgcctggaggattccacggacagaggaatgtgttgggctacagtccatgggatcccaaagagtcggacatgactgagttgctaatacttaaaagagatgcagtaccaggtgatctttcgggaaattcattagaagacatttgaacaaagatttacaagtgttaaagaaggctttttggatatattgtattgtgcttagttgctcaattgcttctggctctttgtgaccccatggactgtagctctccaggctcctctgtcttattggagtggcttgtcatgccctcctccaggggatcttcccaacccagggattaaacccaggtttcccgcattacgggcggattctttaccagctgaaccaccacgcagtgtgttccagataaaaaggcagcaaaagtgcaaattccctgaagaagcctgcctgcattttcaaaaaagcagccaggaaccagcatgtatctttggaagtgaggaagacagattatttattggataagagcttagaaaggaaagggagtaagggtgtcaaataatttaaggccatggaggacgtggagaagatgtttgttctatgttaagcatgacggcagcca

SEQ ID NO: 33827 - DNA, 856 bp, Bovine  19866881170457
  misc_feature (1)..(1): n is a, c, g, or t
nttgagatgccaaatccctagctttgtttccagcaaaactatggtcggagcggcagcatttcctccccttctccagaaaccgagctgggaagtgggtaaaaactatttactacggaacgtgctacgacgcttctccacgccccacacccccacagggaaaggaccggcagcgaccgccccgccacctcactcgcgccgggccaactgcagctccgcggccgctgccaccgcccagccgagcccggggagactcccaagggctctttaaatacgatctataaatactacaggcgctcggcgcgcgcgtcacggcaaaaccggcctccgattggctgtcgtaaccccgctatttgcatagccggattgctcaaccgggcggcgacctcagccgagcgtgcccctcccccgcagcgggcgcgagggccgctcggggccggcgggcggggaccgctgggtggcggccgcgcggcttcgcgacgagtgcgaagcggtggtggcgacgtccagagtgacttgaactccggaacatctcgagtcttgagtcatgcggcggtcttccgggaggccggccgcctcccagaaggatcaactttgcgcacccgaaggccggcgcctttagaccgggtcattttgcttttcaaacacagaaagaaaaagtttgaagggtttcacccgaacagatgcgctgggtggctcgcggaggcatcacgtgagaccttggacacgcagccagagccctgtccaatgacttgcgtcttggggtgttcaaaaaaggcttttttgcatgatcactagtcagacctcgttagtttgaaaaccaaaccaggagtgttctggaaatgaaagaggtttaaag

SEQ ID NO: 33828 - DNA, 2215 bp, Bovine  19866881201576
  misc_feature (1)..(1): n is a, c, g, or t
nacagagcagccttgttcattgtcagaagaggctataggagagcataaccccaaggaagtgagaatccctgggggcatgcctggaacctggctacatggcttgtactgtaaagccttccagataatttttgaatgttatcagaatgcaaaggcattactttcttttcaaacataatgcatttgtattatacattaaatatttttatattatatatatgtaatcattatatatttagtatgtaatatgatatacatttggagaaggcaatggcaccccactccagtactcttgcctggaaaatcccatggacggaggagcctggtgggctgtatagtccacggggtcgctaagagttggacacgactgagcgacttcattttcacttttcactttcatgcattggagaaggaaatggcaacccactccagtattcttgcctggagaatcccagagacaggggagcctggtgggctgccatctatgggggtcgcacagagttggacatgactgaagcgacttggcagtagcagcaaaatgatatacattatatattatatagtatattatatatgtgtgtgttcatgctcagtcatgtctgactctttgccaccccatgtgctgtagcccgccagcctcctctgtccagaggacttggcaagcatactggagtgagttgtcgtttcctcttccaagggatcttcccagatcaggggttgaattcacagctcctgcattggcatgtggattctttacccctaagccacctgggaatcccttgtatcttatatataatgtgaatcatattacatatatatgtaatacatatatgtaatattacgcatatatacacacaaatatgtaatctctccagcgaacagcaaaggcctggtgaaaatacatacctattttagattccaagacaattaatgatctattcattgagaatatgccattcgcctaaaattatgctaggaacatatgttaaggggatgtggcagaagtgacagagtcatctcagaattttatctcaaggatatctttgtaacattgtttaagaacgatgtcctctgctaaaagttaggcaaggaattcaaccccagtcctcagggttatgcctgtagctccaaattctttagagagaattccggttttctcctgatcctgaaagaaaacagaatgcctcctattagaaacagggacagtttgtccaaacatagggttcctaggtggctcagtggtaaagaatctgcctgccaatgagagagatacaagttcgatccctggaggtggaaatggcaacccattccagtattcttggatggagaatcccttggacagagggacctggtgagctatagtcagtggggttgcaaaaagttggacatgactaacacacacacattaatagcagatatagaatgatatgtcaccttctcacaaggaaatgtagattctggacatgctttgttttgagtgctggtatgcatccagcatgtagtagagacgttggaattttcctatttttctacatttgctcatgagagaaaaggaaggtacacatcaaactgttaacagagggcatataaacagttatctactccccacctttctcctcttatggaaacaagccacactccctgataaaccactgtcttcttgctcttgtcagttgttccaaatggaagctgccattttcttttcaattctatctcttgggctgcaggaattgcttaaccgtactgccctagagtccctggccaaagtgattagttcagagattagactgtgactcaaatcaaacaaatcaacgtgcttgctgagggttttttgtaactggctactgttaagaggagaaagacttcatctctttccattcacagatgattcttgaactgccagggcccaatttcattcccaatggaaaagaatctgtctatgggaacagaggcttccctggtggctcagatggtaaagaatctgcttgcaatgtgggagacccaggttccatcactgggtctggaagatcccctggagaaggaaatggcaaccaactctagtattcttgcctggagaatttcatggacagaggagcctagtgggctacagtccatagggtcacaaagagtccgacactactgagtacctaacactttcactttcagtacctatattcttgtaattggtgcagggaatgggcatgtgactcaaaccagg

SEQ ID NO: 33829 - DNA, 1558 bp, Bovine  19866881203971
  misc_feature (1)..(1): n is a, c, g, or t
naatacagaagcaatatgttattttttctttagcatattcatgtaatgcttatctcataagaaaacaattttcaccatcatatgccaatttttataactattctgcatatagtccatacaaaacaaatgttactatattgtttatttcaaacatttactttagccaaattataaaatcataaggttcccaaagaggcatcataaaattatacttaccaactgcttgacctcctactaaatcggtcattattttccatcccagccaactttaaagttcagacattaaggaaataataaaatacaaatttagtgaagtttatacttttgtgatatgaaaattaatttgcttctgactaagaacacttaggaatttgcttaccattcctgcatttccaatatttctgggcaaagaggcaatggtcactcttcgaagggaagatggctacccaaagggaagaaatgtacatttagaaaattctcaatattttatccttgtatgaaacactgatgggtattcttgtatgtacacatccatgtacttgaccattgctgagttaaacaggagacatattttcaaggtttttgttatggccaaatttcctttcagaaatattttgccaacttgtattcaactttctccaacactggataatcttttccagtcaagtaaggaatacagggttttctgtttaggtttatagtaactctgaacaccatttttctatgttgaataactgtgtatctgatctgagaaccacctgtttatgatttttgctcatattaattttgcaaaagatacttcttggcaaaaaacttttttattgttaatgcagccaaatcttttcctcacttttgctgccatttcttttatgcttggaaaaatttcctcaaatcaagaggagataaatatgcatctatttaagagctttcttttttcatggtttcatttttttccatttaacacatataagggtaagtatgacattttaatgaatggatgttttttataccttagccttgagatttacacaggaaaatgttatgtcatattttgtgactcttaaagttgaaataagtgggactacaggaaataaaaatatggtaaatataggaaaataaatgagaatttttatgtgaattcttttcttaaaccatcatccctaatttaattttataggttagctgaacatcaagcaaatcaaattgtggtccaggaatctgggttctaatcatggttctatcacgataggatcataactaaacatataatttctgtgaaagtgattttgttcatctgtgcaaaagatcaatttagatggaatgatttttaaactcacttgctcaaaaattctgtgaaatcctgatttttaaactgacaaaaactgctggttgactttcaatatcccattttccaaccccccccctcctttttttagtaacagacctcttgatttttcagttatacatacagcctccagaataaaagctctgttttcatcttgtttccaagcaaaaatgaaaaggggaaatgttagctgggacttctagggagtgtctt

SEQ ID NO: 33830 - DNA, 1413 bp, Bovine  19866881214158
  misc_feature (1)..(1): n is a, c, g, or t
nttcaaaagcatcagttcttcgttgctcagctttctttatagtctaactctcacatccaaacatgactactggaaaaaccatagctttgactagatggacctttgttggcaaagtaatatctctgctttttaatatgctgtgtaggttggtcatagcttttcttccaaggagcaagcatcttttaatttcatggctacagtcaccatctgcagtgattttggagcccaaaataataaattctgtcactgtttccattatttcccatctatttttcatgaagagatgggactggatgccattccctatatctatatatttgttctattccgtatatctatattccatttcctatatctatatatttacatctatatccagatatatattcctacagcatatttctgagtttacattagataaatgtaatataaaataatattagagattatccaaacaagttatttcactaattttatttatttctcctattgtttgacttatgacccattgtcctcctttctagaatgagtgtcattattattattgcctgaattgccttgttgcccctattcaaggtcttgattcaacacttttcaatcatctctctgatctaaaactataaagcaataattaaaagcctctgatgcatagcaacatctataaacaaacatggtttcttatctaaagtaaggttattttcatcagtgatgtaactagagtcccacactaacctatctgtttggacttcctaaagaagtcttcaatagattagaataaattcaccatgtatgtataatatagataatatctcctcttccataggaacttataatattagagcataatttgtgttttcaatatccatattcttcaataactaagaaacagttggatttcttctcaaagaaagacattaagatttatacagagatacaaaaatagcatccttgaagaattttaggaagccttctgaatcaaactctgactcaagaaagattatgtggataatgtaattatcttttcttcaccaaccatttaaattttttctccctttattaatagttattgcttgaacattgaacttcaaaacttaagatcaagtaggcttaagaatcatttgttacttaattatgaaatccttcatgactcacccaagtgagtcccacttggtggcttaattaatgtaaagcccttaattaatgtatgtaaaaaatagaagtatatatgtagatagataaaaaaggggttccttttaccaaaagagtccttcagtaacaatcagacgccagtaaactcttcatcaacacataagaagaaacatctgttcactgagatgttcccgggaaactcatctttagcagcccagtgggagagcagagcatggatttctactcaatcagtaaattttattt

SEQ ID NO: 33831 - DNA, 703 bp, Bovine  19866881230552
  misc_feature (1)..(1): n is a, c, g, or t
ntcctgatttaatgtgcaaaggcatgattctgctagccatcagggtacagtggagatgcggctgataaagtgaaggaggaaaagtcaagacagaattctaagaaatggtatgcacttgttccagagcagctcccagtccaagaggaaagtaatgagaccgcctgtgccagatacatgtgacaggctgccaacacggcgtactgacagcgggcatcacaagaacgtccatgcacatcgcagtcagcccctgctaccacccatcaaacaacttcagctttcagtagccatgaagggcacccgggaatcccagcagacatccaaaatgagggcaggttctaacccagaatgggaatggacccgaaactgcagagaatacagtgtcggattcagcagaggggctctccaaacattcagtttgtcaatctttttaacaagtgacatggaagcaaccagcactcactatttggggaaaactatgccaaaagcctcacagtaagcagtccttatcctgggcacagattccctagagggggcactcatcagaggaatgtgtcaaaaattagctccctcttcctgcctcccatcctccctggattctgaagttgtcccagtgccagtttcccacagtacaatacacataaccacctaaaactcaggggcaagacaccagtgatctcattatcccaagatgctaaatcaatgt

SEQ ID NO: 33832 - DNA, 1534 bp, Bovine  19866881240118
  misc_feature (1)..(1): n is a, c, g, or t
nattaaaagaatatgagatgatttacaatgatagataatcgtttcatgccactgaattttaaatcgacacctgggttaggcacggcgagtagaatgtgaagccaagcacattccaggaaacagtagtgttggcttttaatattcataaagtttttcaatcgaagctgtacaatatgttctatcgcaggtgacactttgggagattatgtcagatgatggaaaatcagcaggtgcgtgactatcagtgtgccaaaggaggtgggacataggtatgtcattcatttctaaaagaaggactgcaaaatgtatattcaaatgggatatacagaactgagttacaaaatgggaaatagccaggacataattgtctatagcaatttaatatcacgaagtaagcaatgttgaaatatgtggacaaagtcaccggtgtgtgtgtgtatgtgataatcattcaggcgtgtccaacctcgttgttaccccatggattgtagccctccaagctcttctgtccatggaattctccaggcaagaatactggagtggattgccattctcttctctagaggatcttccagacccagggactgaactcaggtctcctgcattgcaagcagattctttaccatctgagtcaccagggaagcccctatagggttgacatgcccatatttcagaagaactgaagctcatagggttgaaataatcgatacatctgagaagttcatgtatctgccaaagtgacaggggcagtgcttatcccagtagggcatgttacctccctcccccccctgcctttttttgttaccttttacagtctcaaaaactaaatgaccccagctcagccacacaaaggccgtggtcaagtgaatggtagtgtattcatttaatagcctgctattaaacctgatgattataaagtagaatggaagcagatacttttatatctcttctgatttggcttctgcccggattgtgatcaataagtcattcaaagaaagtctgctacaagaaagtcacttaagcttctttaacaaatttctctattattggacatctaaattttatgttaaagtcatctctaattctgtgtcctaaaattttggtaaaaacttatttttgttcacatgaaccataatgttcctggtaagggatggtcttccatgtgatcatttcaggaaaggacccagtctcctttctctaggagtgttaacatcatcttggactttgagattcttcactgggttttttgtatctcaccaacataaggaaaagagagcttgaaacatcactccaaagatatggaatatttaaggacaagaactttaagctgtttgtatcacttcttttttttaatttaatttttagttttatattgaagtataattgacttacaatattgtgttattccaggggtagagcaaagtgatttggttatacacaaacatataggaattctttttcagatcctttccgcatataggttattacagaatattgagtagtatcacttctgcccacattccattgcccagaa

SEQ ID NO: 33833 - DNA, 2102 bp, Bovine  19866881251511
  misc_feature (1)..(1): n is a, c, g, or t
nttactcttggcatattatccattgttttatttaatcatccaactcttttatttaactcaaattctctcattctctcaataaatttgctcagtgagcattatttgaatagtaaccagcaccaggcactggggtccatgttactgtctgagagacccttgggttgtttgggggtttaaacaacttgataggaatagaatcagctactgtgttcaaaccatagaattgtgtgggcttctgaaataggaactacactgcaattttctttgtatatccagttatattgtagacactcaattacatttttgtcaaattaaattggggcttcccagatggtattaagtggtaaaaaacccatctgccattgcaggagatataagagatatgggttcaatccctgggaggggaagattgcctggaggagagcatggcaacccctttagtattcttgcctggagaatcccatggatagaggaccctagtgggctacagtctatagggtcacaaagagtcaaacacaactgaagcaatttagcacgcatacacgcacaaattgaattgagtagaatccttgagtgttagacttggaaatgtagtgtctaagaggcttatagtggtgacctagagatcaccaaaagtagggtgatgaggcagatttctgggagtttcctacttgtatttcagctagagtggcctccctctttatctattggtcttctgtataagattgcattttttaaaaatgtagctactgctaaaaaatattagaaagccattgataattcatttgcttcaattataaatgagataaatctattttcagccatctacatcagttacaaattatgtaaatctttctaaatagatatagttcagataatgtcccctgcttgccctttctttctttcttttttctttttttggtagttggtttaaaaaagaaaagagggggcaacagcctaaaaataattttttcaagaaatgatgaagcaataaaagtacagaagcctttgaagattgctagcaagttatgtcagtgtctgtaatgtgaaactgcttgaggtctcttcagtgctgtgtgccctcacactgtgaatgaattcattaaaacaatgcagaattcatctggggcaggaaaataaggaaactaatttttaaatgactaaggactgacgataagcttctctgttaatttccctggcctaatggagaacacatacatatgctatcagctcatctctatcattaaaaagaagttagaaccagaaacatgtacaatcacatcaaggcttgtcaattaaaagacaacccaagaaagatgttttgaagattactgattttgtcagcttccatcaaaagtgagacgaaatccagagagcaaggctttggttaatggtgagatctttgttaaaaagcaaagaaaaaattgtttcctacaggtaaattgaccttggtatcatttaccttaaaagaatatttccaggtcatcaaacagatcatggatcatacactctaacttgtgaactctaggtatgagtcagcaagactaattcagaagtacaagggttaaatgtcttgaaaggtgtatttcacccttttgaagcaggaaattatagaaaacactcgaataagcatttttcttacaactaacattgtggaatattcttttaactttctgatggacttttgtcctcaattttcaaaacagtttcataaggcgtggctgggaataaatgctatttacacattccagaagcccatgaactttcttctctttacaaaatggccaactgaatattttgaactcatgcgtctatcaaaaatgtagaagaaataaatttctaagtcagctaaggccaagtgattgtttaaaaacgcaatacaaaaggaatgaaatgaaggcagtcttcctaatacctttggaaatgataggccaaccatgccattttagtataaaaagtcaggatgatgaaggaagaaggttgggcagcctaccaaaacagaggaggtagcagccaaaagcaagtattgttcttcttccattgacatagaaaggctgcaagaaggaaaaaacagcagtgaattaaggaagcaggatatatga

SEQ ID NO: 33834 - DNA, 1413 bp, Bovine  19866881619560
  misc_feature (1)..(1): n is a, c, g, or t
ntgtctgtctaacacttggtagtgtatatatgtgaagtctttatgttggggtatagacagttatcaatgttgtgataatttcaggtagattgcagagagacacaagcatacttgtatccattttcccccaaatgcagtccctttcaggctgccacataaaattgaggagagttccctgtgagaaagagcatatttagaagtaagattacagaacgcaggaatgtaggtgataggagtgaatggttttgattcattcattcaacagttatattgagcacacactgtatgccagagactgtttcagatgcccgggaatagagtagtgagaaaagtgaccaggaaattggagaagtcagagcaaactggtatagaaggacagatttattcaatttaaatttgagaccatatcaaaaggtttaaaagtaaaagttacatatgacgtagaaaaggaggagaaatagaacatttttctcttacctgtatgtattctctttataacttggctgagaagttagtaatttctctttttaccgtaggtagtcaagtataatggtaataacactaaaaactaatgatatgttcacgagctctgtactgaacaaagaagcaaagggatgcaagcatgcatgtgatcagtcatgtccaactctttgcgagcccatggactatagcctgacaggctcctctgtccatggagttttctaggcaagaatactgtggattgccatgccctcctccaggggatcttcctgacccaaggatcgaatctttgtctcttgcttctcctggcaggcaggttctttaccacttgagccacctgggaagtgcagggatacatgagattctgaattaaaccacaaaccaagcaccgtatctcctccaaattgttaagtaacccaggaccatccctttggaatctaagaccacctcttttcttcttcaattattttgtgcctctgggcatgaaacctacagtttcaaaattattctcttacaagatggcaaattgatgctgtcagccaagctactaaattgtctgtttctctccaagaaaaataatttaagtaattactgaggaaaaagcatagaattgcaccatgttttacatttgatctctttgacgttacatggaaatatgatgtttcctcccaagtgctctgaaattgaaaaggagtgcaatagcaaccaaagaatcctcaaggttcttgccagttctttctctggggggggtagaattccttcttaaccacagatctgattttcatttaacttgtatatttctgtatatgagcaagaatctctgaggctgagccttcatcccaaatgcctaattagacatagttccctgggtcttaatgccgtacaaattacctcttgggggaaaacttttcaaatgacaaggttttagagttt

SEQ ID NO: 33835 - DNA, 841 bp, Bovine  19866881752110
  misc_feature (1)..(1): n is a, c, g, or t
nctcgagtgggttccctgccctcctctagaggatctttctgacccagggatcgaacccaggtctcctgcattggtgtcagtttctttaccacttagtgtcacatcattgctgacttaaaattaccactcctcaaagtattacaaaggtgaatttttaacacgaacctgggatttttctacactacatatcctttgaaccctgaccttctcggctgaaacatgcctggaacagatagaaaaagacccaaagcccaggatccaagtatcactgggaattccagcccaccgagaagtgtttacatctctgttccttgactagaaagcagctgaagggaactgacttggagcagtaactgcacgttttttaaatgctatcaaaagttgcacatagatccatgtttcaaacacctaaggagtgttcacacttttaggcaggtgtgtaagcctggggctctaacaaatcagggacaagggccatggaggtggctccggtggtcttgaacatgtctctctcagattaatttaaacattccttccacatctgtatggcttggcagcaagctgaaaatatgtttctgtcattccagtccttcaagagctgctatcttcccataagctgtaatgagtcccacagtcaaagatcgcacggtgtgcaaacttcccaacacctgcactcttcaaatcctgcctttgacttctgcaagagtatttgtcacttcattggcattgaataatacaaacattcttctgacctggaaagtttcaatcaaggacccaaaaaagaataaaagtaaaggaagctcagcctaagaggagaattaagaactttctccctttcaag

SEQ ID NO: 33836 - DNA, 2409 bp, Bovine  19866880675506
  misc_feature (1)..(1): n is a, c, g, or t
ntgccttggtttagaacccctggcccgcctgtagatgacaggaaggaagaaattagtacatccccctgcctaaggcttgttcttctaggagatactttcaaagattaatggcctttttactttgtttcctcacctccttcccatctctcatctataaaagaactggcatctagcgccggataagatggttattttgagatgttagtctaccatcttcttggtcaactggctttccgaatacagtcataaaataaagaaaatttattttctttattggaaaataattggcttccctgaacacctcatctctgaatcattgacctgtcttgtggtgagcagagggagcttggatttggtaatacattggtgttattgggcgattggacttaggtgttggtggcaaggtacaaaggtgatttaagtaagggtccatttcttcacagacttaaccacagggaaaaaaagacctttcttcacccccttctcctaccatttacacatgcataaaacattttgcattcaaccttagagggctgttagattttgggaagaccgtttgtccatggatcttggggtaagaactaaagcagtaaagagtgaacccaaatagggtcagatactatgatcagataaggtggtgccttgaagcccagacagagagttctgactccatttatttaggtgtgtgggaattgttacgggatctcaagcaaggtaatgacaaggtaagagaggtgtctatggaaaaactagtcttgggttgggaaaagggttgggttggggaaaggggcttgagttggaaataagtggctaaaattaagaatggaagtgaaggtgatttgagagggctaataaatatatttttaaggaatatatcacaatttgatggtactttggatgtaaaacttgagtgaagagtaaaagatgactaaggtgtattttaataggcagggagaaaaatgagaaggaagagttggaattgttaccgagaaacagggtagttggagaggaaagattggtcgtggaataatgtttagctttgaacttaatgagttcgaggacacagaagttcagtgttttacaggaaattggaaatgcaggtgcaaaagtatgggactagaggagtcgtatattgaatgaatgtttccttatggagaacaagtgatttcagagtttggggagacaccagctgttgcaactggaggaagcaaaggagtcagcaaatgaatcagaagaaactataagaaacaaggaggagaaatagttgagtgtttgaaaagaacaagatagcagaaagtttagaggaataaggatgagcaaacttgatgacccaatgattgtccatgattttcacaaaaacattgttgacagtcttcaaagggccagtagtaatcttcaaattgcagtgtctttgtagtgatagatacgtaagagattgctaaagatatctagtaaaatatttattagtaaatggaggcaatagttgtataccacatttccaggaaagtggtctcaaaaggaatgagatgaataggttttaaacaaatatgcgtcagcagtggaagaaaagtatcctgtggagtagagataagagatgatagaggtttgaaatacacatggaagattgtgcctaaggggggatgtgaaggactatgggagatcaagaatatcagttgatggattgactttagaaagcaagtaaaaggacctctttccttatagttggaaggaagaatgttaggaaagtaaagtattgaatcaaaatatattttaacctctttaattatcaggcagggcaaaaatactcattgttgagtatggagtgagaaaataaaacagatataaatcattttctgatctttaatgcatggattgggctatttcacattactgtagtattaaatgcttaagggaaatgttttctcaaaaccagtcctttaagctagtagtctttctctcacttttgttgttcagttgctaagccttgtctgactctgccaccccgtggactacagcatgccagcctcctctgcccttcactgtctcctggagtttgctcagattcatgtccattgtgttagtgatgctatctaaccatctcatcctctgccacccccttctcctttagccttcaatctttcccagcattggggtcttttctgttaagttggctctttgcatcaggtggccaaaatattggagcttcagcttcagtatcagttcttccaatgcatattcagggttgatttgccttagggttgacccttttgatctccctgcagttcaagggactctgaaagttgtctccagcaccacagatcgattctttggcgctcagccttctttatggtccaactctcaattccgtacattactactgaaaacatagctttcactaaacggactttt

SEQ ID NO: 33837 - DNA, 1669 bp, Bovine  19866880709380
  misc_feature (1)..(1): n is a, c, g, or t
nttatggataaattcagattctaagattcacagtatattaaattgtgctgttggtcgtatgagatgctgaacaaatatcttaagtgggtggtgaattctagtttccttaacaggacttactgagtcgacataaaaaaagcaagcattagaaaagtggtttttccccccttaactgctctgcctttgtaactaagctttgtgtttaaagcttccactatttgagctaatggacctttcctaattacgttacagataatggggaaggtataagataagaaatttatttatatgtgtacccactgtgaacgtaatgcatatttcaggcaatgcttgccttctaagccactgctgttcttcacaaagggaaggatagtctgcctacacaaaaccagatagtctgtacagatatcttgcaggtgtggaatgtaattaagtcaggtttgaaagtatgaaactatccaactttggtttgtcctgagcaagaaaaattacttaatgcaaagtaaaaagactggtcccaggaaaagcaccactttataataagaagagtgaaaaacagaaagacactagaaagcaaaggaggcaaaaccacattaagattgatagttatcaaagaagtcataatgctcggcaaactccattattttcaacagattcttatttaaatgacatctgttaccaagccctcaaatgaaggtgtatgcaaatgattcactggactacctaaatacaatttctttcaaagtcctataccctaaattaactggaatcccaaattaaccagaaaaactactctaaaatctcaagaactcattattaatataagtgctccaagacaaagcagatctgacctatgcaaatatactggaaccttctagatgaagattattactgagggtgtaacatataaaacctaatttccaacttagaaaaaggcaactttaagaataaaacctatagtgaagaggtgctgtatatgcgactaggtaactcatccaaactttgcatgtgttggtagaactcacaacaaagtaagaatcaaactcactgtattgtatgagcatggcctagaacactctgcccagataaatttaactcagaagtccatgcactgtttacaaatggggagccattatattttcctcttgcaaggaattatgtttattatcatcctaacattttccatttacttttccacatctagcataaataaactaattgaacagtaagaatgaacattcacaaagcaaatatataatgtcccaatatatattgagaattataaacaataacagaaattggacgatagttctaaaaagaactttcaatcttcagatatttaagttttaaaatattcttttctttttttaaaaaaggaagattttggctttttactacaccacatagaacagagtgagtttacttgagtaaattaaaatgaagatttatagtgaagaaatggatagtttctaatctagaaaaacagatttcggataggaatcaaaccacttattcttaagagaaattaattttaatactagagagaataaatccattcttgccaccatcatctgttaacttagagaaatggcaaaatttacttataaaaacattacttctcttccccagtattttctctaaagatgatattcatttaactttacattat

SEQ ID NO: 33838 - DNA, 1513 bp, Bovine  19866880715878
  misc_feature (1)..(1): n is a, c, g, or t
ntttacacctggttatgtaggaaacctcaaggtgcctgcagcatgaaaccatatccgttgttattttagtggtggtgacatgatagactgctagtgacagaaggaagaaagttaagctaatagaattaagaaacatggtataatttgttatccatttcagagttcatgaatgctacgtttatcctgtggcgtctctgtggcgaaatccacagaggttcttaatctgcgatgccaccaactcttgttttactttcacggcgccactgaatacatagaccttattccagcattaagtctttttccttacttcctaaaactctacccagataaattcctcattctccagtcaatagtttatactcagacttgcctacatgtttcattaatattgcttcctctccctagaatgccttcctttgccttgtgaaaattgtatccatccttcaaggcccaggtcaaagtcataccccgtccttaaaccgtttcctagctcagcagtcttacacatggggaggctggtgtacttcagcttctgccttttgcatattaccatcttgcatttgttgcagcttcttatggaaatcatctaaccaaattagaagttcccttagaggcaggaactttacttatctgtgtcccacatgtacttaccataatgcttagcccacctcaagtgcaatttcaatgccagatcaaataataaagctagatttttttttttccccaaaaaaacttcccaggatagaaaaatgaataaagttttttcactagggggaggaaggcatagagcggaagcaagtacattgtccttcaattcagacttggaatgctttgctttttatgtggatttcaccctagtgtaaattcacctctgcctttttacccataagagatttacctttgacttgttcctgaagtgaatattcaactctctattctttttgctctaagatttgtatttcttctcatttcttaatatctttgtttcagtagcttaatgtctgagtcagggtgcttttgaggcaggggtcagatcagtaccatatctacagaattatctttgcctgtgacataatttctggatgtgaactcattgttactgatgtttttttttacagtgtttgggtacccagaggtacctgagattgacgtcttaactctgtattattccacttttagagagtttaatgctgctttctcaaagcaataaaaacacgctgaatttgaagagccttgggcatgaaaaggctctagattataacctaagtactataccctactgttatttctgtcagtgaacagttgggataaggagtgttcatttattaactttcttattaaaattgtgtagagaaattattatgattatggtcctctcttccctgtcttacaaaatgatggctgttaactgattgcatttagagaatatgcctgctttagacttccctttttccctttcccctgcatttcaggatatcaatgcttacaaggtaagagcccacagaaaagttac

SEQ ID NO: 33839 - DNA, 819 bp, Bovine  19866880763707
  misc_feature (1)..(1): n is a, c, g, or t
naagaaacaggaaattaagatgtcagaagcatccatttatactaaaataaaagcatacacacaaccccaaagaagatgcatcccaagaaaaggtgattgacaggttccaggacccctggttgggcttactggtgaaggtagtagggcagtctgtagagactgcgagaagtggctgtttccacaaagccaaaatctcagtgaaaaatcacaagggatacagagaaacagggaaatcaaaggaccaatacaaagtgccagaaaccaactctaaagaagagcagacatatgcagttcctgaaaaagaattttaaaattatggtttaaagagtcttccctggtgcctcagtggtcaagaatctgcctgccaatgcaagacgctggttcaatccctgggtcaggaagttcccctggagaaggaaatggcaacctactccagtattcttgcctggagaatcccatggacagaggagcctggcaggctacagtccatagggtcacaaagagtcacacaactaagcaactgagcaacagaatttgggatagtgttgccatcttaacagtattaagtgttctgaattttctgatatgctataagacctgaaagaacataaatcagaattagaaaaactcagaaatgaagtgatagagctcaggaacatagtagagataaaagaaaaaataatttcagaatattaacctagaaagaaataagaaaaactccaatatattaatattaggacaaaaaatttttaataaaaaatttcaaatatgtaaaaagtatatgagaaagtaaataaactaataactttatatttattt

SEQ ID NO: 33840 - DNA, 3954 bp, Bovine  19866880782366
  misc_feature (1)..(1): n is a, c, g, or t
nggtggatggagtgactggggctgtcatcccccctcacccccagcttccaacctgccctgctgccccggccccagatgagggtatacacttggagcgggagttggcactggatgccaatgagtggccatgccaaaggagccagagccaggaggagccgcctcaggctgagggaggtttacagctgtagaaactataccccagttatcaaaaaacctgactcccagaacatgatgaatgttaatgacctcaaactcaggatgtccaaagctggacaaaaacacctgctacacttctggaaggagatggaaaaaagcccaacaggtagaactttatgcagagctccaggccatgaaatttgaggagctgaacttcttttaccaaaagatgactgattgatttaatcattcttccagagaaagtggatgcttgaatggaacctgtcccttgagaggtattgggcagggataccagggatccaaatcagctgcaggcctgggaaactgaaggacaaggacttttccagatttcttggaacaaagtggcagttcttctagctggtgggcaggggacaaggcctagtgttgcatgtccctacgggatgtatgatgttggtttgccatcctgtaagacacttttcagattcaatcagagtgtatcctgaggcttcaacagttagctgaataatatcatggcaacaaattcatctttttgcggtatataataaccagtgaaagaacaatggaatccacaaagtttatggtatatgaagtattaggggaagatgagttttccccactgaaggacaaagacagtcagaatggacaactctactactgcaaggcatgttttgatgtccctccatcattgttgggtcttcaatgcaagaggccatgtcatagatgaagttggctctcgcctcccagcaattccccacttgaagggtgccaatgatgcaccaatccaatgtaaaatctctcctcttatttcctatcctggagaaggaccaaaaagttatatgacagagagagaattccatgcacctttaatcactgatgagaatggagtccaagaagaatggtatatgagccagataccaagttctcccataataagaatacattttattttcggttgactgatcataaacctataggacctcatgtgaaatactcaagttttaatatccacaagctttcattttgcttgttgaatactcacaactactccatattccctaagatccaggtgactgaacttcagaaaacatttttataattctcaactgactgaaggtcttatttacatttttcaattgtataactttttttctaagctaaggaaaatattggccatctaagaaatttcctgcagtttacgtattgtcaggatgttttaacatctctttacttggagctgaaagcacttgttttggaagttgtacatagtgaaaatatgtgattgtacatgttgaaaggtttccatggtactataagtttattttaccaaaaataaaattaagaaaaaataataaaatgctgtccaaatgtacataagggctctttataaaggcagaagtataatgtataaaatgtcagatgaaagccattctactgaagttgatagtgggatccaagtgaattagttcccaggaaaaaaatgaaagaatctacactttgataaaagccagaaaatttgaaggcctgcctactcttgtgctgacaaattgcattaggtcattttgtatatacatatgactcagtggtgagtgagaaatataaaaaggggagaactgtactttgttcatcttattgcatctgaaagacaatgaggtaagcaaacaaatatactatagtctagtgatcatttctaagctagacttttaactaatagggatctatttccctttgtgggaaagtataagtatggcttccaaagccacagactttctagttggcttttaaatgtttttctgaatcataactagcttaaatgggaaaaaaaaaaaagaagtagacaatttccaagcattcacaagcctgagtaaataaatttcacactaactgaaggaagtgaaagctttttttattcctgtttttaactataagaaatatttttcctttctgagtagttgatgggatacccaatttccagaactgtgacaagacttgataaagtcatctgactcacagtgctactgagtgcaagtggaaactgctctatggaccacagaaatcaaacatttataaattcttggtaccagctctagaaaatcaggtgacaccagacactctttgcagtacacaatataaaggatcttccccttacatcacatatcagtgcccatttcctatatttatcaacaaggaataaattatgtacatgtttaattgccctagaaaataagaggttccggcagtaacctagaaggcagtaagacagaaagcgagagaagtcattcttgtaaataaagcacatagtatttcccatgtgatgagatggcatgccaagaaattactgcgtatttatctgtagaaaggactcaactccagattttctacagttttcactgagactgcttttgtttattttttcccacaaaggtaaacagtgtgctatcagaaaaacatgaactgtttggttcaaattagtggttttattgtcttcagataaatactcaagagtgaaattactggatcctatggtatctctgtttttcattttttgagggactcctatactgttttccatagtggctgcaccaatttacattcctaccagaagtgcatgattgttggtgatctgtatgtcttctttggaaaatgtatattcaggtcctcagcccattttttaatcagatcatttgggttttttttttttatgttgagttatatgagttccttatatattgtgaatattatctcttatcagacaaggcatttacaaatactttctcccattcggtaggttgtcttttttgttttgttgatagtttccttcactgtgcaaaagcttttaggtttgattagatcccatttgttcacgttagcttttgttttctttgccttaggagaacagatacaaaaaaatactaccatgatttatgttcgagagtgttccacccatgttttcttcaacaatgacacaagaagtttgtaatcaaattggggaaatgtaatttataagagcaccatttccagacatgtctctgagctttcacatgactgattatttcctccttctttaaaaattcttctcttagtttctgtcctacttcacatctttttttcatccgctttattatttaaggtgggttcctctttcctagccatgcctacaatattggcattcattgatatttggtctacggtccttttctcttcccttatggccactctttgcagccaaagctggagaagctctatacagtcagcaaaaacaagactaggagctgcggctcagatcatgaactccttattgccaaattcagacttaaagtgaagaaactagagggaaccactaaactattcagatatgacctaaatcaaatcccttatgattatacagtggaagtgacaaatagattcaaaggattagatctgatagacagagtgcctgaagaactatggacagaggttcgtgacattgtacaggaggcagtgatcaagaccatttccaagaaaaagaaacgcaaaaaggcaaaatggttgtctgaggaggccttacatgtagctgagaaaagaagagaagctaaaggcaaaggaaaaaaggaaagataaacccatttgaatgcagagtttcaaagaatagcaaggagagagaagaaagcctccctcagtggtcagtgcaaagaaatggaggaaaacaatagaatgggaaagactagatatctcttcaagaaaatcagagataccaaggaaatttttcatgcaaagatgggcacaataaaggagaaa

SEQ ID NO: 33841 - DNA, 1761 bp, Bovine  19866880832585
  misc_feature (1)..(1): n is a, c, g, or t
nctgttatttaaaaaaactataagcttttaaatcccatagtttgagttataggaagttggaaataagattttgaggaataattttcctattatcacagtccctaatactgctggtttattgtcgttggttatttatgctaaattcagttaaataaataggttaaaagaaatctaaagtggctttaagtgattagataaatcaaaagaataatataatcctcttcaaattaataaacagtaaagtgaacattaaaaataatatgcaataataatgatgaccatttatcccttgttttaaaagtatgccaagcacttttcatgtaatctgattttattctcacaattctgtgaggcattattcttttacactcattctacagatacagagacactaatggagaaaggcgaggtgacattcccagagcaaccagctctgccctgcttaaagggcttccactctgatcttgcatgtactttcccttccttctgtctgacatttataatgtgctatttgaaggctctgtaaccttcaggactgttggtattgatggtgttcaaccattcttcatagttgattttcctgcctcagactgcattgacacatttgtttagagcccagggaactacataggggagcctatattgcaaaaaacagtaggcttgaggacctgcagtcaccaagaaagcactgagcttgggccacaacccctaggacatgcagcacagagtccttgaggtgctggggagaggctgttaaacttatttttcattagctctgtcctcaaggatggtctgtggcaggggttggcaaactatagccaaatatgcctattagttttgcattgcctatgagctaaggatggtttttacattaaaaaaaaaaaacccaaataaaaatattttgcagcatgcaaaaattatttgcagttaaaatttcaatgtccattatttattgggtgctcatttgtcatgtattacctgtggctgcttatgtactagaacagctgaggtgaatagtagcaactaggaccatgtgacctgcaaatactaaatatttaccatatgatccttcacagagaaagtttgtcaatccccaatctaagtattaggccaatccctttaagcaactttctaagaaattcaattactgactgttttaaatttcccagttcatcactcaagagaagtagctccgtgtacagatttgaacacgactaattttattctttttttttctcctcagtggaattttggggaatgtcaggtacagttgctttagccactgtaggcctaaatttagattccttaagctttaaaccgaggatcaagttgataattgctaagtaagtctcatattttgtacttggtataggtctcatagaagtttagtgcttaaatgccttcataaaaataataaaatttctttttataacttttctatcttttaatttttaattttactgccagtcatatttgaaaagaacttaagttaccaatgattattgacattcctattatgaattgatattcctattatgaataatgaaatatcagtggctcagagatcatagtacttcttctaactctttgataaaaattgaattgtgagaagtttaaaaactactttattcctttgttttctacataacatacctgaatgacagtatcatagtactaaaagagctgggaaaagaaaagtagcagaaaggtgcaacaccagcaaactctaatctagctttacctctggtgtaataaggatat

SEQ ID NO: 33842 - DNA, 785 bp, Bovine  19866880953331
  misc_feature (1)..(1): n is a, c, g, or t
ngagacttggatacttaatgagtacaacattgattccaaagtccatggacactcttcctctttttttcatttagtcatttatctaggcaatcaacaaaagttacatatcacagataagtaaacataataatactacaatgtaatgagttccgtaagggagatttgtaagagatacactgggaataagtcaagtaagcgattacctcttacttggggaagtcagagaagacttctgaaaggccacaaaactagaaccttatcctccaaaactagaagaatgtagagaagcaactcactcacatgaaaaaagaatttgagagaatgtggcattaaatcatatagtaatcaacagttaagtttgagactaagacagggtagaatatagctattaattggattataaaaaggataaattcaatatgagttaatatactagtgaaaatagtaagtggagaaaaagaatcccccccccaaaaaaaaaaaaattagaggacaatttaaagaagaaatgctctgcaaaacagtattttatttaaaatttccttcatttttacctgatgtcccctttctgttacaggatctgatcaccattattttgattgtttgttttaggtacttcttgaaaaaataaagtcattgaataactttccaatggcaatcccgctccctactcctgacaaatatcttcataatatcatttggctagaaaataaagatgttctcattgaattcttcaaggtaaagattctgtcttatattctagctcatgttcaatgataattatt

SEQ ID NO: 33843 - DNA, 2408 bp, Bovine  19866880128175
  misc_feature (1)..(1): n is a, c, g, or t
nattgctttggctatttgaggttttttgtatttccatacaaattgtgaaattatttgttctagctctgtgaaaaataccattggtagcttgatagggattgcattgaatctatagattgctttgggtagtatactcattttcactatattgattcttccaaatccatgaacatggtatatttctccatctattagtgtcctctttgatttctttcaccagtgttttatagttttctatacatagatcttttgtttctttaggtagatatattcctaagtattttatgcttttcattgcaatagtgaatgggattgtttccttaatttctctttctattttctcattattagtgtataggaatgcaagggatttctgtgtgttgattttatatcctgaaactttactatattcattgattagctctagtatttttctggtggagtctttagggttttctatgtagaggatcatgtcatctgcaaatagtgagagttttacttcttcttttccaatttggattccttttattattttcattctttttctgctctgattgctgttgccaaaactatgttgaatagtagtggtgagagtgggcacccttgtcttgttcctgactttaggggaaatgctttcaatttttcaccattgaggataatgtttgctgtgggcttgtcatatatggcttttattatgttgaggtatgttccttctattcctgatttctggagggttttttttttttttatcataaatgaatgttgaattttgtcaaaggctttctctgcatctattgagataatcatatggtttttatctttcaatttgttaatgtggtgtgttacatagattgatttgtggatattgaagaatccttgcatccctgggataaagcccacttgttcacaatgtatgatttttttaatatgttgttggattctatttggtagaattttgttaatgatttttgcatctatgttcatcagtgatattggcctgtagttttctttttttgtggcatctttgtctggttttaaaattagagtgatggtggcctcatagaatgagtttggaagtttaccttcctctgcaattttctggaagagtttgagtaggataggtgttagctcttctctaaatttttggtagaattcagttattcagccttctgttcctgggcttttgtttgctggaagatttctgattataatttcaatttccatgcttgtgatgggtctgttaagattatctatttcttcctggtccagttttagaaagttgtacttttctaataatttgtccatttcttccacgttgtccgttttattggcatatagttgctgatagtagtctcttatgatgcttttaaacttaggtttaacttttatttttttatttaataatagtagcaattatattcttttctctacatatgctaaattttctcatattgataggcatcttaggaatttagtcaaattgttaatgtttatgaaacactatttgcatttaaaacattgtttataaagaagatgtatacatggcttccaacttttaacatctcattaatgaaatcagaaaactgaaaatattcatttccctaaagaaaaatacttatttctctgaaggactttcaccaatatttactgttatcaatgatgccatctgttttcagaatcattccttgaagcaagaattatgttttaattgaagccattattaaccatgtgcaaatgaaaaagctataaatttaaaaatatattgattacttacactccttttactgattatcaggagcaatcagatttgataccaagtgatgttaccaaatcatttatgtctgtttcagaaactgaatggcaagtatagatccatgtatttattaattttttactaattccttctgggagatatgatactttacaggtgtatacatatggttctttcaaatttctcttcctttttcaatatgttcatggtcaagttgacaatacattattttgggagatttattaattcccctgaattaatgatactgctccttaaatatcaatgaataatgttcttatagaacattatgaatacttcactgaaattaatgttttaggttgggtgaagatccgtgactgatttaacttcccctcggactcagggcttttcaggattgtttttcagtccctaagtcgtgagtgactccgcaatgccatggactgtagcatgccagactctgtccttcactatttcctggagtttgctctaattcattgccattgagtctgtgatactgtctaaccatctcatcctctattgtcctcttctccatttgccttcagtttttccaaggatcagggtcttttccaatgagttggctgctcgcatcaggggccaaagtacgaagtgtcagttt

SEQ ID NO: 33844 - DNA, 2986 bp, Bovine  19866880175412
  misc_feature (1)..(1): n is a, c, g, or t
ntctttgcgaccccataaattgcagcactccaggcttccctgtccatcaccaactcccggagttcactcaaactcatgcccatcgagttggtgatgccatccagccatctcatcctctgtcatccccttctcctcctgcccccaatccctcccagcatcagagtcttttccaatgagtcaactctttgcatgaggtggccaaagtactggagtttcagctttagcatcattccttccaaagaaatcccagggctgatctccttcagaatggactggttggatctccttgcagtccaagggactctcgagagtcttccccaacaccacagttcaaaagcatcaattcttcggcactcagctttcttcacagtccaactctcacatccatacatgaccacaggaaaaaccatagccttgactagacggacctttgttggcaaagtgatgtctctgcttttgaatatgctatctaggttggttataactttcctttggtggggactatttgaatcaaattccaaacatgctttaaaatctagaagatgttcacagtcagtactttagaagccgttgtgaggcttcctttgcacaagggtgatgtcttcttctctcctttctctcttccttttctcccttctgtcttttttgttttgttttatttttagttgctttcagcatttgtagcttttttcttttgaatgtctttggtagtgcaactttcatcctttgtaagttggatttttatttggggagataatcaaaaggcgtatggagtcatacctgattaataaaataggtgagcactttggggaattctatttttgttaaaatataaggtagaactattagacaccgaagctgatcttgttgtaataaatctcatgaactgcctttaaagaaaatgtcaaaaggaactctacagaaaggtgttgagaaatggcagaattggaataactatataatttcataaaggtgactttgcagaataacatgatttgaatgtgtaagtcctattattttgtttcttgggggctttatccctttttttgttatatcctatacattaaatattatatcttttaattcaaaaagaatgttaattagtatattactgtatatgtgtggatatacttgcaccagatggcagaggtttcagcagatagaactaatagaatatgatacggcaaaccttttttcccctgtgtaattgaatggttgtatcatttgaaaatctgattatccccaaaacattgtttctgagaatctgaaaagcttggctctcagtaactgccagggcttattttatacaacttattttaccactaattcatcctccagctcacccttaatataagtagttaacttccccatctggaaaggggtaagcttctgctcctgtagctattattatgatactaaaagtgtggcttgtcagtgatcatgatgtaatactatagtaagtgaagtgaaagtcgctcagtcatgtccgactctttgtgaccccatggactgtatagtccatggaattctccaggccagaagactggagtgggtagcctttcccttctccaagggacaaattttaaataatgtggtacttgtcagcctcttgaattagattatctgctgcctctcctgtctcctccccccagatttaatgatgccagtttcatctttgtcacgtactcattgcagctccccaaatgctccacttaatccctccaaaatggttgttctcactgggatctgtctgtcttgttactgctgagtcagtgctggttctggggctaaagtttgttctcctgattcttgtccattgtctcctcttgtcatattttctcagctgccttaaatatgtcagacccaaggactagttacaaaaataccacaatgtgttatccagactaggcctttttttctttcaaatgagctttcaagcgcatcaatagtatgtgtaatagaaacaatatttagagtccttgggtgagaaaggaattacttccatgctagagtgttttacaactctgaccgtggaatctctttgtatagttcagagatttttgagtactttagaattcagttcaatgcgctatagccttctaaaacttatgaataaatttaggtgtttgtttttagaactgattttgagaattttttggtatttctcagagtaactagtgtcatattagggggcccctaagctaaattctcccaagactcgctgaattgcatgtctgtgtgaggcttttgttagagcatgtttttaacactttaaaataattatcaggctggatctggagacctttgaaaagtccttaaagttaattacatcttgagagacagcctctgttcagtcacttaattaagtactgtatcaattttacaggattcctttgttaacaaaaatcaatgtgcctgaagtacagtattctggtaatgtgtagttcattgtatgcagacatttctaaaggaagataatagtaataaccacacagttattaaagagaccaggccttttgctattgtatagctaaaatcggaaagcttatggtttgggttcggccaccaactgttgtgctaaattatttgagtcctttgcccctgtatcatttgatgctttgactttacattgttgatttggttccatgtcttctaaaaagatcccagaaccttttgtgcctattttaaggccagcagttaatgataatcggagctaacaagtgggtgcttataatacttaggtgccaggtattagcgtaaggtcttgacgtatgttccttaaacctctcaacaaaccagtgaggtagaaacttttattatcctcatcttacagatgaggaaaccaaagccatgagaggttacccagggtcatacactagcagtaaggagtggaattccgtaagtgtaggtaggtaggcagtagatagacagctgcaagaaggaaaggccctagaagtacagggcacgttgatgagtgagaagagtt

SEQ ID NO: 33845 - DNA, 860 bp, Bovine  19866880346708
  misc_feature (1)..(1): n is a, c, g, or t
ntgtcctatgcataaagatcccaacagtactttttaaaataatcttagtgtaataagcatttaacttcccttagagccttagtaatttgcatgttattactaaaagcccacaggtaaaggaaaagtaggctcctaaattcattcggtacctgactatgatttatttcaagattatcttggacaaacaccctttgagaactcagaaaattaggaggtatgtttgatacatacttcctagtatctgttgccctcaaaggtgtggaggcaaagtagccactggaaaatcaatgtggtgttgactttcagattccccagagttatcttcacatatccttcaaaatgtattctcatcctcagcctctctaattttatgctgcttcctttgtgaagccttcctgctctgctgggaaaaaaataacgccatcctccctgtcctccccctgcccatagatagcactttcttcttcccttgttatagcatttttcacactgtgttagggttcacatttcagtctcccggcctcgttgtgatccccttgagtgccaggatagtgtgttattctagagcttggcgcacaggaagacctcagcgagcatttgttgactaaatctcgatgcaaggtcatccaagatatcctacacaacttttccatctgaacagtttggtctgtattgtggaaactaaaatagatgacacttacctgtaaagagaatcctagggagaagtctcatattattggcagaagacaacttgagaccgtctcatgtcctcccctacccctttttccccaaatcattctttttctaaatgtttatttttaattaagtaattaatctggctatgctgggtcttagttgca

SEQ ID NO: 33846 - DNA, 1399 bp, Bovine  19866880348341
  misc_feature (1)..(1): n is a, c, g, or t
ntgaagcttggaaagttgtctatggggtctagaagcttcacccttcccttcgcacgttgtccagcgacagggcattgagctgctaggtggtgtggacccctggcccttaacttgacgtcatacgtatggctctgaagaatgcgatgctcagcccagcccgtggtgtacactgtagtcagcctgctgtgccttgtgaatattatatttttgccaagagcagccttccagaatgaggtgctagttaattccagttggacatttattcgttaataagtctgctgagcgctaaatactccatttgagagtattcgacaagagaaaactcagcaactattatgtagatctcttccatgaagcagtgtgaacttattttacttctggttttctatgaatgctttatacacccaaagatgatttttaactgagtagacattttatgttgttaaatggagaacacttctagtggagtactatggcttgctctgtctttcctccttttcttttttgaagataatattaaaagttaaatcctttatcctctctctctctcagggtagatttctggatagctagtagtgatggcatctgaaatagccattgaggggtgggtggtattcatttagtaacccgagcttttgcctgaagagcttctgcttaactcttctttgctgtttcaataggtctttatttggttttcttcctgctaggttgatgcatattagcttaagaacttttaaattgtgggggcagtaagaaaactttgaatgcctggggccctacacttctctcttagaagcagccagagggtttagtgtgtatctgttagcaggagagtcttctagaaggtccatttggtacctctcacacccacagctttgtgctatggtttggccctcctcctctcctgatgaatccatgccatgacccagtgtagctgaatctcatgtgctctgaaagccattggaaaggcacgtgttgcagcatcttcctgttgcctccacctcctccccagcatggctgcatgcagctccctctctggctgtacataaccgacctctgaagagaagttgctgccaagggttgcatcctcagtgaggacccttcgaataatggtgtccgggctagtagactggcagaagagtctgtagaaatgtttgggggaaaagcagtgtttgccagtacatagaactcatttgacactgtggaatatgatactgtggattagaaagtgctaaaaacataaaagaatctttatgaagttgtggtagccttgctggcttaagaagatgtgtccaggatgataaaatgtatccgtagcatcagcaactggcccctggtccagttacagatgtgactttgagagacaggaagttgtgataattccttctttgtgactttg

SEQ ID NO: 33847 - DNA, 1861 bp, Bovine  19866880442260
  misc_feature (1)..(1): n is a, c, g, or t
ntacctggatcaccaattatcaaccagcaactaggctcgcttcatctatgctttcatccaggtccaaattactcaattttattttgaagcaaatttcagaaactgtgccaatatttcagtaagcatcactgaaagataaggactcattgttttaaacataattacaagactattcacagctcagaaattaactgtagttccagggcagatcaattaaactttacaaactacaatttcctcatctggaatatgaaaaaaaagtagcttaggtctgtaggttaaaaaagttagtaataatttaaattattatattctcttatcatttgatctattgtatgatgggttttattgacttttttaggtttaactctcatgcatttctagaatgaaacctctctggtatattgacattttaatatatttttggaagccagagggaagtaccttactttgtatttttgcatttattttataaattgaaatgaaattactgtctaaatctttaattcaccttctcatctgtttaataggttttatgagctcattgtgttaattttctttctttctctatgccctaaaatggttcagctattaccaaaatttacttgttaccaacacatctgaaatatgttcatgaaagcatctggacttgacatttgatggggtaactctttttcagtttcttcacctggttttatttcttttctttgctaaagtcagagtccaggttacatgctacttttataatctcttataggatattatgcattcatattgtacttgttttataatttttctgtatggtctttctttcccctagagtgtgaacctttcaaaagtaagagccatttctgacactcgatactcaacaaacgttgacccagtaagtgtgtgaataaattaatgtatacgtaaagcacctaatacactgactaatatagatatcagttgctctttttaattcatcaagaagaaaaaaaaaattcggtcataggctctggggatgaagaccataattccactgtgctctgtaaatcactctgttctattggggccttcacttatgatagtgtctgttgaggcaactgtcctcccagagtgcccagaatatgttagttacctgtgtttgagtttctttttctgcaattcattccctgtactaggcttctcaaggaatataaatgatgaataataccatgtactgcaattaaaagagacaaaatatttgaaaggataagtgaaaaacaaactttctcaaaatcataaattatatggtaatgccatcaagcattcttcgtgcagataggaaaaggataagctcagcaggtgatgatgataaagcttataaacattcatttttagcctgtaggagacttgtagaaatcataatatgcatgggactcagggtctttatctcttacaatgataatctgttttatagaaatttagtcaaaacttaataacaaaaccgtaaaaagaaaaacaattaaaaaccattaaaagaattatagatattgaataacaatagtgtcagagttttaaaccatataagcgctgaagtaagggggaaaaaaaggtacttagttttgatcatgaaattgtaaaatgtttcagatttctgttttagatctgaaaatgaatttatatacaccagaaggttttgtcagctttatggctcagtgtaaaaattaatcttggacaggcagggctgttcctcaaattcaactgtcctggaaggaaagcaagtttttcttcaatgaatgaatagaaacattttgcttctattcaatgtcaaaggctagctcaagtcctacactttgaaacatgtacgagttggatgaagttccaggtacctctctca

SEQ ID NO: 33848 - DNA, 1706 bp, Bovine  19866880546864
  misc_feature (1)..(1): n is a, c, g, or t
ntttccaatgagtcagttcttcacatcaggtggccaaagtattggagtttcagattcagcatcagtccttccaatgaatattcaggactgatttcctttaggatggactggttggatctccttgcagtccaagggactctcaagagtctcttccaacaccacagttcaaaagcatcaattcttcggcactcagctttctttatagtccaactctcacatccatacatgactactagaaagaccatagtttgcctagatggaccttcgttggcaaagtaatgcctctgctttttaatatggtgtctaggttgatcatagcttttcttccaatgagcaagcgtcttttaatttaatggctgcagtcatcatctgtagtgattttggagcccaaaaaataaagtctctcactgtttccgttgtttcctcacctatttgccatgaaatgatgggaccagatgccatgatcatagtcttttgaactttgagttttaagtcaattttttcactcctctttcacttaaatgttagattataaagcaaataagagacctagtttgcaagcacaagtttccaagcatctctcatagctgttcaacataaagttctattgtgtcttataacaatgtgccatttgagatataatgactgcataggtgcatgcaaagggacgcatacacattgggggtacactgaccagaaaaccagatgcctgcctcatttctgatggcacttgcacttgtgctgcagcaagttcttgaggcatatcacttgaaagacttgaaacctgcattgatgcaatagatacaggccctaataacagaggagacggttattactaaactctactgagcctaaaattatgctgggaaaagatacaaacatgtatgagatgcataaagctgcattaagagaaactttttgtgtgaagctgaataccaagcatgacaaatgttgagtcccaagcctgccagaaaataaattagtatagacagaagagaatatactatcaggttgtacaatatggcagacatgcaaaaaattttttacaaatacctttaatcatgaaggattatttccatccctgacacctcctcaaccaaggcagtatgttccactggaactgatggagtgttctaaaattccttaaacctgcatcagccccctggagggtggcatgggtaagatccattttttaaggtgtatagagtacctggggaaggtggaaagggggtgtggcttgatggaaaaggaggagggaattctgtctggcatcggtgtatttgatatattctagaagccccagacctcactttttcttcattttgaaggcaaaaagatccagtctcttcttctgaatttgttattttggaaaggcataaacccagagctaaattaaagtctggaattatatttcaaaaatcatagacgaagaatttgcaactacttttctcaacattaaaaatcatggctaggttctaaactcatagaagtgactccactcttagtatattctttacctctaagagaaaaaaaaagtgactattttagcagcatctacagtttcatgcttgaaacagcacctaagctatattcatgaaccagaaaaggccttattactgttatacaattccatttgacatctactcagccacgaaagcagtttcattttcatgaggaatctgccagatggcataggcactgcatgg

SEQ ID NO: 33849 - DNA, 1243 bp, Bovine  19866880604535
  misc_feature (1)..(1): n is a, c, g, or t
nctctatagtgtccactaggttcctcaccactctgccctcacaaaccgtcaagcttaagccattgctgccctttccttacttagagaaggctggtcatgctccccccacccaccccttccttacagaagcatattatacgagttcacagaggaggaaaaatggacctcaccccgtggtctgaaacataaacctcactggccaatccaaacattcttcctagaaaatctcatttgagtattttttttcaaccctgtctttcatgttccaaagaggtctcctaccctgtcttctcaggagttcagactccaaacttatttctatggcttctaagcgatttacctagaggcaggcaccctaaccaaggagcaggccacttaggaagctgcaaagggcaacaggaagactcactgaatcagtggaaatgggaaagggatcttcccaggggccagaaagcacttcacagagtagagaaaaatggaggtatctggctctctgctcaactttaaatacagacatagccaaagattttttttttaaaggaacaagtatgtcaggatttacttagttaacagtctaaatgatgcagaaaagaagtccaggtgtatgtgtcacatgattcactcttcacatcatttaaccttttcagaaaatatttttccctcagtgttctttctatggaaaaaactgttcttccatgtattcaatgcacattcactgagagcctactatgactcaggatgccttaaaaacctaaggcagggaaccacaatttggaaggggtcaatttcagaccctactttatctacttactttgtgaactgaagttaaaaacctgatttttttttttctctcataaagctagtatggggagtgatataaataaaaattaccgcaagttggcagatagagcaatgtaatttgtatttaaattatgtcaacgaaaacaggtgagtcatgataacatttctataccatgtaatatgttttcctcagtatagtcagttaaacaagtttcaaaagagttttcattaacagatacaaccagtaggggtcattttagtgcaaaaattgcagcaaaagacttcctcatgaacaaaatgtatcaatttctatttgttagttatgataattatgtgcaaatttctgaataaaaatggaaactgagggaaacactggccattcagaaattttttgccaactaagagaaaaacaagagaatgtcagcatcctctagggtaatta

SEQ ID NO: 33850 - DNA, 767 bp, Bovine  19866880701894
  misc_feature (1)..(1): n is a, c, g, or t
ngagtccggcccctgccgccctccccgcactagcgcagtgtggaaccgagggctgcactacgtccactcaagtccattttctgcaggcggaggagacgtgtctgcagctcacactccctgtgtgactcttgtattattttttccttgcgcttttccttcacccccttcctcctcctgcgcatataaatcagtttcagctccggaatatgtcagcccaggggaagttacagacggtggttactcatttatttgcctattgaaagtggtcaaaggctttctctcctgaatgaagggaggggtggggggccgggcggggggcttgcacctaggagtgaaaagttgtttctgtactattagtggctgctttttaagagcagatatccgcgtctttccagtagtgttgcttgtttttttgtgtgtgtttaataacgaggattgttctgctggtttctccagtgaagtattgtgcaccatggtgtctgatggaaggagaaggattgggttagcggagccctccttcttgggagaatcactgttgatgggtgttggccttcaaccctgcccgccggcctcggggtgcctggtcaggtttggggtctagagagacgcagtgagttccttttatttggctaatgccaaatagtgagcaccagtgaaacgcaggatccctgctcgggctgacgttggggccggtggtgctgttctggggcatcctggtgtgcgagcagagcgcacagccttactttggaggggcggaggagggacag

SEQ ID NO: 33851 - DNA, 3530 bp, Bovine  19866880715987
  misc_feature (1)..(1): n is a, c, g, or t
naagctctttacacttccggggctgacagcatgaaaaagtaaaacaaaatgagaggaaacataattgcctttaaatgaattttccttcactatctacatggcttgagctattctagggtgctgctatgctctctccagctccccatgccttctgctaacttctggggattccagacctctctgcatctacatggagtatttttacatgaaaacacaagatacacataaatgaataaatttataaattttcatcatccaagtgggattgagctaaaatatacattttacatctagcaaatgaagcaagtaagagcatgtttaatatttcaagagctttcttgaaacaaatttttaaacatgttggaataaatgtaaacaaatatataggaatgttaattttagatcataatttatgatactaatcatagtaactactctattgacggaattatatgtgaagctatgtggcacatacgtgtttctttcatattctcaacaccaatgctatgagggtcccatccccgggtcccatccctggtcccatcatagaaaactgagacttggagaagtcaattaaataatgcaggtaatctatagaagattatgcagtgctctaatttggattagaatccagattggtgaaaccactgttttgtttcttgaccactaaagcccaatgattcctcataaaggttctgtaagaatcttcaaagaaatttctttttttgtgtgtttgttttgttactattgttgttgttgttattttggccgcactgagcagcgtgggatcttatttgcctgatcatggatcgaatccatgcacctgaagcggaagtgcagagtcttaaaccctagacctctaggggagtccctaaagagatttctcagaaactgttcaagttcctaagtgcataactattctttgcctagacagtcactgaataaagttaaaactattttaagaatatcttctgctcaacttgtttataattcgtaattttacctgttcagatggaactttctagtcattaaatacatgatactttcatgaaatccagttgcttcatataccaagactgtaatatatagtctgtatatttaaaaatacacatggttttgtaatcacgtgtttggctaaatgcttaactaaaatttacagaatgtttacctgtgctttatttggataatcaatgtcatttaaaactattccacataataactatcctaatttaaaaggataaatgttctttaataaactgaaacaagtaattataaaaaggagatacatttttctccaacaggataataatgaccattgacagtcattagtgagtagctaatagccaaagggagcatgaaacaattattatgagaccatgaaattgatttataataaaaacaaatgatacacattggcaaattttaaaaaaaatgtcctttgatgtatttgaaaataatgattctttccaagtttataattctacattttcccttctctctaggacccattttttcaattctaccaaaattattttaaattcaaatcaaataaaatttacatgcttattaatatgactcatgcttgatgagaattaaaatttgggtttttcttgctgtcagtgaagtcctctgattttctcagttttgtaagattactgccaagtcatgcaactttgttaggaatgttatgctaagtatttacaggcatggagagtactatgcttgaatttttacacaatgtattgttctgtgtgtgtgtgtgtgtgtgtgtatacacgcactcagtcactcagtcatgtcccactctttgcaaccccatggactgtagcctggccaggctcttttgtccatggaattttctaggtaagaatactgaagcgggttgccatttcctttctccaggggatcttcccaacccagggattgcacccacgtctcttgcgtctccttcatgggcaggtggattctttaccactgagccacccgggaagctctgtattgttctgtaactttatttaacctgcaatgtcatgaagcttcatatttaatgccaagttttaattatgctgcacattttattttttcctttcaatgttcagttttcttctatttcataccttttaggtcaggcacacatgttatacttccagttgccgcctgggtgctgagtgcattgctatttggggactcacatggcatctgaccatctcatggagtccaggtggagagagaaataacttttgtgaggcaagatgctggaaggatgaaaatgttttaggtcagtcagtcagaggttgcagcaaagtgaggtgagaagaattccactcaaatatttctatattctctgtggaataaaaggtgatcttatggcttatggtgaagagctgggaaagcaagcttaaaagggatcacaacatcttagaacagctgccacagagaatgtggagggggctgactagggacaaaggaagtgatgataaggaatcttcaagcccccagacccatttagcctgcataagtttgcaatatggacagaatgtcacttcaggatgaatgctggtataactgcctctgggctgccaatgctgaactatgcccaaatattaatttggggggataaaaaagtgccattttctcattcccactactctattaaattagatatatataataagattctttttctataagactgaaagaaaatgtttgttaattttgaattttaaaataagtcatgacatatcaatgcaattgaatactatacatatttaaaggataaggatttcacagagatattaactatagttgcaaaaggtacatgcagcaagtcctcttttttgtgtgtgaaaaagttgtagttaaaacgtgccccagtctataggtgttaggtagaagtttataggctgcaactatgaaaattagaaatggcttcataacaccatattcctttgcttccaaggctgaatacctaactgtcctttaagtatatatgataaactcacagtatataaactacccacttaattatatcagatatcagtaggacgttggatggagtcatttgactaagtatatggatgtggcttggtgatttagatctgattagaaatgcagtacttggatgcaatctcaaaaacgacagaatgatctctgttcatttccaaggcaaaccattcaatatcatggtaatccaagcctatgccccaaccagtaatgctgaagaagctgaagttgaacggttttatgaagacctacaagaccttttagaactaacacccaaaaaagatgtccttttcattatgggggcctggaatgcaaaaataggaagtcaagaaacacctggagtaacagacaaatttggccttggaatacagaatgaagcagggcaaaggctaatagagttttgccaaaagaaaacactggtcatagcaaacaccctcttccaacaacacaagagaagactctacacatggacatcaccagatggtcaacaccaaaatcagatgattatattcttcgcagccaaagat

SEQ ID NO: 33852 - DNA, 1054 bp, Bovine  19866880735887
  misc_feature (1)..(1): n is a, c, g, or t
nacccgtgggatgctgttactcctcgtcctggactaaattttgaggaacaagactctaaggggacttccagttctaagattacctgaatcattttcaggatttaaaaaacctttgaaccttcaggggaagacattcagctaccagactggagagaagtctgagtaggtggacacagtccacttcctgacagaccaaactttcaacttgagaggcaccacagcaaagttggcagctgtgcatcaagaccaaatgagacatgattaaaaaaaaatttttttttagttcctcttctctgtaggcagttgctattaaatgggactaatggtggtttaaggaaaagtgagagaaaaaggcaggccaaagcaagcactatacagaggtcgtctctttggaaacggaagctgtcagtctgggagctgggggtcctgcttttctaatccttctctactccagcagtcctgcagtgggaacacacgggcccttctgggctgattgaactcaccttattctgaagtccttcccctgacttccctgaggaattcttaaaacaggaatgaagggttttgttgcactattaaaaagaaaaagtattagatgcagataatcatattcttgacttgattaaattatggtgcatcttttaatatgacagactgaagaggctttcagaaactaggccaaattttctggagagttgccagtaatcacacggcatgaatacatatataagcaagatgttaatgctcaagaattttctttctcttctgtgaaggtaacagtagcgctgaagccatattcagtacaacccaagcagcagatggcaatttgcttaaattgcaagatggatttgaaattgggactgatgaaaatactagtgcctatagtagatgaaaaggagttgcttcatttcccaagatccttcaaatgtggaaattattactcagtgagtcagctaatttatcacgaggtatcagcactataaacacgaatccctctaacgttcctacctatgcagcataaattcctttagttgtgtaagcaaacacttcaatt

SEQ ID NO: 33853 - DNA, 2278 bp, Bovine  19866880746544
  misc_feature (1)..(1): n is a, c, g, or t
naggatacagaagggttacctgagtatgtgataacgatacaatttaatgactttcctttatagttaaaaaagtcttttagaatggaaatttaaaaaatatactcatttcaatagcagcattaatcatactctacttaggaataaactaacaaactaaaatgttaacaaaattgtataaagaaaaacattcactgaaggacaaataaaaagtgatgttcctgaggggaagatttactaacaagcatataaatccttcccaaattagtatttgcaattaacatgtttccaattctagtcccaatgctatctcctgggttcaattctacagttcctttgcatataattagctttctggcagaaagcagatggcacattcaaatggtgtaattgaggaaagtttaatgaagagataatttaccaaggttttggtagggtgatctgaaaaccacaggagatggtgaagccctcgggactcatattaccatactgagtcctaaacaaatgggcaaggggagggagtggagaacagagagttccaactccagctatgggagaggaccacccaaggagaagtgtggtgcactggacggaagccactgaggattgaggactgtggactgtagccctgctgggaaggagctgagtgaacaaatgccatcttcctttagtctactcttgctgcctctcattggccaaactcaaatggaagcaagaggcaagagattcagggtgaagcagtccaaagatgcccagctcccaagataaagaggcaagcgaacctggagaagcagatacagatgtccggttctgtgttaaagaatcatgcataatgaaaatattgatgactacatgtaagagaagaggattggtcctattccagatcttgaaattttcaacaaatgcacgattgagaaaaggaataggcaaacaaagaacagagtggaacagagatcccaaaataagcttgagaatgtatgcgaactagttatatgttagagattctattccgttacatagaggaaagaatgacttacctgataaagtttctaaccattgatttggaataaaagaaagttgatattcaactcatacaacaaaaataaattacagactaatgaaaaacctaactagaaaaaactataatgtatctgaagaaattatggtgggttatttcttataattatggttttgattgaatttcctaagtaagacatgtcacaaagaaaaaaatgtaatgaatttgagcagataaaaatagagtttggatcacaagaactagcaaacaaacagattcatgacagcaagaacatatctgtgacaacacacagaggattaattactataaaataaagctattccctgaaaatatgtaaaaaagtcataccattaaacagaaatgggtaaactgtatgtttgtatagatggtgtgagaagaggaaatataaataataaggatatgaatacatgttaaacctaatagaaaaatctagaacttgaaagcatcattatcagaatggaaaagttaagaaatattaggaacatctagtgatgatgagagtgtgcaaagacaagtgctttcctacttactgttggtaggagtgaaactactacatatttctacaaattatttttcaagtacctcttaaatttaaaatatgaatatagtttgttctctaattccacttggaaatgttaatgaattctataggaataaaataattaaactgtaaaggatatcttttctttccttccttcctatggccctctcttcctatcttacttccttcttgttaatgatttttaataaaaaacatgcatttaacatggtttagttattaataaatgtacttcagcaatggaaagctgtattgcagaaactatgagtgctttcaagcactcatagtttctcctatatttccaaactgcattgttttagcttgggaccacacagctaccactggccaatgaatatatagcaaaaggacagacctcagaggcaattggcaggagtgtgactcttcccaccttctcttcctttgccaagtgtgccttggaggccttgtttccatagatggcatagttacaacatggaggagagctgcctgacccatgttggatttacaccatcaagaagtaatctattgtgtgatgcacccgagattttggagtttatttgttatgacagatatgttaattttcctctaaagttctcaactgattggctaagtcccacccgcaatgtcaagagtaattgtctacttaaagtcaactgattgta

SEQ ID NO: 33854 - DNA, 1119 bp, Bovine  19866880804864
  misc_feature (1)..(1): n is a, c, g, or t
ntgctagtagatgactgtatagactgaattgaattgtgtcttttcctactctgaagtatatactgaggtcctagcccccagtacgaatgttcactgtatctgaagacagggtctttaagtaattaaattaaaatgatgccattagaaggaaccctaattcaatataactggtatcctttgtaggaagagaaagatttggattcaaacaggtatagagggaagaccatgtgacgacagggagaaaacagccattttcaagccagggagagaagctttcggagaaaacaaccatgatggccccttgatgtcagccttccagcctccagaattgtgaaagacatttctgtttttgatgcctcccagtctgtggtattgtgttatggcaatcctaactaacagtgataaagagtagaagtttatctttcaaagccaatctctaaccaacagctaggataatgctttggctacacatctttaagataacttaaggataatgcttttgctatgcatctttaaataactttaaaatgaataatattaatttttgttagagtcaataaaataaaaatgtggtatttaataccaatttatagttccacatgaactttcaggtgctgctttactgaaggactattaatatagtaaaatgcatcctgatgtacaataagtaatgtgatgtggtcttatgtatgttattacacattctggtacaatctagaattcatttttaaaaaagagatcagaaaaacactgtttgaaatagatacaagccatggatgataaagttctttatgttacccacagatgttaaatggattgtatagtaatgtgaaagtgccaatcctatatttcaggttgaaaaagtcatttcgattttaaactcctattttttcttcctcaaaaatttttttaaactcccattcaccactgaattctcatgcttcatctcaatttcagccatgtattgtgaagttacacaaaagttcatttggctgattatgagacatcccaatttgagaagatatttttcagttaaaggaagctgaaacagattaattttaagattttgattattcaaaatgggtttggccttttatttaagaaatggttttactgaaa

SEQ ID NO: 33855 - DNA, 1289 bp, Bovine  19866880930436
  misc_feature (1)..(1): n is a, c, g, or t
nacatccaaatttgtgtacatttgacttcaattcccatgaggagtcagactatcacctgtgttgacctaccttccagaagtttctacctctggaatcccaggaataatgtcccttgcttgtgatcaatctctaggtttctctaactttaatatattgcctttaaaaataaaataaacaaacataaaagcaagaccgtggcaatgattctcttttctttcgactacagtagctttctcacttctgtattttttttccatcacctgaccttggcttttcctcttaagtcctacaatgttatctgctacgttttaataatgtctttatacttgcatttgaacagaaatatagataacctcctctgcaagagtggaaagggccttttaacacagcccaatgatgacagcttgttggcaaatcccacggtagagtactggtgcctcgttggggtccaagaaacaatcatgttcaacagcgttgtatgttttattgttcttgaattttgctaatggaatatcaagcatatctgaaatgattttaccacttaatacttataattatagaaccttagggtatgaggtcctttggagatcatctaacctgacctcctacacaactataggaactgtccctacaacatccctggaagcgagtcatctcaacagctctttaaatgcttccagaaaatggtatgctcactccccactttccactgctaataatcagtgataattaatgtgactcttccccttctcaggacaaagaactatgattggagaaatgtttagttttctgattccaatgactggggaatattccactggtacctttggcttttcccttcaggattagagtggttaaaccaaaatgtttataagaagtataaatttgttccgcaaacagaagatttcaaaggcatctttgtttcttctctccttacactgctctgctattaattttgggttcattagtcaggattttcagatccacttggctgccaccttcctgcagccagaccatcttggatcaaaaggtcagcaggccattcccatctcacacctgccacaagatctgatttttcttttcccccacactgatcctagtcactttctgttaattcactaattttattgaccctgtaacacattctgggaatggtgggccattacagagcctatcacttcgagatgctttttctgacagctacagatgagaaacaacctccacacgacgcattctgcaccatttcagctgcttctttaccggtttaacacaaagaacatcttcttta

SEQ ID NO: 33856 - DNA, 2276 bp, Bovine  19866881045025
  misc_feature (1)..(1): n is a, c, g, or t
naagtagattacactgatatcctgcagtggcagaacatcaccctttgttttctcttgcttggatgttcctactatcttttgtgctcctcgtttcttccttggatctcttattctgttcctgtgatcacgccctttggatggtgcaggccttggcagcctcaggggaaatttgcgttgctgggacctgaatgaagttgctgctggtgttttgttctgtttttaacaaaatcctgactgaataagcactttcccaccaggttagccctatattcctatgtttcttgtaccgtgaaattgtcactgtgtaagtatcaggaatgtcaacctaatttagctgcgcagattagtttatatcaacatcctgaaggtctgaaagaatcagtgaagcatagcgtttttgagctggaagggatccccagtgcaggtctcaaggaattcaaggagtggttctggtgaagttgggcatcatgcctaaaaggaatctgatatattcagtgtctgctttcagttcccctttgatatccttttaaatgtgttggcacaggtatagacttgtggccttttaatccattcctgtgaaaaagtagtagagtgaggtgtgaatggcctggagaacacattggagctctgctatgtgtgggtaatgccaatgtatatccagacggagtgcttttgaaaactctgtactaccaagactgatccctgtgagggtggtctttgtactcagcaaaataaaaaaatgccttctgtaattaggcagaaatgcatggtggggcttgccttgaaatccctgaatttcaatggccaattctgggtctcctgccttactcacaatcctaaataccacttcatgcaagtctgtgtaaaattctttgattttgtgaattaaagcccaaccagcaactaacaatgtgactgaaacattttactacaggactatgatacctaaaggattgagagaacctttatatatatataaaggtttatttttatatatatatatatatatataaaggtttatatatatatatatatccacattcatatttgcttgcacatctgtgactgtattgtcacagttccataatgtcagtatataatgaagcagatatttgaacaagatgtaaagggctaaatcacccaggcacacttattttcaaataacttcttatgacccaaatctgttgagctttgctggacccataaattgcactggcatttagaaagaagacactgtgcccagaaatggtgcaatcacataaggtaggcccaggatataaaatatatttctattgcatcgggtgagcacaggctataggggagaaaataatgtactttcaaatctcttaccacatgatggagcaagacttgctttgagccatagaactgacccaagtccacatgtataactgacattaattttgcaacataaataaggcttacttcctttcttagggaactggaggataggaaatgagaaaagaatataccaaaaccttttgtttgttccttaaatatatataaatctgttgtataccagctatttgttatgctgttttataggcactggaggtactggaggagaaaattgacaaacattttctgcttccttgaaatttactttcaagtagaagaaaatcagaaatagacatactaaataaaccaaatctattgcatgatagaacaaactagagcaaaatgagggcttaggtagctgcatacttaagtaggatgattggatatttttctgagaagatgacatttaagcaaaatgtccatgaaggaagtgagccatgtggatatctgggggaaaggagtgtcaggaagagagaacaagtgcgaaagcctggagatgagagtgtgtctggacagttccagaaacagtaagaagctaggttatctggagggaagtgagaaagaggataagacctgaaagcaaatggtggggtatagtggggagtaggagagactagattttataactttgtaagctttgttttgactctgattgacatgggagccactgtagtgctttgagcagagaggttgacatgatcgcattttcatttggaaaactctggctgctgtgttgattggagtgtaatggggagtgataggcacagagagactggttattagcctaggcggtaatgccaggtcaagctgaatacaagaataatggaaatttttatactggcagagtagccaaagtcattgcaatatagacgtaaatatgtcaaaaagcaacactttgcctatttacaatagtacagagt

SEQ ID NO: 33857 - DNA, 3590 bp, Bovine  19866881066107
  misc_feature (1)..(1): n is a, c, g, or t
nctaaaattacattaagatataagaaaactctgaaattctatttttccttttactttattgttgcatgtgatgtgatgctattaatccatgctaaatcatacatatgtagcaggtgattttacatgtatgagaaatattccttttttttttaagtaacagaaatcattttaatatatacattttcactttggtcaattcaacaatgatttctaataagcatgcatatccatttagtttgcttcaaatatatttatttctcaacatgcagcaaccttccttatgagatagttgagttgaactatttattcttaaggagtaaaaatgtaccttgttctcaaagagttttatcaactttaaaattttcagtgagccttatgaggctgctcaatatggtagttttcccctgaaatttcctatttggaggatggcaaaacagtctaggatcttccccagtctactggtcgcttgtattcatatcacagcttggctggctaagaggtagaaacttaataatatgtagatagtattcaagcccagttgagtgagacagcttcatttttagaaaggaaaccaaatcatgaaaaccctcctaatagtatgatttgttccagggttcttttaagaagggacataatcctcattcacaggactctttatggccttctagagttttctgctccagccagtgttctctagccaggtgacttattgcacttgctgcagaattgaaggcattaagtctctgtctactttcataattggaggtggtgttagtcttctcatttctggccaaatggatcagaccacactttcaaccctggtggctgtacgtcttgttgaacaataccagctcgatttatggtttgttccttctttttctagtgctcccaccttcctgctgtgtgacccagactggatgtgtatgcgatgggagggagtgtgagccagtggctgagggcaccaaggggccacaggaagtacgggctcctcccaacgctgggaacacctctgtttctcaccagggtgtgtgatgaaatccggggcagcttttaagtctgtactctttcagccgcaataagggcccggagtagatggggtagaaggcgacgccgtcatcaggagatgaagccgccgaaaatgagagcagtgcgcaggttctgggaactggctccagccgggctacctggtttatcctagtgcctgggactctccaaacctggctcccgccggctgggccatgacccggctccagaaaccttcctaaatgaaatgtgacatgttggaagttctcattagcaagaaattatgagccaaggccaactttgaaaatggatggggaaaagcaggcagaaataaaagtctggttcaatctagagaggagccaagagtatagattaccaaatccaaggggtgtggtgctcttgattacaatctgagccagtctttaggtccaagagacctgccctgtggatgcaggacagggcacagctacagcaggcagaagtttttagtacaagtagaaacctataccagagctaggaatacaggtgggttttaaaagaggtgttcaaagccaggtccaagagccacgccaggaatttaggacctctaggtgaaattctgggccagacccagagggcgagtggattgggaaccagcagctggagtcccaagaagaagttaagccaggagactgggctatgtatgggaagaacaaatatatatgagagctcacttatcacaaaagaaaggagctgcaaaattccaccagcctctcactggttgaagggttagatagttctgcacctgcgggtgagggagttttagggcacacaattgtggaaaatggcacgggccctaattgctaacatctgcagatgcatctgagcacttattttgccaccagttgtaacatcccccaatattcagcaactgcaaatatgacctacatcccagaaatcaatctaaccatctatagtagatacactatgtctgggagcagggaattcacctccacaaagacccaactgagatgtgaaaacagaagagggccgtgtaggaggaggtaagtagaagatagcctctcaagactttgcttgtgcaaatgtgcaccagctatctcacactacctctactcacatgtctccctgtgtcaggttttcacaaattgcaggtaaagaggacatttaaattccgattcaacccgcaggcgtgtgccagagactgaaggcggtatttggtcttttagactaaaatggaaaagtaaatgcagatggagatgtatcctctgccaaccagagagcaacaagcaatatggtttccaaccaggcagaggcagcacttaagccatcatattaagaattccctgcataagaggagacaatacctcagcagatatgagtcctgattattatcaacgatagtcccctggcagagggtgtgaatgatttgcttctaaatgagatcaaatatttcacaagcacagttggaagaacctagctgtttatgaacaattaaatgtttggctagaaaaaaaaaaaaaaatagaaactttatttaggactgaagccagctatggtagtttgaaacaaacatagcgtgtttcattatggggatcaggaagcaacataaaatattttccaccaaatttgcctccaggtagttgtagtgaaattcagtcagcaattgcagtataatttgaaaagaaagaacaggagtccctttagcaattaaagacacatctcaaaagataaataaaatggagtcaactctgaaggtaatccatcttgcatgatgttgagagcagaaaaattaaagtagtggaggaaacaacccactctagctctttacaaaggagtttggttcagtgagggtgaagagtaggggaatgtgtggaaaggatgacaaagttataacaattgattatcaagcagaataaaaagcagaataagtgactggacactaaatagggaagagttaagggaaatcaataggtctacacacagatgaaaaaatacttatgaaattgataattactgctccagagatgaaacaggagaactaatttttataaggtttagacataatcagactacctataggcatcaaaacagaagttcatgcagtacacattgaatatcttgctccaagatccacaaaggggtacagtcacagtcccctgatgcccacaaacattcgtttcttaacagtatatggatataaagcagagatttgaaaccacagagttggggtttaaacatacttgtctaaattcccagttatgtcagtcagttcagttgagtctctgagtcgtgtccgactctttgcaaccccatgaatcgcagcacgccaggcctccctgtccatcaccaactcccggacttcactcagactcacgtgcatcaagtcagtgatgccatccagccatctcatcctctggtgtccccttctcctcctgcccccaatccctcccagcatcagagtcttttccaatgagtcaactcttcacatgaggtggccaaagtactggagtttcagccttagcatcagtccttccaaagaaatcccagggctgatctcctcagaatgg

SEQ ID NO: 33858 - DNA, 1302 bp, Bovine  19866881072509
  misc_feature (1)..(1): n is a, c, g, or t
nttcagactgcaggtgtggcatgccctcttattcagagcagttttatttctaaattcatgtgacaatttttttttttttttgattcaagattactacctattttcctctgtaaagcagctgttgcacagcagtactggcttcttgaagaaggttaatggtatcttgttgacataatggcagttatgccctatatgaaatggagcaaagtgacaatatataatgtgttcattcttggtcaattagagtttttcaacattaaggaggtgttagggtagcataggcttttaattatctggttccctgtttccattgcaaaagatactgagactatgaaaagcacttagtcattagaaagtgttgtaagtttatgatttattcatagatgacattcagactatctaaatgttaaaactcctttgccgaattagcacaagaattttgagaaaaatctttatttgactacaataaatattatattagatttgcttattatttccatctgtgaatgtaaatgctaaggacaaaaatacgtgtgcctagggttggaaaactgaaaaactaaccaatgaacaaatgattaatcataatttaaagttcattctagttaaacttcaacttgatcttgttacttttctgactttcctggtaaattttgaatagatgagtgtgggtaccattcatttctatgtctttagaatttaatgaagtaccagaatattatcagtagagaacagctatcttcctgttttttatctatctaagatatttcagacagccattctaaaaggcatctgaaaaggccatttcaaaaaatacctgaaaaactgataatttctttatggtttacaattaagtgttcagcatatttaatgatcacagggaacttgcattttttttttcagattggtacaactcactgtttctccatgactaatataataatgtacctaaatgagaaaatagaagaatattgccaaaaaattaaattagattatttaatttcttctgggacaactgccatcaattgtcatcaatttaaacatgggcttctttatataataaaccattgtaagcatgtattgacaaagattatagtttgagagatatgtgagaatacttattttagacccagatgattacattctttctctttcaatttaaattttatttctgaagcttaattatgaaaatatttgtgatttgaaaatagtgtgttaaataattagaggccataaatctcaatttatcacaagactgtcattcaatctaatgaaactgttttaggccttatacatagaaca

SEQ ID NO: 33859 - DNA, 1400 bp, Bovine  19866881123899
  misc_feature (1)..(1): n is a, c, g, or t
ncatgagagcagaaggctgcataggcaagctgacagtttctgcaggacatgatggagccattaagtttccactaggtgggaatttccagtgaaacaaaatatctagaacaatagcacaacaaatacccacttccaataatgtctttaagacatatgaaagttctatagcagaataatcatctagagacatagggggaaaaagttcaggtttgtttgggttagcattattaggcaagatatactgcagtttaaatgtttatctaataatgagtaagcctggtacactgggtcacacacataaaaaggataggggaactactctaggctcaaatcggagctagaaaattacctgtctcgacattattagtagctccaattatttaaggaagaaattctaagcacatagtttctcagggaagcagcaagcagtggaataagcacacacttaagagaggcaagttcaaatcctgtctctaccacttagcaacaatgtgacttcactgactacaaattttgggtaatactattggcttcattgactagagtcaaggtaacaggtgggaaacaactgatgtaattcatgctaatttatgtctcccttccttctccctttccctctgaagtcaaggctctttcaaaggcttccaaaggaatcgattatggcagcggtgagtcctgagctagactctattatgaggcatcccatatcattccttgttcatttcattcaagccaccatcattgcagcttccttccattttctgactctttagagatgaatttatgtgtcttcttgaaacacaaattgcttgagtcatgcttatgtcatgtcctgacagtcaggatcaaagtttcgtggagaagtgggaggttcttcagcaacagtacagaaaacacaacttcttagataggtttagttttatcattatccaaaatcattgaaaatatttcctcctctgtttcatttttcaaaacctcggtaaacaaagacctcttgttagtctcataacttgtacttgcacagaagaaatctaaataaatttctttaggatacactttgatggtcgagctccacaatgatttcataaaaatattagacatgaaagaattatcaaggatggactctctcagagagaatcaacattctgctcacttctgcaatttgcacttcaatatgattctcaggttatgcctgatttgggaggaatgaaaacaaccacactcagacacatggcacaaaggaagggcatctccctgcacagtttctcctcccacaaattctcgacagctggggatgcccaggagatggcagacaggccatcagggagctctttgctcaagtgctcattgaggccacttcatcttgtaactctttggacgtcctcttttcctggcacgtg

SEQ ID NO: 33860 - DNA, 839 bp, Bovine  19866881139694
  misc_feature (1)..(1): n is a, c, g, or t
nattcgattcctcctttcctaacaccaacaaacagggctctggaaccaccaataattgaccaaaaaatgaaaaatgatggtgattcaatatgaatttaaaaaattaaaaagtaaagaagacatacatatgaatgtgatatcatcttgaaaatgtacacatcatatcttgattcattatcttctggctcattctcagctcaggcatttattcccagagccttccctgatcacacctccatctcaagccttgttccatgtctctcctctgtgcttctaacttccttatgtctctctctgtgagtgccctcaccacattgcactaaaaatgtccatttatatacctgtctctctgattagattggaaccttctagaaacaagaactttgactcacctgtcctctcatccccagcaccaacaaaatacgtgtatgcggtgtatgtgctcaggaagtttttatgaacaaattaccctctatcaggcaccaaacaatatgcaagatattttataattatttgggtatctaatgtaatagtataaatatttttaaattataggcattatcacatgtaattctagcaaaaaccttatgagatagggatgactgttgccagtttagaggggctgagtcatgcaatcagacaggatcaaaactggaactgaaagttaggggaaaggatttccaaagccgtgtccagcactctttcttactgcttgtatgagctattggcactacagaatgatgcattattcacttttttccccaaaataaaccatctgcttgttctctcccattaatatgtaatcaagaattagtaagatttgtttgcaataattttgt

SEQ ID NO: 33861 - DNA, 458 bp, Bovine  19866881188702
  misc_feature (1)..(1): n is a, c, g, or t
naggtgaagtgagatcctggaaatacagagagtggttgaggtgtggagggggaagagtgtggcctgtcttggtgagatttttgcttaggacagaacagtgattaaaatatacccctgttacatggacattaacttaataatcctgctaatatacaattacaaactgagataagtgctctgaagaaattttgagagcacttaagaaagagatgtgacctaaagtggagggtcaggaaagggttcccctgaggaaatgacatttaagcttaattttcaatcagaagtggcagttaattaaatgaagagagtggggaaaatgcatggcaatggcccatgctgctgctgctgctgctaagtcacttcagtcatgtccaactctgtgcaaccccatagacagcagcccaccagactccccagtccctgggattctccagcaagaacactggagtgggttgcca

SEQ ID NO: 33862 - DNA, 1226 bp, Bovine  19866881208211
  misc_feature (1)..(1): n is a, c, g, or t
nctcgctgtgaatttcttaaaaataagcactgtgctcacagcatttcatataaggaagaagaaaaaagggaatgataaactgagtgtgactaatgtacatgtagctcatgtttctctttagggattatgaaacctcttggagttttattcttctctgtccccacttgttcctgatggtgtgaagtcagtctgaccaattccaaagtaaaatatgcagtgcttcatttcctacattgctactttaaggtattatgttattatgaaatgagtacgtaaggatccaatttcacaagagtgactgaggcgatatgtgtgcattttaaaagcgtaatcaaggtaaaattgagttcattttccatgaaaatttcatgtacagctactgaaagaaatcatttctggcagaggcattttaagggcaaaaagttgtaggtgcaaataatctaaatggtaaatgtatttgctctctcatcttgaaggtaaatttcatgtttttagcactaaaaattcattagcactctctttcccctcctccttagctcaactggacatcagcaaacctttgcataaaattttgaaccatcaccattgcaaaggcttctttgattcactcccagttctgcttggttcaggattcatatagaggatttgcagattcctcccgcaaacaactttgagggctggaactcattcatctaaagatgctaactgtaaggcctctgtgccctatttttaacccacaagttcttaccatgaatccatacctcatttaaaggctttgtgtactgcatcttggcaatttgccaatgcacagtaaaactatctgtatgtgaaaataagtaaaggctgtcttgaattaagttgccagttctaaactacattctaatttcctgtgaaactgtaataaaaatcacacagtttacttttctcatctgtgaaataaattcatctgagaaattttttcctaataggatggagatactgaaatttataaaaggagtcacttctttgatgtactgaaaaccagaatacctgtcattataatctactgagtttcctgttaagataaatattaagtaaatcacactaaatgttggaacacccttctataaattgtaaagacacggtgttaaagacagtgactgtacatacttcttcattttcagtacatgtatttgaaatagcaatatgaataaaaaatttagttactattactaaaaattaagtga

SEQ ID NO: 33863 - DNA, 858 bp, Bovine  19866881279164
  misc_feature (1)..(1): n is a, c, g, or t
nccagatactggaatcagggtggggcctctcagtgctctttccccattagtctgtgaactctgaaaagttaaagttgtacagagtgtcaagtgcagaaaatgtaaaggatatattgttactataatgtcacaggaatatgatcatctgtttaaaactgcagtggccacgcacataaaaatgagagacggtcgcataacctttccagggactaaaagctcagttcatgtttactcagccgtggaaggtgattgtcctgtaggaatacagattatgaattgagagctcctcgctctgctcacaccaaacagccaaacatttattctaaatcacaatcagaaataccactgcagcaaaaccttaattacctaacaccctcaactccactctaaagcatatatagccatttccccacaaggaagagacctcagaggggtcactcacacctttccagtggctttaatgatctttggtgcagatattatctgaattcatttctattttagttctacacttaactaaattgtcattaagtctctgggtctgattatggaagtacttgtggaagacaggcattttattttagaaaagatctgaagaaaaataaaagaacaaaacaatcaaataagaagagagaaaaaacagaattaatgaattgaggtgttaatagttcttccctcctgggaatgttaccctccctgaatcttgacctctctggtacataaatacccacatgcttccggcaaggatgtctctttttaggaggccttcccttcactcctgtcgacctgggaactcccttcgtcatcctctccacctctgacccacgcttccattgccaggggagtcccgggcagagc

SEQ ID NO: 33864 - DNA, 1446 bp, Bovine  19866881302161
  misc_feature (1)..(1): n is a, c, g, or t
ntttgatctcctggcaggctacagtccatggggttgtgacatgactgagcaactaacacttttcatgtaacatcaccagagaaatcctgtctcacagagaaaaatcagaatgtttaaaattaccaaaagctttgaagtccagtgccaggtacagcataagtgtccaattaatatttatagactgatgggggggagggaatatttatgtataaataagaatattgactataggaatacacagatgattttttcacacagtatttcaataccatgttcagtttggagcctgaaacttaagtgaatagagaacttggaatagttccagagaaaagcaatgaaaatgattaaagacttggaaaatggggcctataaatcatgagtacaggaactggggcttatttaacctgaaagaaaaagctacatgactgcaccagattcttatatctgaaagtgaaagatgggtgagatttgccatcacccgtccatacagcgctgcaagcagaaatccagaagtggcaaagatattttccaagtattagtattatttctgtgaacctctgtctcttttcttgtggtttttaaaacaaccaacagcggccctgggacaagctgggtgtgcattgattaaacccccaaacatgtatctagtgcccccgtgggccaggtgccttgctgggcattacggagagacaagagtagggtaatgtgtgactcctaacctcaggagtgtggaggattagtccaggagacaaccgtgtaaagacggttgctggatgtcagggaatctcctctacagatgatacacagtgtctttaagaaaggcacaggaaagttcacttgggaggctggggtgaaaaaaaaaaaaaaaaaacagagtttctttaccagggtcttaatgctgcaaatgagtttgttgagcagaagtaggcaggagagcacttaggacattctgtgtgaacagacatcaagcacaggaaaatccaggcatgtgagatggacacgtgagagcttgaaccagtcaggagggccggagcagataagggaaatgttatcacatccaatttgcagataaagaaactgagggtcagtgttctcagtgatttgggcaaggttatcagcaatcaagatcagagttgggacttgaactcacaagtcctgatctccagttgttactcctttagcaattctaaggtgccatggtgtgtcagataaatatttctttccattagagctgaaattattatcaacaaaaaattcatcttgttgagtaatttgagggggagatgatgtcatcatggtcatatggtgcaaagtcactggattctgtgtacacacacacacacacacacgttatttataaatagagtttcatctagccaaaatgtcatttactaatgaataatgcatctccgcttcatttgttcagttataccccacatagtaaag

SEQ ID NO: 33865 - DNA, 1809 bp, Bovine  19866881402103
  misc_feature (1)..(1): n is a, c, g, or t
ncagccaatgtcatggggctcttgttgaaatttctgtcacatttggtatttatgaaaatgaactatgtccttgggaatttcaaaaggctctgaagcacaggcctgaggagggcaccagagggaggcagagcagagtgtattgctgtgaagttctgataggggtatttggattctaatgatagtgatgattctgtatggtaggaagttagaaagaatcagaatcagaacgaaaccctcatgaatcctccaatgtaggaaaaaaaaagaaaatctgattttgagtaaatttacctgtactgccagttaattctgagaaaagataggtttgaaatcttgtagtctttattttttagagacacacttaaacctgagaaaaggcaaacacgagcgatccacagtcttttgggcataggtgacactgagtccacctcatgtctgcgtggctgctctccgagatggctcttcacatcaggtggccgaagtattggagcttcagcttcagcaccagtcctttcaatgaatattcaagtttgattgactggtttgattgccttccagtccaagggactctcaagagtcttcaccaacattacaatttgaaagcatcatcctgcagtgcccagcttttttttatggtccaactctcacatccatatatgactactgtaaaaaccagttttgactctacagattttggtcagtaaagtgattccactgctttttaatatgctgtctacttttgccatagctttccttccaaggagcaagtgtctcttcatttcatggctgcagtcaccatccacagtgattctggagcccaagaaaataaaatctatcattgcttccactttttccccttctatttgacatgaagtgatgggctggataccatgatatcatactttttaatgttgatattcaaaccaactttttcattctactttttcaccctcatcaagaggttcttcagttcttcttcactgcctgccattagagcggtatcatctgcatatctgggtttactgatatttctccctgcaaacttgattccatcttgtgcttcagtttctcaggaaatagataaggcagtctggtatcccataagtttaagtatttttccacagtttgttgtgatccacaaagtcaaagtgtttagtgtaatcaatgaagcagaagtagatgttttactggaaattccttgctttctccatgatccaacaaatgttggcaatttgatctctggttcctctgccttttctaaaaccagcttgaacatctggaagttttggttcatgttctgctgaagcctagcttgaaggattttgagcataaacttgctagcatgtgaaatgagcacaattatatggtagtgtgaacattattaggcatttcccttctttgggattagaattaaaactgagtttttccagtcctataaccattgctgagttttccaaatttgctgacatattgagtgcagcactttaatggtatcatcttttaggatttgaaatagctcagctggaattccatcacttccactagctttgttcatagtaatgtttcctaagtcccacttgacttcacactccaggatgtctggctctaggtaagtgattacaacatcctggttatccaggttattaaaacaattttgcatagttctgtgtattcttgccacctcttcctaatctcttctgcctctgttaagtccttaccattctgtcatttatcatacccatccttgcatgaaatagtcccttagtatctccagttttcttaaagaggtctctagcctttcccattcta

SEQ ID NO: 33866 - DNA, 849 bp, Bovine  19866881433322
  misc_feature (1)..(1): n is a, c, g, or t
nccctcaaagatccagaggggtagactctgagatttttgagaataaggacctcacttagtcattcagaacatacatatcaaacactgagatgatggcccagataaatctcctcacctaatgattataccatccatgattttgctttaagagctggtaattttcactttataaatttacccttgagtttggggtcattacttttattttactgctttgtttaattttcattcagcagtattagatatgagaatcaatagcctgaaaaatttctttagagaaaaatgattctcagtaggaaaatgtggtttctagttagaagctcactgaactctcatgagtcattattacataaagtcccattagcaaatgtgaagacaataaaaatgtattattttagttctcatttttttcattagttctactaaggatctaaatcaatagctttaaattcttaattattttgaagttatgtggggtgagtgacccaatccttcatctactcattcccttcttcagttgctatagaggtcaaattatcaaggagcaaaaaagtaagttgtaggaaacctggctagcagcatatacatcattgaactatttaaaaatcaaacaagaataagagcatatataataggttttatagtctacaacagggagttggcaaaatttttcttaagtgtccagagagaaagcattttaggttttgtgagtcttgaagcctttgtgccaattatacaaatacactgttatagcacaaagcagccatatattatacaatatttgaacaaatgtagctccacttcaaaagaaaacacaccacttcatttatataagcaggggcaatcggg

SEQ ID NO: 33867 - DNA, 960 bp, Bovine  19866881455099
  misc_feature (1)..(1): n is a, c, g, or t
ntttaaaaatctaagaaaatattgactcaaaatatccctgtaactacaatgaattaaaaataagagagacagagaaacatatgaaatatgacttatttaaatctggaatttgaaaatattcagatgatactccaagataaaatgagagtagcaaagtaatcctagctagagttttccttttttctttgttattcagctgtatgacaatataccatacatatccaattaagagttgctataatttagggggggaaatctcaaatggcttaaaacacataaatatgagactttcaccgttcaatttttctaaacctcaaaacattttttatctttttgttgattcacaaacctggacagtctcccaggtgaaacctgaaactagcccccatacaaggagggcaaggagaaacgaaaaagacacagcacttcagattggtagatggcaatactaataaacaagggaacttacataggaggcttgtcttgggagagagcgggatggatagatcattgaacatgcccaccagaatctcaaaggttaggggccttaactgggctcaatcacatatactgttcagtctcaacaatacagtgctctcaaggctgcatccttgaaaacaattcccactgcaggaaaaaaaagtggattctaaggacagggggtaaagagctcgcagttacctgggtccagatcaaagatcaatgggtactcatatcttctcgatgataatttcaatattcctgtaaaccaacaccaccttgagtttctcaaggaaaacataacgagatggaaacataagaacctatgtaaataaaaatcaaaatacaaaataatataaataatcttcttaccttttaaaaagtcataaactagtatgtttacttgaagacgaaaggatatcttatggtgccactatccttccttcactataggaagtacaacttacaatttatcaatat

SEQ ID NO: 33868 - DNA, 1512 bp, Bovine  19866881457569
  misc_feature (1)..(1): n is a, c, g, or t
ntacagcatcaccaaaagagttgagaagtcatccttatattccaaatctttctttattataggacttcttttctctgaactccatttccaacatgctagctcataatgcttctaaatttcatctggggctaacacactcactcggagaaggcaatggcgacccactccagtactcttgcctggaaactcccatgggcggaggagcctggtaggctgcagtccatagggtcgttaagtcggacatgactgagcaacttcactttcacttttcactttcatgcattggagaaggaactggcaacccactccagtgttcttgcctggagaatcccagggacgggggagcctggtgggctgctgtctatggggtcgtgaaaagtcggacacgactgaagtgactcagcagcagcaacagcagcagcagcaacacactcactgcttacaaaaagctgatagcatttgtgagatatgggggaaaaatcaaaggagttgattaaattgacatagagaattatttctcttgagaaagtgatttctactgttcagttcgaatactgacagctttgtaagtctctatgtaatatcagcaataatctaaacattgtttttaaatgttgtaacataaaatgcctttttgagacctttcttttctatggaaaatataggatcccagatcctatattttatctcacatagatataatgaggattataatgaaataaggatttgctaactatgattttctgagaaatttgtctctattaaaagaaaatgtagtgaggtcatttcagaaaattctcagggtattcagatttggactatatggttgccataaaagagacagatacaaagcatggtgtgagtgttagaatcatctctcctatactgaaggagagcaatgtcaagggaggctttgcagagaaggtgacctgaatagatcataaaaggatgtggaggagtttgccaagtggaaaaggtgtgaagggcaatgatgtgtatacagaggaaagcactttgtataaaaacacagaagcattagacaatggtacttttggccaaatgaatggaaatttgatgagacactgggagaataactgaagatgaaggaattcagccacataagggacaaatcaaagaggttcttgtaatccatcttaaagattttaaaagtatttttgtaatcactttttgataaataaaaataatattaaatctgcatgaattttaaccttaggttgggatttataatgtcttacagaaacaactaactctattagagtctaaaacctagactccagaaaaagtatgaatgtatgtgcgtgctaagttgcttcaatcatgtccaactctttttgatcctatgaactgtaacccaccaggctcctctgtccctggatgctccaggcaaggataatgaagtgggttgccatgccctcctccaggggatcttcctggctcagggatcaaacaggtgtttcttaagtttcctgcattgggcatgtgggttcttta

SEQ ID NO: 33869 - DNA, 625 bp, Bovine  19866881490946
  misc_feature (1)..(1): n is a, c, g, or t
nggaaagagaaaaaagaagaaaaggccaagtggcctttcttttggacaataattggccagtggggtcagaggcttgttcaggccactccttatttgaaataatagagctttaatattcatgtaagagtgtttgcttgttttctctatagccaagagagaggggggttgaagtcagcctaaccggatcattatgagccaagttttaaagaaggaaaaactaaatacaatcctttataatcccaaaagctatcgtctgccatgttgaaagactgttcctattggctctgatctgagcagaaccataataggggaagttttataaaattgctcttgtactcagagcaggcagaaactttccctgagatcttcaaaatagatggtataattagcaatcattataactttgttaccactcatacaacaagatacacaggactgcttattaaaatgagtcttgacacaggctagtggtacacacacagccacaatacagagaggctctgtctacactgagctattcaaacagccaaatcttatatacaaggataaagagcaagggattttcaataagtgcaccaacaattcaatatctctaacatatctatttatctaggagagactgaag

SEQ ID NO: 33870 - DNA, 1292 bp, Bovine  19866881808546
  misc_feature (1)..(1): n is a, c, g, or t
ncacatgtagagaaataatgagctttttccaagtatgactgccatgtttccattgtcaatagtatgagatatgatgctataattttccatcatctaacttatgccagcagttctgcattttgaaatacagagtaattattctctatacaggctcttcattttgtgttccatatgggattaactggaaataatattttaaaattttaggtatctggaaaagtaacaaagaaaatgaaataagatctgaaaagcagtttaatgcctttgagggaaaataaatgacagaaaaatttgaatactcaatgggaaggtaaagcttgtagaaaaatattgctgcagggtatacctaaatgagaaataataaattagggtattgaaataaaacattttttacaaagaacaactgcaaactggaaaatatttcatatttcccattatggttgagcctattgttttcaaagttactgatgagacttaaaacagactatcacttttcaaattatttaaatctgtataaccttggagctctaatccatttgcattttaccatctgctttgcatgcttcttaatttaatatgtatatctcagaattgattcaacttacaagctccttatgaggaagacatgtgctactactgattgcagagatgatgatattcaacagcctgtacaacataaatctgaaaggacagaatggaaagaacactagacaaagagtaaaattctattcagtgatatcataattacgaactcactttgtgaccttgaaaaacatatctaaaccctccaggcttctattttcatgtgtacaatggattagaccacctttataagacctttgccaactccagaattctcaaatatatcatcttattgagggaaggaatgatcatttcaattaagaaatagacatgagccactggctcttctcccctcctttaataattttatttaggaaagtgtttgcaaaagtttcaaatgaaaaattgcagtcttattacaaatataactagagataaatattaaaaacttaatatcaaagctcaaaactaataaaaatgagccataaaaaatgaaaattaaatatatcagtaattacaataactgtaaatataagtaaattcactgatgagaacctcttactaagagagagacttaccattcaatacaaaagcaaaacttaatccagctataagctaattttaggagacatccctatgatacaaaaatataaaaaaattgaaaagtaagaaatggaaaatatatatttaaacacctccaatggagggta

SEQ ID NO: 33871 - DNA, 1259 bp, Bovine  19866880465303
  misc_feature (1)..(1): n is a, c, g, or t
nctggagtggggtgccatttccttctccggggatcttctgacccagggatcaaacctgtgtctcctgcattggcaggcggattctttaccactagcacccctgagaaaccaaatgcagcccaccaggcccctccgtccatgggatttcccaggcaagagtactggagtggggtgccatcaccttctccaatgcatgaaagtgaaaagtgaaagtgaagtcgctcagccgtgttctgactcttagcgaccccatggactgcagcccaccaggctcctccgtccatgggatttcccaggcaagagtactggagtggggtgccatcgccttctccgcaaataccaaaaacagatgcaaaaaaacgtatctagcttttcactaattgcaatgaggacaataattttattacggctttttacttctgcatacaaaaaaaaaaagactaaaaaaaaaccacgtgtaagttttgagaatggttggctcttagtagacaggcccacaagtgaaacgagagacaccagtgttctgaagagacccccccattatggatggtagaggggagacatcgggagtcccttggtggatgattttattcattcctggaagggcccacttaccttcttgttagtgcttcctccagatttcacttcttggcgccttagaatatattttcatttttagagttggaatttaccttcaatttactcactttatttcacttttgctggtgcctcaccacccatacttttggagtcctgtttgctgatttggacttctcccaaagatgatcatctccagagatgtgccgggtacccaatgactatgtgattaagaagctggggtgttggccacgttacctgcagccactttctggaatcccttccacctctgttctttgtatcagtggcaaagcacattagccataaagtttgggtgtggattttaattcacatcagccataaaaagtagcctgtgagtaggtggagccactttattaaaaatattttataactacatcttcaaacagcttgatgaaaacttatttttattgggcacacatgtaacagcccacaactcctgctttcaataatttctgaaccctcagcttgaataaataaagaaaaaatgtcagtgatataaaatgacaagccaagcttaccaaaaggaaagtttaaaaataatcatgtctccaggctcagtgaaagataaaaatcaaataacgcagcttgtttcaaattgtccctctttcaacacacactgc

SEQ ID NO: 33872 - DNA, 1047 bp, Bovine  19866880700710
  misc_feature (1)..(1): n is a, c, g, or t
naggctgaggcgacgaggacacactctcagcacctgcccagccagccggacgtcagagccatcctccccgaccgcagcctgcgtgaacaggatgggagcatgccctgcctaaagcgtcaagctcccgtcctgccaggggacactcttcccgggcctcgcgcccacgggcattaacgctgagcagcaggtgagctcaggcctcggggcctcgagtccatggcaggcgggaagcctgcgttccagagcttacctggtggacgtgccggggatggggcggcccggtgtccaccaggacacaccagcagtagcccgtggacggatggcactgcaccggcttgtagaggccgccatgggcgcactcggggatgaccacgtttgtcgttcttgggctgcctggcctcctccagggccgactgctgttcctggtcgcacgaggacactgcagtgaggaggagacgggagtgagcgcctgggaaacagggcggggccggccagcagggtccccgcgctgctatggcggcagggtggacagcttccacaggggatctgatgtccctgggctcccaaggccatgggtaggacccggaccccagcgacagccatggccctctgctctgggtccccagatggagggaggggctggcagacacccagtccagggccactgagcacccccaggagggtcccaggtgaacatcccccaccgccgtgccctgcccgagggctgcctgaggccgaggctgcagcgtgtcagccccagaggctccgctgcagtgcttgccaaacaggccgcatgccccggagatcggtcaagaggaggaggagccgcgccagtcgggccagcgtcacgggcggtgcaaggcgagtgctgaagctcgcccgcaggaaagccgctgaacagtgaactgaacagctaaactcagaattctaagcacagcgtttcaatgcgtaggggcttctgtcttcctacgttaatagatcccgtttcttttttgcatttagatgtgaggtaacttagatctagggagtccctgggtcgggaagatc

SEQ ID NO: 33873 - DNA, 5002 bp, Bovine  19866880716044
  misc_feature (1)..(1): n is a, c, g, or t
nctactgtacaggttcagtaaatactaaatgcacaagtgaatgaacgggcagaagactcccaaactcaccgtcttaccaagttagatctctgtgaaagggtggacgtttagtcagaatcatgattcagaggagcctggattacaggagaggcttcagccaggaggccagtgttgggagtgacgacggggcagccccgaggcagttcagagctgggggctggccgcaaccaccccccaaaggctggtgtttgtcacacgcggctggagtccttccatacctgtgcgttcctgcagacacaggggaccagggaaggacagctcattctttcctctcgacttacttccgttgtcagacggtttcgtgacttgtcaggagccgcgtgacaagtgacaacgtgagaaacacgcgtgcgtgtatgtgagaaacacgcgtgcgtgtacatgagaagcacgcgtgcgtgtacgtgagaaacacgcgtgtgtgtacgtgttccagttcctcccggcaacttcggagcccttccgtcgagacgtgcaggtctaagcagcaggcagactttagagtcgcacggaggaccctggagagcctgaaccagccatcctgctttaggtgattcttattctgaacgtcatttcagagtccactttgcgttgctcttctacaaacttgggattgagaggaaatgctatttttagaccacaacaggagctgaggctgaaactgcagtgcttgggccacctgatgggaagagctgactcactggaaaagaccctgatgctgggaaagattgacggtgggaggagaaggggacgacagaggatgagatggctggatggcatcaccgactcaacggacatgagtttgagtgaactccgggagttggtgatggacagggaggcctggcgtgctgcggttcatgggggtcgcaaagagtcggacacgactgagtgactgaattgaactgaggaggaatggagttggttgacaccccaggcagggagggttaagatttcccaccgagcaggatcacagacatcctgagagataggtctggtgagagctccaacatcttcctgcaccaagaggcctcaggttcacagctcagtatcatccgacaaaaccctcattttccaacagacaccccctttgttatgatcaacactgaagtctccatccgttaacctggaaaatcgctaaaacggtacacatgaaaatttggtagagtttttggtactaaatcagcagcagctaggactttgtttctcatgcagtaagaattcttttcattttttggttttcctcaacacttctatttctccttcttaaaactaaaatatggtaccaagaaaagtttctgctttccttgttcttactgattattgacgcaatgagagatttctagagatttctgcctttaatggttaggttttgcctggaaagccttgtctgtctgagagggtcttccagcccaagttctatcttacacaggcttgcggttttagaataaagtgaagtaaatgagagcatctccagaaagcaacactgaagaattaaagcctctgtgtggattagtcgtcagctcagtttatgagcctttcccagaaaattggatgtggtgacagggcgagagaagtaacaccacgcgaacctccagggtcttaaattacctgaaggaaagaatctcaccccggccgagagcacagagcgagagccgcggctgaatcgaaggatttaggggctggagaccgagctgccaagccaaagtctgtgcagagccctgcggccggccgggcagcggtcagcagacagagccgctctgtgtctccgttggcagcacacctgcggtggggctgggcgccgcccttctctgaccccaggcaccctggcagggcagccgccgatggccccaagagccctgaggttccgtcgggatccgacttctgtctcaggcacgagtgcagcagcaggggcgcggcgtcgcgtggacggcggccccgcggattctccgggctcctggagcaaacggccggccgggggagactggtggagcgcggaccggggtgccggccgtgtccgttttcttggaagaagccgcggggatttggaagcagcgtctgggctcctactgtgttgcacatggcaggataaacatggccccgaaagagtctattagggataattaatcattctcgcccgagatggtttctggaagggctcctataccttcactgcaggaggaatttctaaatgcctagcagaggcaccatgcttttttgtttttaaaaccgttcaacaaggactgcttcttcagaaagcattttctatctaaatgcactgatggctggacctcaagaaatgatttaaatgtttttctcaaaaacaaggccagcatttttcaatgcaactgttttcgggcagaacacactgtgctttttgtggactgggccttgatacttacagagattttaaaagaaaatatttgggctgtggtttaagaatcaaacagtcttaagtatgtcaataatgagaggctggaactcttcctaaaaaaatatatactgactgccgaatgcagggccagcgtctggaagccaggctgtgccaagggccagcaccctcaccctgctctgctgcataggcggccagaggggtgggcacgggtgggctggtccatcgcgtggcaccatccccagagcgtggacacggccctaaggaagagcatcaccctgattcagctccgtgttgtccgtggagtgagctctgccatttcagactcttcctgtagggtgctgaaagtcactcagtcgtgtccgactctttgcaaacccatggactcatccatggaattctccaggccaggatactgttgggggtagcctttcccttctccaggggatcttcccaacccagggattgaacccaggtctcccgcactgcaggtagattctttaccagctgagccaccagggaagccctgcgcagagtgcatgtgggttaagacaccttgctatctgagagggacgactcatttttcctcctaacctggtggccaaaactgatagatccctctgctgtgtcacctctcacgggagccaggctggctggtctggcctcctcctgcttccagggccaggcccgcagccggctggcagaattggcgatctgacttggctcccctgggcctcccttttgtggagccgcttgcccaagggtcaaccccagctgctgctggccttctgggtctggggggaggggcaggcaccggatctgcaaacctgcagtatcttcagtttaatcagcatgcggtgattcagacagatccatacacaacattcccacaaaaccgggttctcccacaaagggggacttggtggcagttggcggccctcaccggtgtccgggaggagggtgtttggggaagtttggggtcagctcgtgagggcatgaccctcattgcaggaacagcctagtggctaggatgctcaggccacagatttgttataaaagacatctcgtctcgttaatcttcataacttacttttgaaccctggtttcaggatgggtgaaatgagatctgagttcagggaggtcacctgtgatctccacaggacgggcctgctcacgaggtgtcaggagggggaggtgcccacctggccggggtgtcaccgtgggcctgccatgtccgcaaagatggcctcgctcctgctcagccttgggcccagcaagcctgctcccgttccgtctccagactcttcagtccactcaggactccagttccttcatcagaacacaggcactcggagaagccgggccagggtcccagagccccgcttagggacatgcgtcagcacgcagttctgggtttcccttctttccctcccattctcaggaaaccttagcaagtcaaggcacagacacaactgttctgactcttctttatcttttgagccttgctttcaggatacagatttgacattcaaatgtcaggacttggcacatttccttgttaggcttgcttcaagaaaggaacgtgtgttggggggctgagaggaggtggggtgcagaagaggatgcatcgagatggatttaccagggggccccacacctgggttcacagatgcacgtctgggatagatgtgagtaacgggtacatgcacgctgcgaggacaaagagcctcatttacgactctcgtgtgagcagagcctctgagaccaacagcgaggcaggaaacccaggaagccaggccctgggacagcagcaactccggggaggccacaagcagctcgtcagctctgctcccctggggtcggcacgacccgctgggtgaagccaggcctcacagagaagaactgaccccgttcagcccaggggcaagtgcagaaaggtgggagtccccttgttccgcgacaaattgagataatcacgcaaacccccactgtgcttagaaccccctctgtgcttaaaacccccactgtgcttaaaacccccactgtgcttagaacccccactgtgcttagaacccccactgtgcttaaaacccccactgtgcttagaacccccactgtgctgccctccctgattcagcagttgtttcggaacatatcatcggccaaatgactcaattttccacttcagctttatttgtagatagattttaagataggtttccagtttatacaccaattctccttggagaagggaaaaaacggtgaagtgtattttatgaagaataccaactcccagcgactttgatgcgtgtgtgtatcaaaatagaaagctagttattttttttgtcctgcatttttaaaaacgaaaatcaatatttattctttatcaacatccagaagtcagcaagttgtgaaattatgtacaagttgagattgacaacattaactttgtattaataatataaataatataaaacaagggaagccgagtggtgtgagttgtacacccggatttcagctccaaaccttctgttgtgcgagcaaagtcagcag

SEQ ID NO: 33874 - DNA, 1934 bp, Bovine  19866880766816
  misc_feature (1)..(1): n is a, c, g, or t
ncatgtgggcctcatcagcacagggtttgaattccagctcctgggggaggaggcagggtaaactggaagcagagggcaagcgtgtttctgtgaagcacggggatatcacacactctgctcagaactctggaggaaatcgttcagtgggcccacgaggcctcctggggggctgtgatgggggtgggtgtggtcacgtatctgctaagcccctgcagaggagcagaggctaggagtcccttccctgtgaggaggggtatcctggggcaagctttacccagcatcgcaaacctgtggttctcacgtctctttaatcaggtgactcactgggacgcatcctgaaacagatgtgtattcttcacaaactcttttccttggggagtgactcagacaggctttcctggggaggcagggctctgggtggtggtctgtttcttctgtgaggttataagcgtctgccttggcacagcggggctggcccactgctcatctgagataagcagaagcaggaaaactgctgaagggaggggtgagacaaaggaagggctgggacctcaactcccggagacactgtgggttccgggaggttggtggacttcagggaaaacccatcagtattgctggaatttcacaaaaaataatgttaatttctgagcaacttccaaacttctgtgtcacgattcaactctgaatttccagcgcccatgatcggaatttggtggatttctctcaaaggtcgcatggtcacgtattccttacagcagccagaagggaggcgaggcgctccccaccacgttcctgggggggccatgacggtgtccagtgaacttgggggcctctaactccctgacccccaggtaccatctacaaattcttaggaagcacaaggcatgaagaatctccagcatggcccctggcttttgatgagtaaaagtcccagagaaacattgctgggagtctgtcccccatgacgctgccccgaggatacttccaggctgccttacgagagggtcagcagaactgtcgtgatggatcatcactgggtttgcaacattacaaaccaacttcattgcttggcttatgattccaactgtccactgtctgtgttccggtttatggagctcctcatggttaagtgaaggctgcgtttctcccctttcttctcggaggcccagagagggtccaggggagcagggctgtctgagccccagccctgtgggcgcctgcccttggctctcagtcccctggtctctggcggcggccacgtcgctgcaactcctggcaggaggaggctgaaacccccatttgctggcccacgtcccagggcggcaggaagtctcctagtgttcttttttattttcttaccagacaaaaattctttgactccagaatgatttccaggaattacagtatgagaacttagtatgtgagaaatgcttttctttttaaaaaataaaaataaaaccaaagcagaagaaaccagacggaacacaccacgtgtggccacggccaccttgcaacaaaaagcaattgtttctgatcctctccgagggaccttcaggggaggggctgctcctcaggggagaccaggggcaggcggtgctgggggacccggggaggcaggggggctgcggtctctcctgctgcgcccttcctggaggtccaagcatcctccagaagtggagtctctcgctcctgtcgctcggtaaaatcaaggaatggctcaggaaggcgtagggactccgggcggggctccagcagggcagggcctcggcgtctcctcaggcgggggctgaggaggaggcggggcctcagaattcggggcggggctccggcagggcagggcctcggcgtctcctcaggcggcggctgaggaggaggcggggcctcagcgtctccacaggaggaggcggggcctcagcgtcttccacgggagg

SEQ ID NO: 33875 - DNA, 1064 bp, Bovine  19866880910206
  misc_feature (1)..(1): n is a, c, g, or t
ngcaggggtactggcaggtgggggtcctgggagatgggggttcccgggaggtggggagagtcaggggaaggaccctgatgcatacagggcttggacgtcacagatggaggacaggaagagatgcctcatctccaggaaaagccctctagagcagcctgggcagacgccatcctgcgctgatagaagccggtcagtgagatgccaagtggcagcaagagagcagcctggagacagcacagttgggggcaggcagacgggggagtaggtgtgagtctggcaggctgctgaccgggctgcaggtgctcagggcgaggccgtgctgggggtgggtgcagggtcaggcccacgggcaccacttaaaaggcttgatgccatcagaagtttccagtgtctaaggtgaagccctggcggggtctttgcaatggacagctcagtgacgcctggaagcagatcgctggggaaacagagggggtccgggagacccttctcagaagcttggtttgttcagggcagggtgctgggctcctggggctgtgaacagcgggcatgagaggagacaccagggctggcaggacatggtcgggaaaggaagctgcaggtgcgctgtttcccacggggggtccgaggccccggggaagaggggctggagggggatggtctcgtgagcggagacatgactcggacatcgtgtgctagttaacatggggcggagctcccccagccagcacagagcccgcggcgtctgcagccgcgggcgggcccactcaccgtccccgtcgatgtccacggagcaggcgtcaccctccccgttgttgtccgtgtcgatctgggccgggttgtgaacatacgggcagttgtcgcaccggtccccgacctcatctttgtcgtagtcgaactgacgggggttgaagagaagctggcagttgtcctagaaaaaaatcgagggaagaattccagcaacagcgtagagacgcttgctgggttactcataacaggactgggcacctccaagtcgtgtatttaaagcagatcaagataaccagggtagaaatacagccaggaag

SEQ ID NO: 33876 - DNA, 749 bp, Bovine  19866881093904
  misc_feature (1)..(1): n is a, c, g, or t
ncacccgcatcaccacggggccagaggtgggctcctgtctgcctgggtcttccccacccccgggctgggctccctgggtgcgtcctggtaaaaacggtccgctcacagcatcatagcaaccctggagcaggacatgggacggcggggggaagtgagctggggctggtcctcacggggagttgctgactgttgctaacggcttgccaggtgagccgtcagccctgcgcctggcaaacggggaagaggaaagcagagaaaccatccaggcggtggagagagggcctgtcagagctgggtctctgtctctagtgtccctgaggagcgatggagagatctgattcacaggctgccaccgtgggcgtgtgcggactaccctgacccctcactaggagtttgctctgttgaatgatatcccaggactgttaattccgggagcttgaaaagcacttaaggagtgtcttcagaataaaattaagggcttgtacccacaggaagattctgggccacactgacacaagattccatcctgttgccaaggaatgtttgcatttttggaggtatcttccaaggagaaatcacattttacagcaagagggaagaatggaggacagaatccatgagacatttcaactttttctgtgattccctgttaactttcctagaaaaataaaatcaatacaggaagaatatgcatgaaagtagcccatagattaatgcataaagtgatatccaggttggccagcaagaag

SEQ ID NO: 33877 - DNA, 1230 bp, Bovine  19866881397162
  misc_feature (1)..(1): n is a, c, g, or t
ncctcagggggaaggaggcccgcagacagctgcctctcgaggcctgatgtttgaaatcgaatttggcaagaggcttatgtggttactagcagttcaagatgccctgaggcaacatcacggggaggcagaatcttccacgcaagtcaacatgaggcaggcctaccctcaatagccctcacccagaactctggcgtgtgagtcatggacctttaaagctcctaacgcttacttgtcaaggtggagatcacagcagtactatgtccatggggttgtacttgtaaaggcggaaatcacagtattgttataaaatgaaatagactccacagagtgtgttatgtgatggactctcagcatcttacatttggtattttttctttttttgatgttttagcaaaaattatcccagaagtgcctcaaatggccatggagatgtctcactaagatgcagggtcctggcatctgggccagagatgcatcagttaaggcttcactcaaaaataaaaggttagagaaacactttatctggagcagaaatatctttcaagatttggcattccctgttcaacataaaacaaagtcatatcacaagtagccaaggctaaaatttggatttttttttgaaacaataaactacacagatatggaaagcaggtagctggcaggtctctttttcatgaaaaagaaaagatgccacacacggggaagggcggaagccttacttctagatttcctataggactaatggagtcggtgattctcagcctttggtttccttaaggatcatgtgagattctgttttcgaaacagcctgtctccaccctgcaggtcttgactccaaggaccagaaggggatgagaatccacattttttatcggacacagtgggtggttctgagggacctctgcctgactcacaccatgagaaactctgcaccaaatcacacacacagtcactgagaaaggccaattttgagaaaatgaatatatttcaaactccgtatgtattttctatgagcagatcaagctcagagaaaattattgtttctaatttagtcctccagcccaaagacaaggaaaaaagacataagcagaatttcattgaatgaactggaaatttccattcaatgttcttgaagagatgagaaagccttccttcctaatgagactgcaaatcgggatcctggcgacactcacatgtggtcaaggctctttgtctctgaaaggtcatccg

SEQ ID NO: 33878 - DNA, 783 bp, Bovine  19866881472693
  misc_feature (1)..(1): n is a, c, g, or t
ntgcatttactgaatgccctgtaggccatgcaaataaagcactgtttagagagttcttaaaaatcatttaccgttttgtggtacctaactgcggccaaaatgaatcctgaaagtttgaactgtggacacacaagccacctttacacaacttcatatctccagttagagaagatacattaagattctcaaaggcagtggctaaaggtgctgatagataaagaatgaaaaataatgtggcaggctcttttatcatttcctgacaaattagtgtggctaatttaggtttaataaatgttgatgggatacttttccttctgtcagaggctcattttcccctcagtcaaggtagtccaatataaaactttttcacagcttataaaacacatctagtatatcaggaaagaatggatactttagggtatcagtgcaagtagaaaatacatttaaaataaataaaagcttcagatgaagttggggaatcaaagacacacagggtgaacctctcaaggtgggaaatgggtataaatgtggtgcttcaagcaactgaggcaaacaaggggacgtggtgatttgtcaggcgtgtctagaacaacaaactccccatcgcaaagcaagctggaagaaggagcaaggggcaagtgtaaagtgcaggataaagtgatgacgattgtgccggcaatcccagcaaacataaatggagctgtcttacctcgtataacagaattccttatcattgttttaagaaaaatttagttcaaaagaatgagggattacatagacatg

SEQ ID NO: 33879 - DNA, 657 bp, Bovine  19866882041695
  misc_feature (1)..(1): n is a, c, g, or t
nctaacttttccgcctccccagccgttcagcttagagtgcatttggcgcctctggagagacaagaatttttcctagacaaggtttttatggtttcattttgtagcatttaactacatgcttgatgaagaaaccacaaaacctcatgaacctacacgcaataatgtcagatgaaatcgctgattttgttctgggcttcaatattgccagatgacttcagtcaaaaccatgcaaattaacacaaaagctaacccgggcaccaaatacagggtttggagaccccaccgactggtgtgtggggttcctcctgccgccgcccgggacccggtgacacggccgcgctggcacccccttcccagagaggagccggtccccatgtggcccggtggagtcgcaggctgtgctgtgagattaaaggagatcttggttttgtaaatactcggagaagatgaaaacccagcatgcagccctcccaggcccagccagagtctcccacccaacacccccgcaaggctggcccaggtttctgggggtgaggccacaccggaggagccgccctgacactgctctcagatatgtggtggatgccttccaaagccacagcttcagtggaaaggtcacctttgagggtgaaagcttagcttgccgttcctgtgagg

SEQ ID NO: 33880 - DNA, 1086 bp, Bovine  19866880431135
  misc_feature (1)..(1): n is a, c, g, or t
ncaaagaagtgagaatgaatactctaaggaatatccttaccaagtgtgtatgggatgaagtttagggcagcgaccaaaatacattatttagctacaggcttcaatacgccaacgtggggaagcactgtgagtactgtctctgcaggggttggtgatgcaaagtctagggtttgggtggaaaaggaggtgctcatcagaggaagaccatgagagttctaaagaggtaggtggcaggcatcacccacagcaactcctgcattagagaggatagatttcattttttaaatagtaatcacaagcatagaggaggcatctgaacttccagaaaaaggtacttttcagcgtcccaaagtcaagaatttcggaattcttcagaaaagaaattgaggctctgttgtcttcaagtgtagaaggaggaaaaaacaaaacactttaccacacaatcttgcagcccagaaagctgcagctctttgccaagagaatgaagccaatctaggtgtaggaggaggtaagagagaaactgctttcaaacataaccttttaaaatttgaggataagcctctctaccaacaaaacaaaacaaaaacaaacctataaaaatagtctccagctttaaaaaatcagcaatataaccatgcatttaatcattcttttatgtagaaggctacttatttttgaaagagctaagtatgtttataatagtttaacatttttacaataaatacaaaatacagagctacattcatttcagaaaaaaaatttatgagttgttacacaaaatattttctaaaggaaataagttaggaagtagaacacttaaactagaagatatattaccgtccttcagagtataactatctttcctactcagtactgtacagcaatgaacaaaatgcagaagttcactgtgacctagtgaaggtaagggaagtgagtcattaaaaacaagaatcatatgcaactcagaggccaagtaactcaaacataattctcataaccagaccatagctgctgaagcaaacctgcaaatctacgtcatgacatgtaagaaacactaatatttctgacctttgatactctatccta

SEQ ID NO: 33881 - DNA, 2836 bp, Bovine  19866880474216
  misc_feature (1)..(1): n is a, c, g, or t
natctgcttctgtactgttaaggaacaatgacaatcatctgatctgtcaaatataaactaccttggcatattagtgatcattttgcattatgcccccaaaactttcacagtcaacatctacagcttccacatctcaaaccctttaactataatgtcttcaagaaaactacccggatctattgtctagagatggggagacttagggcaatgttactccatgtcatcttcaagtccacacatgtgagaaaaactacaaaaagtgaaaataggcatttaccaacttttagagcaatctgagattactgcacaatccacacgcgtgattctgtgttttatgaagaccctggcccatgatgtactggaaatgcaaacaactgttccttcaacacgagtaagagagtgctttagggcattctggtttgaaacagagagttaatttaatcgctcgttccacttaatgacaaaaaaggaccctagttatacaagtttgaatggcttttattaacttttgtgagaaaaactttctcagagtgaggcacttataataatgctctattggatctgaagcttatttcccaataccaggaagtaaacagtgccagtttgatgttatgtaattaccagttttactcctgaaaactgtcagagcacagaattaaatgaaataatgctgctgaaggggaaaagcgctaccaaagtcaccaagatgattcatctgataaaggctttgggttttaattctccatgaaattttgcattgagatcagacaccataattaaattctaaaactgaactcatgttacggtatcatcatgaaaattctaagttccagtttaacaacataccagcttagagaatccaatggtgaaaagtggaaaaacttccacattcagtgatagtcgctggccaagcagaccatataggataaagctgttaggaattttagtcttccttcttgaaggaaaagcaagtaaccaacttacgtctcatagaaacagaatgttaatcttatgagacattaattgacatctttgcaactcacgtttctcctggacatacaagtagccttccattgtccactggctgggtggcctgtaatcttgattggcagatttcatcctctgcatcaatcgctctacctcttgtcgagtactttcaaaattattcctcgtctttagtaaatagaaacaacaatttcattcagtgttttctaccagttttgaggaacacccagtctaaggtttcaaaactacaaatggtgcaaaggataaccttgactctttcaggactgttcaccatatccaccaccatctacattgaatcctatgctctaattttgatctgctttagtgaaacttttctgaatgaccttctgcatgtttctctttgaatctgtgtatgtgtgtatgctatttcccacttaacattatctagggaacaacttatagctttacaaatataagatattaattaaaataacattttatatcccataatacctaagataaaaaaaaagcagatacacaacaacttaatttgttttgagggttaaaataaattcacatagttttgatatatgtggcactaatcaagaaaaaggttcatcatttttattccgaacacctctttgaagaaatatcacttaccttgttttcccaaaatcctaacatagttatcagggaggtcaatgcataaattaacacataaaaatgaatagttttccaagttctaacatcttctattgtaggaagtaatttacttacaccatagcaagtttacttaagggaagatatagaaagtatatggcttttctctatgaaaatcaattttgcatttcaggtcatattatctcaacaatacacacttggaaacataagaataatcaccaacctgtgagacagtgatgattaccattttgttacggcccctaataaaagatctgaatctcaaagtaaagttaggaaagttttcttaattgccacttttgctgcttttccctttgaaacataaggatatgaattttttccaatactttacctgtctcttgttctcaaatctcaggaattttactgcaattgcatttaatatggaaataataaaaatactttgggtttataattttcccttttactatttactgagaaagcccaaatggattccatattgaaaaacaatggaatgaattgcatgtgaaattgattctgtgagaaaatctaggttaaataaaaagctaaatgcaaaacacaagtagaataaatgcaattacttatttctcgtgctacgctccaaacgcatatttctatttgctgaacatctttacaatagcaaaaatcaggtaaggagtgaaaggcatgctttttatagaaaattaagtgaaatcttcacaaactattttagctacagagtaccagacatggtttcagaaataactcttcatttacacaaaatcctcagcaattaagattttgttattggcatcatcgactcaatggacatgagtttgagcaaactcctggagatagtgaaaggacagggaagcctagtgtgctgcagtccaggaggctgcaaagagtccagacatgacttaccaaccgaacaacatatttgataatacagaaaggattggctaactttttaaagtgtaactggtattcagtacatgtaaatcagaattcgtataactgcaatcaaatattaaaagcatttactggacaactttacaaagtaaactgtcccagaaatagatagggtgtttttaaatacttctcctgaagctttaacacagcttttatggatgcttgaaagccacccatttaaatttatttttagaaaaca

SEQ ID NO: 33882 - DNA, 1098 bp, Bovine  19866880491325
  misc_feature (1)..(1): n is a, c, g, or t
ntactgaagaagcgagatttcttacttatcaaatgtggccattaacctttctgtcaccatcagaattggcaagagctggcttttattatataggacctggagacagggtagcctgctttgcctgtggtgggacgctaaataactgggaaccaaaggatgatgccatgttagaacaccagaaacattttcccagctgtccatttttggaaaattctctggaaaaaacgctgaggttcagcatttcaaatttgagtatgcagacacatgcagctcgcctgagaacatttatgtactggccatctactgtatcagttcagcccgagcagcttgcaagtgctggtttctattatgtaggtcgcaacgacgatgtcaagtgcttttgttgtgatggtggcttaaggtgttgggaatctggagatgacccatgggtagaacacgccaaatggtttccaaggtgtgagttcttgatacgaatgaaagggcaggagtttgttagtgagattcaagccagatatcctcatcttcttgaacagctcttgtcaactgcaaatacttctggagatgaaaatgctgatccaccaattgttcattttggacctggagaaagttcttcagacgatgcagtcatgatgaatacacctgtggttaaagctgccttggaaatgggctttagtagaagcctggtaaagcggacagttcagagtaaaatcctaacaactggagagaattacaaaacagttaatgatattgtgtcggcacttcttaatgctgaagatgagaaaagagaagaagaaaaggaggaagagaaggaaagacaaactgaagaaacagcatcagatgatttgtcattacttcggaggaatagaatggctctctttcaacaggttgacgtgtgtgcttcctatcctggataatcttttaaaggccaatgtaattaataaacaggagcatgatattattaagcaaaaaacacagatacctttacaagcaagagaactgattgataccgttttagttaaaggaaatagtgctgccaacatcttcaaaaactgtcttaaggaaattgaccctacattatataagaacttgtttgtggaa

SEQ ID NO: 33883 - DNA, 1555 bp, Bovine  19866880528570
  misc_feature (1)..(1): n is a, c, g, or t
ncacgcactggtgcacaagtctgcccgagtaaaaacagagagatgctggacatcttgataaagcacctggtcaagtaattctctgacttagattgctcacttacttgttcatctgttaaacttgagtatattcatgtcttttaaagggggtgatagagctataactttgctactgtaatcagagtccatttaattggttgaaaaatgatggcggcagtttgtttttaagatataatctatgtgtgtgtgtgtatctgtgtgtttatgacatgcaaataattatatccctgcaactgttgtaatgaaatgtcaacttaaaaatatgtgaaggagtatatagtcctttcccagttcttttagatgcatggtaagccctgaagtttgaagaccaggtctctgttttattagggtcaccaggttctaccaggtcaacatgccactggaacattagcttccttccccagattcctagtgtctttggtttctgaagatctttttgactcttatgtatttaaaagttttgataaatattgtattaatcaagtttcttcagagaacagaactaataggttgtcatatgtgtgtctgtgtatacatatgtatatatgtaagagagactggttagttccaaggaattggctgcacaattgtggaggctgatttcaaggcaggctggagacccagagaagttgatatcagggtccaaatccaggcagtctggaggcagaataccctcttcctcggggacctcagtctttttctcttaagaccctaaactaatgtttagatgaggcccacccaggtaatggatggtagtctgctttactcaaagcctactgatttaaatgttaatgtcatctaaaaatgccttcacagaaacatctagaattatgtttgaccaaatattggagtactgcagcctagcaaatttgacacttagcattagccataacagatctatcttgattcacacacacacatttaattcagaggtttcagttcagctaccatgctgctagaaacaaaaatccaaattcaggttttaaacttacttaagaatccccttatagtctcatttacaaatgggaacagtttttatcttaatgagtactgcaattcacaaatgattaatccttccttgtttgctacaagtagtaacccaatttatgctaatttgagccatgcatatttgaaactgtgctctatattaatcagtctcatcttaacttgcaggatttaagataatatgagttggccctccttgaaataagaaggaaatccactaggaatgatttcatttcaagttcattgttaacgattgcccttgtcggcatttagctaatgaacagggacacactatccttggtctgaattacatagtcttgaattatgtttttgagttgtgtgtccttttcttgaaacttaaccatacaacatttagtgggcattctcttgctacatttaagctaattttttagcaaagccttttaaaatacactttaaaagcttcatgagtgtcacataaaatatttttccttaattatccagaatgtta

SEQ ID NO: 33884 - DNA, 2587 bp, Bovine  19866880547622
  misc_feature (1)..(1): n is a, c, g, or t
ngatttttagcatgtgcttatctatttcttagaaaaaatatatctgtatagtgttttacagtgtgcaaaggaattttatagacatctcatttaaaagcaaagctctgtgttgaaatattctctgctaggtaggtgaagacattgagcttcaaagaattgaagacagatactatgatcacaaagcattaccttttaaggaagtgacaaatcttttaaaactaagtgcaatattgctgttgactttttctacatgtatttgggtaactttaagaactatttgaaactggtccttagacctctacttacgagataaacaagcatgcatgttctggttcactccatgcttaccttttttcaaccaggtcatcatcattattattatttttttttttagaaattcttagtgataattatcctttaataaatgaacaacatacttcaaccaaaattccgaaatttgaccaagctaactgtagatcccctggctcaattaacgtgaatatagtagttctcccctcagcttaaattttgttgcataatttatagattttcccccttttctataatttctcgcattttgtgggaatttagataatatgaatttcttaccacgcataatttcaataatttacatgtcatttaggaacttgaaataactgtaataatggcttgtaaactattaaaatttcacaaaaaatcgaattctttttggacattgatccaaattcctaaaattattctttcctttgataaattatttataactctataatgtttcagcaagaagagtacatctttaaatcactgtcaccattaggaaatgtgtaaaatttgtgaagaacaaaaaaagtctgacaaataaaaacatttcttctatttcatatcatccacattggtctgatttaaatcttacttaaaggaaacaatttcatcgtgcagttctgctaaaactcaataaattcaggaagaatttcaaaatttaattatgaattctatgaataattttatatttactacaattgtttctctttatctagaacatggtccaactttaagtaatttttaacaaaaatactttgtgtctgtatctgtcttacctttaaataaagattatatggttatttatcttaaccttctgatacacaaggattaaaacatagagcaagatatttgaagtaggacaggcactaaggcatcaatttatcaaaaccacttagtaaatataataatggaaatattgagaatatatcctcaaaattccaaccattaaaaagcactcatttccaaggcacttggagccaccctgaggctacaaatcaagaaactttgacttttaaggatgtatattatactccctaatttcactttgagtaggattttaaaatatactttaatatgtatatattttaaaaggcactgtattctagtaatttttaagacctagaagctatcagtgaactgttcaatccaaagttacttctctatcaataaaagacccgtttttacaactacacagaccatgtcaattaactgcttgcacgaatctctgtctttctctatatataatttctagtaattaaatctgacttaaatatttagtaataaatttaatagggggaggagttgaatttcttttgatatttgatgaattcctgaacagaggctataatgttgggaaattgatgttatttatattttggattccccagaaaagtgactccccattccagaagctttttatacttctagtaagaattccaaagccaattcaccttcatgagacttaaacatacagcacatctattaataaggatgattttgtttcttcatttcttaaataaaaactattacaaaatatttaatatgtatgccaggaaaactaatttaatttggaaaaaaagtgacagaatgtcctttttttttctctttttttgaagagcactagtgcaagaaattgtttttcaaatttaatgaactactctgaacctctgtcttctctactgtaaaatggaactcaatatttaacttgcaaagattactgtaagaactagagataatatatgtaaaactccttcccaatacaaggcctgtgcatagcatctactcaagtagcagctaaaaggactggtaatatttatcaaatgcatattgattcctgatctaaataaacaggaattgatatcaacacagattaaaaagaagtagaagcagtgggattctatgaattaagaatgaatatatactcacaccgtactcttgcctggaaaatcccgtgaacagaggagcctggtgggctgcagtccatggggtccctaagagtcgggacgcgactgagcgatttcactttcacttttcactttcatgcactggagaaggaaatgggaacccactccagagttcttgcctggagaatcccggggagaggggagcccggtgggctgccgtctatggggttgcacaaagtcggacacgactgactcgacttagcagcagcagcagcagggatgtttggagaaggaaatggcaacccactccagtgttcttgcctggagaatcccagggacagaggagtctggtgggctgctgt

SEQ ID NO: 33885 - DNA, 2052 bp, Bovine  19866880660960
  misc_feature (1)..(1): n is a, c, g, or t
nctagtaggagaagatgagtgcacatccttgtactctgccatcttgtagacatctgcaaggttgagcagggaaactcaaatattctccacaaagcaggctcataaattcccagaatgccaactcaccatgcaatctctaggtcactttcagtgccactcatcaaagtatcagttgcttcattatagtttaaatctaagtatctaataattcagggatctgacatctaactttaaaataaagatagcttataggtgaaaaaattagtacaatttgtgctaaagtccactgggaaaaaattataagatgaagctagtttattcctggggctctgatactatcttcaaggacagaccttgacagatggtgttgtttcagggaattacatgcaaaaatgagactctaacaagaaataatatttctctatttctttggactcacagaactagttttaatattccttatataaaatcctaaaaataagggatacttcaccatgtttgtgagcttaaaaatctttgtctatttttttttttcactaacactgaaatatatattaataatgttcttttatagtattggcatggtgttatcctgctaatatttctcacctcagttaacctgttttcactttctaaaggaagcatattacactaccatatgtaaaatagatagccaatggaaattgactgtatgattcatgaaactcaaaccaaggctctgtaacaacctagaggaatggggaaatgtgtgatgtgggagggacaggacatatacccttgactaattcgtgttgatgtatggtagtaaccaaagcaatattgtaaaacaattatcattcaattaaaaataaattaaaacacacacacacacgtttgcattgcagaatagtaattatgataataacctaattctttccaaacacaattattttaccacaagagctgatgacttcctgcatgtgaaacttatatgaattttcatatcttctaatttgccttaactacactgaagtttgaatctcatgtaacaaaggaatgtttgtgaaacaagtccaaagccccactcacaattaaggggagagggtcaacacaagggcatgaatcccagaggcagggattactaggggccatttaagagttgactcaccaacaattcataaacaaagagtcccaaagccatacctatgatttacttacagagatgtaatattttccaatgaaatcattctgtctaaaatttaagagtatcttctctggtatttcaacttaactggacatgcaattcagcagctgtcctaagactctctcttctctttgccacatttaattatttgcttagctataaatatcttggcaaaaggtatttttcattccaaaattccatctggagacataaaaagaaaagctccccttttgtagtggcagtagaaaagctacattaaatagctacattaacccccatttattagactcaactcatatgtccccagcttgtgctaatgaaatactcctctcagatttgttctaccatgcatttctacactctcaaagataaatgaaaaattctatattactgattttacttttaaaagctgtcttggggattttacatttcatggagttctcatgcatatggttgagctggctcatataaatgagtatttgaattggtataaatggtatttgaattgactgttgcataaaacatgcttgttttaaaactacttgttttaaacttattatcaagaaagtgatttctatggagataagcctggaattttcttataataggataatccccaaactttatctgtctagttcatcatataaaccatggtagccaaggtaactcgggagctgggggttgtgtatgccaaaagtgcaggatcacctgtgagtaatcatgatctacatcactgtaaagacaaaactgtggaatcaagaaagcacagaatgtcacagctggaaattttagatcttctagcccaatcctgggtgtattattcaaagttttatgtgaagatttgatgtcttaagctcatcgccaaagat

SEQ ID NO: 33886 - DNA, 1633 bp, Bovine  19866880698286
  misc_feature (1)..(1): n is a, c, g, or t
ntcgtcaggtgtgactgcttgagttcaatgttatgcattcaaggtggcagatatgaatccctgggagataacattaaatgaagtgtagagtgagggccgtttttcactgtaaagtcttcttttgaaatcagaataaaacttcaccaaatgacctcaacacgtatgagatgcctttgaatagaaaattgactttgtgactaatatggatatatgttcctcttaagtttctaacatgcaaaaatcacacatatgtgatgtgttcccacctattcacctttctgtatctcatatcatctgatgtataatagctgtgctcagtgggcttccctggtggctcaactgtaaagaatctgcctgcagtgcaggagacgtgggtttgacccctgggtcaagaagattctctggagaaagaaatggcaactcactccagtattcttgcctgggaaattccatggacagaggagcctggcgggctacagtccatggggtcacaaagagtcagacatgacttagcaactaaaccactaccaccagagtgacttctagaaaaatgagtattcctactggcacagacttctgtgaaggattagcatggatgatcacagtagccctgaaaggagggacctttaaagttgccctgatgctgcagtgtcagattgatttttaattttagttaacaaacataaatagtgcttattgtcagactctgttgtaaacgctttgcaagtgttatgttaattaatcctcagaagaaccctgtaaagtggttatgccactgtcgttcagtctttatagatgaggaaacagaggcccagaggagtttaaaaattttgcccaaggtcacataatgagtaaatggcaggacttggatttcaacccaggctgcctggctccagcgtctgcattcttagtctctgttaggttgcatcctaggcttttgcctcccagggattcacttcttattattctgggcttttctttattctctccatgaatagagaattattcttcttctggatttagttactctggactttgttcagactgaagtcaggactgaggagtctgtttaacatgaggtctcctataaatcacaaggttattcataaacaacttttcaggtgtattttcaacttttaaggagaatgtgttttttggtaaaagcacattccctgtctcctccacagtctgtgtagaataacatcagtgatactttctaatcaaagattcgatgctttcccctccatccccactagtaaccccagtagaattctttatttcttcttcttcttcttctttttttttttttttttttactataaatggtgcatttgtagtgaatagtaattctttgataaaaactttgggaaattgacttccagaaaatgcacaactagcaccaaaactttcttaaaggggcagatctcctttggaagcagaagagatctaatccctaaaacatttcttttgtagtctctttaaattttgtttaaatttgtcaagctggtattgaaaaaggttctggttaatatagcattagcagcaaagttatataaatacatgtggaaaatcttgagtatttcatggtatcttcaccttaggatttttttaaaactaaagtttttaaacttta

SEQ ID NO: 33887 - DNA, 1395 bp, Bovine  19866880716101
  misc_feature (1)..(1): n is a, c, g, or t
ntatgcctgtggcgttccatgccgaggtcggatcttcatattttgtctgtttagtttaataacactcaagcataacagcaatcaggagcacactctgcttggtaaatccatagctataaagaaagcatgtacttcagaatttaagaaaaaagttgcttgttgcgcccagacctagtttgacatatttttgaaaagtgcttataattctccagatttccaggattaaaaccaggaaacacaaaatagaaatatatagatttggctgcagcttccctacaccttaggttgaattgtcttagacccttctttttaaaaaaagaggtagctagtcttagttgaataatctgagatttgttaactggctattctttgtgaatttttgcaaggtccagtgttcttgcctagagaatcccagggacgggggagcctggtgggctgccgtctatggggtcacacagagtcggacacgactgaagcgacttagcagtagcagcagcagtaaaaagtgaggcactgttaacccttggtaaataaaatgctcttgaattttacatcaacttcaggatgtattcacctcctttttaaactatcttgacttaacatgaagaattctatgtttgaaactctgaagtcctgagaaatatttttttctataactcctaaaaataattccaaattacatttttttctttagaaatgtgaaatagatatatcatgattgttttcttcctgattgagtttcatttgtgtgattgacactaataaaaatattctaacttaattcagttcattaaagaggtaaggatattttgcacaatgaagcatgatatagaagacttttaaactttctggagttttaaaataaaaattttaaaagtgtacataatttataatctgtgtgtacgtatgcattgattctccctgccccccttcatctaataagcccctcttttcctgttccatcttgtaaacatgagttgcttatggcttgcatactgaaaatgctgccaggaagtagggtgagcaaagcttcttttcccatgaccctcgctctaatgttgttccaagggttccgtacttagaaatgccttgataaccacattcattcctgacataccccacccccagcacactcaaagctgctgagtgccatctgacccagagtccagctgcagcttcttacagcactagtggggaaggcttttacctagagtagtgaatatctgtgaaggcattttgtgtgtgatatattgcatgtatatagaaaataaaaaaaaaaaaaatctgttgcttggtgtgatcctggaagctacaggttgactagtgtctgtttttttctctctaattttggactcactgaagctagtatgtatgtgtgtgcctgtacatcctttt

SEQ ID NO: 33888 - DNA, 1278 bp, Bovine  19866880853163
  misc_feature (1)..(1): n is a, c, g, or t
nattgcagcccgagtatcttttgaaaaaagcaaatctcatcattctctccagggcttaaagtccttcagtggctcctcattgattaacggatagagtccaaactccttaatttgccacaccaggccaaccttattgactgccatatcttttaaccctgtaaacacatttcagtcaagctggattttgtgcttttttaaattttatttttatttttggccacgctaggtcttcattgctgcacacaggcttcctcttgttgcagtgagcaggggctactcttcttgcaggagtgtctctgttgtagagcacaggctttagaagttgctgcatgcaggctctagagtacaggctcagtagctgtggtgcacgtgttttgttgctctgtaaatttggaatgttcctggaccggggattgaacctgtgtcccctgcattggcaggtggatttcttaaccaacagaccaccaggggagtcctgtggatttgtttaaatttcactcatggactagcaagagagaccctcaggaggtcaagaggtccctatgagaagttttctatttcatgttttaattctgatcattatcttcaaaaacaatataagcacattttgaatcatctagagtagtgcttttccaactttaatgtgtccaggaatcacctagaggtctcataaaggggctgactttgagtcggtaagtcctgtgtggcccaaggcagttctaataagctcccaggtaatgccaatgttgctacactgtcgaccatattttgagtaataagggtctagaatgatcactttctaattgagtacgaccacaaaattgtcttgctgttattgattaatgaataaagaaggaaagcagatttaatatttttaatgacatattcgttacaaatgaagaccaagtgatgttgcaacttgtatgaataaagatctagcaatggttctagttaaaaaaaaaaaagatggaagaactgaatcatctttttatacagaatagggtataggcacgtcaatctcgagtcacagcaattaagacaactctgtcacagtaaaaagtattacttataccattcgattgatatttggaatgatattacttttgtatttttctttataattatataatatctataaacattagggtttatacttagttttatgtctacacttaagaaaaaaaacaatgtgactttagggtacaataggaattttatgagttctacatattattcaaatttgagaaacactggactaagctaagtcatacctctttg

SEQ ID NO: 33889 - DNA, 2648 bp, Bovine  19866880859095
  misc_feature (1)..(1): n is a, c, g, or t
nttcttcgtaacgttgcaagtgagaacttaaaattaactacaaatgaactgtttgtaaaccaaacctagaagtttctgaaaatttagtttaaaatacaatcacggacttccctggtggtccactgttaacaacctgccttccaacgtaggggacgtgggtttgatccctggtggaggaaataagaccccacaggccacagagcacagagtccacacgccacaagtagagcgcccgtgtaccacaactagggaggaggagcctgtgcactgctgcaaagattccacgtgctacaattgagacttgagacagccagagatactaaatatacactaataaataaataaaatacttcaatcattaggctgtaattcatgacttaaatcctgagctcaaatggttttcaggcaaatatttactatggaatacaaaggccctgctctcgtgacaccattataattcagaaagacaggcaaattaaacaaaaataaataagataatatcagataatgatagcccgttgtgaagaaaatggtaacagttgatgtgacaaaaaattatggcagcagagatctgaatttgagtggtaagcaaaaggctcagtgaagaagcacctcggggactgaggcatgagttataataactcccccctctctgtaatttccacccaaagatggggaggaagacttcaggcagggagaatagcaagggcaagcatctgaagacagaagtatgctggacatgttgatggaaggagaagaccagcacgactaaagcaaggggaaggcaacggagaatggcctaagatgaaagcagagtccagagcatgcaaggccttgaaaatcacagtatgaaatgtttatcgtatcccagaggatgagacggttggatggcatcaccgactcatggacatgagtttgagtaaactccgtgagttggtgatggacagggaggcctggtgtgctgcagtccatggggtctcaaagagccaagacacaactgagccgctgaactgaactgatacaagacacagaaataccgattgggattaaaatgacaaaggaatgcaaattatactcaaaatagaattcccatttgcactttgcatgcattactattgatgaaagtattgaacctgaggtttttaaagctactgtcactgcaaagtagagtgatctccactgagagttgaagggaagttctgcccctaagttgaactcaactcctgtacaaaccaaaaaagcaaaaacaacaaaaagagctatggaaaaaccctttggtattaactgccaagaacttcccatcagataaacccaaatactcttagcttttctctatggctacacagataaggttaaagcaactgcttcctagagtgaaagaaaggggggttttgtatctgaattaacctgagtggtgacctccatttatcacattcaatgtcatgtaattataaagtacgtgtctacatacacaaaagtgtatagccttgatttgccaagagactatatttcatggtatatctacaagttgaatctactttccatatgtcaaggttaaagcaaactgaaagcagtctagagctaagggcagccctgagatgatcacataccctatcgtcccattgaaaaggagcccaaagaggtaaaactgcacacatgttgaatagcacattcaagactaacgtagtgccttttacccattgaactcaaatgaactcatgcctatcctcactccatgattacttactaacactttaatacaaactggaggacaattttaagcactcttccacattatcaagaagcaattaggtacctcatcagagaaagacagcttcacacaaaaatataagaatcctaaaacatgaatgcttacgctgtctctcctttgtgtttttcttttattaaaccattccaactggcaacatatgagcaagataaagaaaaaaaagagggagaaagagaaagagaagcaaagagaaagtgaggctatattttctctttttgacatgttctaaaatcaacatatttaatcaaaaaagttttaagaaatcaggcattaaatattaaatgcttagtattgttattagcattacaaaaatagataattccaatgtatatagcttatttattgaatatcaaaggcctttagttatttgtgttcaaaagtgggaagtcatgagcagtttcttgagccactcgtgggaggaaatgctcatgggatggaggaacattttcaaactcagtctcgtctctgaaaattactgccctagaaagacgccgtgaatgacagaagtgtgacaggggcctccgatgagctgaaacagagaacaaagggcaagtgctgcatgactttactgttttaagaggttgtggactgtatgtttaatgcacatattcaatatatgcttttagaagttctttcctcttttctaatattattacttcataacaatgtaaaatttaaaggctagttcatagtttttacttctgatttaacctacaatccacaaggtaaaaactaaggcctctgggtcacgccacacacctagagttgacaggatgctccggcattgtacggtcttttaggagagatctgagaaaccattccagcccttagttgcttcttacatcttcaattcagttca

SEQ ID NO: 33890 - DNA, 1540 bp, Bovine  19866880927833
  misc_feature (1)..(1): n is a, c, g, or t
nacatatgaggtggagggcttctgatgggtatgctgagcagacaactgggatccttttcagtttaacaggagggaagtatggtgcttggcatcacagctgactagagtgtgggctttatatcctgtgaatacaggctgctgacaaaaaccttgactctgtttttgcatacttctatatcctaagttgtctgaatagctactcttttcccttgccccagaggttgttttgactcttaatgctttatctctgctgtaagactcaacactgagaataaagttattatccaggatggaaatagaaatttttacatttttattgaaatggataggatcagcctgttgctgaaagttctcagctttagggagtttgaatacattcttagagattgttactttttttcactctgtcttatgactgctgtccaatattttaagatgtggataagcgagtgttctgatttttcagtgctgtgtaacaaaccaactccaatattagtggcttgaaactgcactgtgcatttcactcatgagcctgcagtttgggcagggttcagtgggactgttcctcactgttttgctcagtgtcccctagggtgattgtgaaggcagaggggagctgcagccatctgaaggctcactcacatctcctggttggtgctgaaactggcatggggttccttgggcatttctttctctattctgtctcttcatcatggtcctttagggaatagacgtcttacatgtacaatcaagttttccaaagttcatatcccaagtgaaaagaaagccagaaagaagctgtattgccctgctcgctgctttggctgcactgggcctctgttatggagtgtggggacttctctcgtggtggtgtgctgctcagtcgttgcttgcatggacttagctgccctccagcacccaggatctgagttccccgaccagggatcaaacctgtgtgtgttgcactagaagacagattctcaaccactggaccactggagaagtcccacgttgttttattttaaatgttaatgttctgtttaaagtttgttgagtataggaaactgtgttacagcacttaggcagttaaatgcaggaggactggaataaccttatttttagattgtctatacacgacatacttttttccttacagttttatttatataccataaaattcactcattttaactcaataattcaatattttgaaataaatttatacagtccatttgaacttaataattcagtgggttttattttattttattttttagtgaatttatacagttgtcatagacactagcataatccagttttagaatatttcattaccataataaaattcctcatttctatttacagttaatccgcagtcataggcaatcacttaatctactttctgtctttccaaattttctttattgggatatttcatgtaaatggaatcatatattgtatgtcatttgtttttggcttttttcacttagcatacgtttttgaggttcttccctgttataacatcaggagtacgtcactc

SEQ ID NO: 33891 - DNA, 1391 bp, Bovine  19866880980064
  misc_feature (1)..(1): n is a, c, g, or t
nagattgttgggagcattatcagtccctcagatatacagtccatggggtcgctaagagttggacatgactgagtgacttcactttcacttttcactttcatgcattggagaaggaaatggcaacccactccagtattcttgcctggagaatcctggggacagaggagcctggtgggctgtcgtctatggggtcgcacagagtcagacgtgactgaagcgacttagcagcaacagcagcagatatgcagatgacaccacccttatggcagaaagtgaagaagagccaaagagtctcttgatgaaagtgaaagaggaaactgaaaaagttggcttaaaactcaacatttggaaaattaagatcatggcatctggacccatcacttcatagcaaaaagatggagaaacaatggaaacagtgagagactttgttttgaggggctccaaaatcactgcagatggtgactggagccaagaaattaaatgacagttgctccttggaagaaaaattatgaccagcttagacagcatattcaaaagcagagacattactttgccaacaaaggtctgtctagtgaaagttatggtttctccagtagtcatgtatggatgtgagagttgaactataaagaaagctgagcaccaaagaattgatgcttttgaactgtggtgttggagaaaactcttgatcatggggtcgcaatgagttggacatgactgagcgactgtactgaactgaactgtgttattttcatctttatctccattaattctctcctggatattttgtcagtgcatttgaagagtagttaacatgacaactgtccatgacaagacctaaaagttaaatcacatctgccaaaaaagaagtaaaaattaggttccatggcttctgtttcatatctgtaattctagtgccaacttagctgaggatattcaaaacttactagctagaggaattagaatgaaatataatttctctaatttattttatttgatgatcatccttttaaaaaacacatttttatggtttattttttatctctttgtttttgcagcttttatcattcctccagggtttatttactttttaccacgagggatatgaactcgcccaggaatttgcaccatataaacaacagctgcagttcaacttgcagaatgtaagactatacctgttctcactgcctctccttagttaatcagataatcccagggcaactgagttatagccaagctgaactttggagtctttcaaaaacttatctgagtacaataaagcctcattcatttagaaaaatcacttaataaatttattaactttttaaaataagagctaatctcatgtttgaaaaatatatactgccaaattttgtgaaaatgaaaatatctga

SEQ ID NO: 33892 - DNA, 1984 bp, Bovine  19866881007100
  misc_feature (1)..(1): n is a, c, g, or t
ntgaaaaggacatcttttttaggtgttagttctagaaggtcttgtaggccttcatggaaccattcagcttcagcttcttcagcattactggttgggtcatggacttggattactgtgatattgaacagcttgccttggaaatgaacatagtaggtgtcatagcaggtatgattctcggtcccaaatgtcaaggggcaagaaatttattttttcattgcaagctccattccctctaataacagaaacttcatttttgtcagtttggtgttttctaaacttctttcctttgcttgcaactgagttccttggactcaattcggcttatttaatcaatatctgaagactcaccatgtgcaaaacactcaagaatataaaaaaaggtttgttttctttcacaaagaagtatgaagtcctgcactttgtccctttaaaaactttaccttgaatccatgaagaatatccttgaattcatgaagatatccaactttctcttgcataaaatgtcgcatggctttgctgcatggtgtgactttctaagtaccacatagaatgtgatgtgactaggactgcaaacttgtgtggtgcctcagcatgaaacacagtttattttttgatgttcattttactttttttgcattccaacagggatgctctcttatgtctatatatatataagagaatttcacaaatatgattgtgatttatgaagcttgccattgcagagaaaggaacatgcattaaaaataaagtcactcaggagtactatttctaggcattactctgtttattcccaagtctagctagtttttatgttctgtaaataacttccaatatttagtaaatgtactctgaatgcatgaatgaataaaagaataaagagaaaaagaaagtgatttgaaataacattttactttgttctttggtggtttaatggcaattgcctggcctccccacctactacctccacctccaccactaatgaaaagttggctgtctttcagagtatctgctcaaagttgattgtctgagatgcagaagtctcctctccctcttctgatctgttttccaggctagaccacctgcttggaacaccttcctggcttcagctctccagactgcttttcccattcttcagagagctcttgaaattgtgcagctcctgatgaaaacacaggaggtggctttccagaaagggaagtgtgctggaggatggccaggaatgattaatttaaagcctgaggtgaatagaaagaggcaccctggagatttgagggtattggagactgtggggggcaagtcagtgaaggtcttaaagcagaacaaaaggctctataacttaaccaaaaggtgacttggaatttcctgcatatgtcctgaaagcaatgtgggttattgtctgcttcaatttttatgtatgagaaatagcagcctggctggagctgctttctctcttgtgcttgttctttattatcccactgaccttataatttacatatatatataaaattatataaaataaacatattatttatgttatataaatatatattatatattgattatatattataaataaaaatataaaatatataaaattatatatatagattaggtctgaataaaagcatttctagtagctctactctcccttctttcccagcacagggaagcctggtgtgctgcagtccatgggggtgcaaagagtcagacatgactgagcaactgaacaacaaatctttccttaaaatctatgcattcatggctaaattgtatctgtttattcctaacccatgtgtctttatcttcctacaagaacatatgtgtattacaatgtcccaaatcatttggtctccaggcagaacctcacctccttgtcattgtttcacttactgaagatgtcactggttcatctacttttttcgttctccagttgctaaatttttccttcccttaaaagttcctctctagtcttacctactcccca

SEQ ID NO: 33893 - DNA, 1357 bp, Bovine  19866881030547
  misc_feature (1)..(1): n is a, c, g, or t
ncgctgtgcctaagatttggatgtatgaactaaaggtttctgaggtagaagtgtgaattaccagttaacatcataatggaaatgagaggcatttaacaataaaatcagcaacaaaatttgagtatttaccattactgttattatttaatattgttctggaagacttaaacaatgtattgaaccatgaaggagagatgacagctacaactgttggaaaggagaaaataaggatattatttgagtatgatattgttgtatacaaaaaaaaaaaaaaaaaaagataatccaacaaaaactgttagatttaacaatattaataaatgagtacataaataaaatagagtatagccaagtggctgaatataagagaaaatgcaaacatcaatgactttttcttgtatcaatagtcaggagacaaaaagaaaaaaaaaaaagatgcagcatatgtgtagttgtaaacttaaactaaatatttgaggcaggaatgtacaataatgtcagatgctcttttgagcagatgctaagtcaaatgcataatccattaatatggctctaaaataagctgagaatgttctttaacttacctagttgttgttaccatattcttcaaaagaactagaagttttacatgtcctaaaactgttagtagcactcttttctatttagatatttgtttctagagttgcatatcaaaagaaatcactgtacagttcagaaatttatattataaagtgctagtgtcatctttttaaacataactgccatttataattatcttcttacagttcctttagaaggactaagaagtcaaaaccagtttgaagagatgagatcaagttacattagagagctcatcaaggcaattggtttgaggcaaaaaggagttgtccctagctcacagcgtttctatcagcttacaaaacttcttgataacttgcatgatataagtattttggtttttagaatatcagtgattattttctgaattctatatattactttagtgtgaagtacaagttttacttcatgtgtgttcgtcaaatttatgtttgtacttacactttaaaacagtacttgcatcatactgctcacaatttatattgtgcttttttcattttcagtataaatcactgaaatatccttttactagtatttgtgaaatttgagagtaatgtaatggttgataggaattgtgatacatattcttgagaatgctccaaaatgtttttgtcttaagttagaagatattttatgtaaactggaaaagcaaagatatggatgtggagaataagactctcataccattttgggtggagttataagtcagcaacaatgctaatggatactctagcagtgt

SEQ ID NO: 33894 - DNA, 3572 bp, Bovine  19866881061705
  misc_feature (1)..(1): n is a, c, g, or t
nataagtgactgtcccatgccctagatgtagcgggtagagttagaccacagcactttctggcttcctatttcaattcagaatgccttgttaaaggacaattcccctcgcaaaaggctaggagaaaacggcaaaactcgtgatatacttgtcataacactatggctctccttccttaataacctccttagagatctgtgtttcagatctgggaaacagtcttaacatataagctggttttcttagtttgaggagcatcaatctatttcaagaattttaaactctttttctatatattttttgcattaaaaaccctttggaaaatatggttaaggttataaattaccttctcacaaaaaagtatatacactcatatagctataattttgcataccaatttgtttcatttttgtaaatataatcagggagacaaaaggagctatatagaaagaacatagaacagctttttgtttttacctgtaagattcttcttttctctaaagtagctttgttatatgtgaaagataaaaatgtcacctgaatgatatgaaatgatacagataagattaacattaacaatcactttagtactgtttcaaccttgcaaactcttaaggaaaatatgggttcacaaaaacactaaaaatctgagttatgctttataaaggaaaacaattaaacctcacaacttttctttgaaatttacacagtacgacacgttataaatgtaaggctttgagaaaaacagtaaaaactcgtgacctcataatcatcacccccccaaaaaaacagacatagcacaaaatttaattttttaaagataaaaatggcattcactttttatgaaagagaagagatttcaccatccctgccaagatcttgggtaattgtgcagcaataacctcagacatcatttctggaaattcaacactcagtgcccaggactggataaatgtattcaagcaatacagatgaagttgtttgacaagctgttgttttaacaaatggataagaaacatgtaaggaaaataataaatttctaaactatgtaaacatcaaagcttatttttctaataatagaaatgcttcagatgttgttttttaccaaaatgaaaaaactctctccatttccagaataatatataaaatattacatacatatgatgaaacatactaatatatagaaagatttaaagaaatgaaagtattctgtaatcctattggataagcagtgtgaacatttggtatatttcaagtttttctgtttacacatactcaagtatatgcataatatatatatgcataataataataatatatatgcatatgtatttccataaatgaaattactttatagtctatttcttaatccagcttttcccacataacaataggcaaactcttctatgtcaatacaaacaacccaacctgattcattttaatctaacttttttttggccacaccatactgcatgcgggatcttaggttccccgaccagggatcaatcccacaccacctgcactggcagcacagagtcttaaccactgcgctgccaggaaagcatcattttaatttaattttaattctgtcaaaataatattttgcacatgtttttgaaagtcagatagtactgcaggacctacaggagcaaaaacacagatgcaaccactttgaattactttagtttgggtcatttgatatttacctctgtatttctaataaattatatttcccaaagtttacattattaagatcctattaaataaggatttagctttcttgtattatacacccatctcctcaactacacatactttctcttcttcctattctctatatagatatatctcaatgtttgactaaatcaatatctagcatttatattataaaaatttttattgtttcttgctggattacttttcctttcctatatgagttactttaattttgctagtgctaatcacctcatgtttttctgctttttttgtttgtttttttctatatttatcacaaagccatagtcaaattctctgacagaattgtaaaaacgtacttcagtatgttcatacaattagtaatatctcaaatctaactttttttttttcttggtgctagtaccctgaaaccctgtgcattagttactgtgctgggacacccctttgtgtctctcctgggttgaatctcatactcctttggcttacgccagggttctgttgtaagaaatcctgcagatgcccttgagaaaggctctatttgacgtaaggtctaggagaccttgaaagtctgaaaatactttcatgatgccatcatatttgtttgatgatttggctggtacaaaattctgtgaagatttttctttccttcaaaattctccattattttctgggttccagtatttttgttgagaagttctacaacattccgaatcctgatgatttgatgtgacttgcttcttttttcactggtatattttaggataccctctttattctgggtatgctgaaattttacaataatgtgccttggttcaattgggttgagtctgtatactgggcccttatgctcagaaaattcatatccttcagttctagcaacgtttcttttaagattacttatgcaatttcctctccttgattttctccaccctttcttttggagataactacgaactggaaaatgaagccctgtggattcatcccctaaatttgctatctctctaaattttcatatctttttcttttttgttacttttatctgagttttcctgagatttatattttctgagttttatatttatactgaatttttaatttatgccctcctttaattatccaaaggtattttctcactaaatgttctttttaaaatgtttgctagtctcttttcatggatgcaccatcattcttatttctgtgagtattttaatttttgatgctttcttctgttatctgcactggagctttttccttcaagttacatttttttttctgtttattttgttctctgccttacatttgagagactttatctaaatggctaataattcttggctgttcacattcagcagtgaggcctcatatttgatctaatgagcagagagatttttatgcctttattattttagtgtttctgaacacagtaatgataaaagtttgtatgcaatacatcttgactaagatgtattgctggattaatttccagaattgtattgtaattgtaatttccagaaccctatatatttatccagtttggtgttaggcatttctaaggtgttttttttttttttttccttcatgtttaagcagtgaggcatacatatcttaaatacttgcctaattatttaagataaaccctaaaaagtggggatttgaaagaatgcaacctttaactattaccacacgctgctagattatccatcagcattgttgctgacttataactccacccaaaatggtatgagagtcttattctccacgtccctatctttgcttttccagtttacataaaatattttctaacttaacattttggagcattttcaggaatatgtatcacaattcctatcaacaaatt

SEQ ID NO: 33895 - DNA, 1085 bp, Bovine  19866881088658
  misc_feature (1)..(1): n is a, c, g, or t
ngtacacatgtctctttcaattctggtttcctcagtgtgtatgcccagtcagctgggttatccttttcactatcttattttttctgttaattcttccttcctatatattacacttcttttctttccaacacagtttgaagcaacagtttattactataactgaagtagcttgagcaatatgtgtatatgtgtatgcatttttattttaccttaatccaaaccacatgctctggtggctattgatgggcttattactgatgactctagatttaaatcatttgcatttctactaaattgtatttttctcctattttcttcatctacatagatactgttcctgatgccgaatacccagtgattgtccttgaaagtacagagaaatgtttgagtaaaacatttagttatgtgaaattattttaccaaagcctaaaagacaatctttccataagacttagatgtcatgaactctaactagagtgtggtgtttgatactgtggtgtttgataaattggctgcacgatttactatttgtccagaaagaaaatattttcagtaatttggccctggaataaaaattagagtcacctcaaagcaaaacctcaagtcatttataaattttaggatgtatcttcagaaaaacttcagaattttcttatgagtatttttcagtgtattttctcatttatttttctatcattacccagataaatttctgttgagtcactggtagccgatagaggtcagtcatgaataagtgcatcaagtcttagtaataaaactgattactatttatttcactgtcattttcataattccattggttttctcattgtttttttaaatagttggatgttacttccaaattggtttctgaaaactttttatccctcaatttcctcagccatggtggaagtgattgaattatttccacactatttgtagactgtagttttttaatctgaaagacttccagatgctttgaggagagcaatcatccatcattataaaatgcttattagctctgtgcccgtgtggcctgtgtggtctcattctacagtgtgcgcagttttccccccaacagatca

SEQ ID NO: 33896 - DNA, 1461 bp, Bovine  19866881176498
  misc_feature (1)..(1): n is a, c, g, or t
ncgccttgttctatctgcgttttccgattttataatcagaatctagttataatgctgaagaaaatgttgcggcaaaacctgcatgtataatcctctgtaagggaagtgatttgtttcagaaaaaatgaattgcagaatagtaaggtgccacacagacatccgtgatggctcaagaatctgcctgcaatgtgggagatctggacagtggagcctggcgggctgtggtccgtgaggttgcaaagaatcggacacagctgagcgactgagcacacatacaacatactgtacggtagctgatcatctgtcagtttttccaacctttttcttttgttgctgaagagtatattcataaaagaagcaaacataagccctacttctctagaatttaaaaattttcatttgaaagtaatttacctacttgtaatttttacatggaatatggtggggaaaaaggttaggataagactaatagttaacactttgtagattattttatattatttattatagatttttgacatgcaatttttagatttttaatggtaaaagtctccatgcctaatggtatttctaaatatacatttatttatttggctgtgccaattctccattgcggcatgcaggatcttaggttgtggcctgtgaactcttagttgtggcctgtgggaatctcattccctgaccggggattgaacccaggctccccgcattgggagagcagagtctcagccaccggagcatcaagaaagttccccaaatggtatttttaaaatgtcaaaacttgacattttatatattgttgttttatgtaatttgggtgattatcaggtgcaatatattttgtgaaggatggggaactatcctgggatgattctcagtgttgggtggtatgaaaatattgggaagaaatgcacaatttacacacatttgttacatgaatagtactctcttgaaccttggctttattctggtaaaaagtggatagacacaaaatgacccctttcgtttgaaagtcagacacatttctcagtagtggaatttctgtatttccttgcacaaatctaaaaagccgtactgcttgctagtttatgaaagacatgccaaaagtattccctcatgtgtaaacatatactggagtttatccagatgaaagccccagcttcagttgtctctttagtacacaggaaaagtgatgatttaatttagaaaagtgatatgtgtttgtaaaatgtgaaatgagtattgtatagtgtatctcctttcgaatggaagctatgtaaattgattactttgctgcggtgagacttttttctttttcatttatttaattttcttattccttaagatgtttgaaagatatggcctcaaacaaaacaaatacaaaaggagtggtggtagtggtgggagggattagcaaggagaagcagattaaagtgagttgtgaaaacaatttaaatagtg

SEQ ID NO: 33897 - DNA, 1309 bp, Bovine  19866881178166
  misc_feature (1)..(1): n is a, c, g, or t
nctcttcatagactttcaaaatcactgttcattgtctgctctaagaaatatatgtctgatgaatatttccagggtaggtctgctaaagttagactgtaaaattgggtgcataccttccagattttatgtaggcatatatctgagtttttaacattctgtgcttggaacttgtgtcttatgccgttttcttgtgatttttttccttctcactaggcatcaccattttaggtctctaccgaataggaggagtgaattccaaagtgcagaaactcatgaataccacattttgtaagttttggctgaagcccgttacttaacttttacattattatagaaaagtaaaaccataggcttttttgagatatagattattgcttgtctttgagtattttcaagtcatatctaaaattaatatttgtattcatttttaatgtccattattatagatgatcatcagaatttgtaaaggggccctttttataatgttgaatttttcctcaagtattctttgattagcttgaggtacagtaagatttatgggtgctgggattcagatggcctgaactggactcttgattcagccagtttaaagttctgtggccttgggtaatttgcttaacccctctgtgccttcacctcctcgtttatagaggaggctcattgaattataagaatctgatatgtaaacccatataaagcactgagaagcacacccagcacttggtaagtgtgctgtgatgttagcaattagcaaacatctgatttaagaaactgcattccataagaaatctttgaggttcattgtcagaatgagctttgcaccaactcaggcaaacaacagtctgaaagttaactcgactggccttctaaaaaatacatgcctctctctttgatctacttttgtctgcgtccatcttcttaatggtgctcgtgatatttcgaattgcacagtttaaacatcttgcgttaattcttttcagctcccaagtccccccctgacatggacattgatattgaactgtgggataataagacaataacaagtggactgaaaaactacctcaggtgaggtgggcctgcctgctgccgctctgctgcggtctctcggtcgcccctgtgggctggcaccgtgggccgcagggagccccgtgggggtcctcttccctcctcagcacagctcgtgcacttgaggtggactggcagggtgggcacagtcacgttcagtgttctgggagttatacgtgcttgtttcaaacagtaaactttgccatagtttatgagtgctaaataatactttctgtttcatatt

SEQ ID NO: 33898 - DNA, 2122 bp, Bovine  19866881244378
  misc_feature (1)..(1): n is a, c, g, or t
ncttacagaccatcagttacttggggccgataaaacctgtatgtccagagttaggcatgaaccagtatggccttaaaaacgtgaaaagaaaagaggctaagtgttgttttctttaataatttgtcctctctaccattagacaagatttgagaatttagggaagggggcattggtgataagttaaagggcagtagttcatagttgttgttcagccgctaagtcatgtctgactctttgtgactccatgctgtcctccactgtctccagagtttgctcaaattcatgtccattgagtcagcagtgctatctaaccatctcatcctctgctgtcctcttttccttctgccttcaatctttcccagcatcagggtcttttccaatgagtcggctctttgcatcagctggccaaaatattgaagcttcagcctcagtccttccaatgactattcagggttgatttccttcaggattgagtgacttgttctccttgaagttcatagtggcagtgatttaacatgtacgttacctaaatatcatatcgctgaagcaaagacaatctcaaagggctctgctcctcttcttggagttgattgcgttccaaggcagtgctccgggcacttgcctggaggctgcaccccggcttgtccacagccctgtgcagctgtggagcttggaagagtgttacaggactgctggattagccccaaaatgtcaacctcattttcaatttactggctcttgttgctttatgtcatgctgaccttacatgagtttgtttgctttctttctactcgcggagagatgggaaggcattactttaagcttttgaaagctaaagctggttgaacgctttaactgacaaaagacttacagagaaatgtgaattaagcagctaagaaagcttaccctctccattgctttaaagaaaattaaattatgaactgcagtgcgacatcagtatcatggtcaacatttagatatatataagcaaactatttaaatgatattgtaatcttttgaaattgctcttaatacatcaaatcctaatatatccaatttagcaagcataactttttctaaatgaaacctacttaaaatgttttcctcttgtcaattacatataaagcttaacacctctttctatgaaatctacttacctgtgaaggtttttgttgttgttatgaattatttatagaaagcagttgtttaaaacttttgccattaaacttttacgaacccccaccctcagaaagctagatttttaagtatctccccaccaaactgtattcctattaagaaataattgttttgttttcttcacattttttattcaaagacatatcaattagagttgctgagtagcataacaatcatatccacactgatttaatgggttttgtgcaactttcactgggtaaatgaaaaaatgtttttaaaatatgtaatagaaaaataatcaatgggcatctatcattgctttctctaagagctttaaaattcatgagaaacatcagaagttttatgtaaagttaatataatcataccatattctcatcaaaacagagatatgcagctctgcttattctctatagactaagaatagtatccaacatttacttaaaatggtgagtcctgtatttggtataactgagggtagaaagagatttttcaagtggcagtctttagaactcatcattgtaaccaatttagtttcttcttatgaactgagtacaatgtgcattttcactttttctgatgcatgtacatccacaagaaaagtcaggacattgagtttttttttttaagtttttcatgttgacatttgggataaaaataagaaaaatataaaaattcttcatattttgcaaggagtaaatacaacttacagaagtgaaatgggagaagtactgtaaacagtagcttttcccctttattattgagtgaacaattatgctgatgacacaaaacatgattgtctacaatgataacaatggtaaatgttagaaaaataatcacatactctccaatcatataaaatataaatatgctgagaagcttactttttgctttttaataaagatgcccattttctaacttgaggataaatagtttagaaaaaaat

SEQ ID NO: 33899 - DNA, 1262 bp, Bovine  19866881273600
  misc_feature (1)..(1): n is a, c, g, or t
ncctcttaaggcaattgattttctttcaaagaccaacttgactctgaaaagtgattcagagtcctacttcacttgctgctgcagagagaaatctcaaccttcattttcctttaacacgggccagcgtgttcctgcctctgagtcgtctatgagctaattctacagatgctcagtgaggaattaaaccttttgctctaaaagtcatgggcatgaagcccctctccttcctcatggtgagtcatatattgtgacagtgctcgatatggtcccttttttgaaacaagctgcaaaagtgcttgttccaattgtgcttttgtttgaagttttaatctcacagatttgtgagaatggttcttttcccttcacattgattatgtgtggaagcaagtcatggccctatgctagcgctcaaatgacgctgctttgccctagaaatgtttccaacagataaaagtatttatgaacattgagaaaaccagggcatgtgctctgatcacgtggaatattcatttcaccagaaggtacatgtcagtcactacaagaagatcacatttgaaatgacaacagtgtttcagtaatgaaaccatagcctttcagagacttcatgaagataccacagaactgccacatccacaccttggaaacaggccaggtgggcaccctaatcactgctgacagtgggacaaggagggtgagactgatgagtccaagtcagtcagctcagctgttagatgaagatatccttgagtacaaaaccttgctgtgtttcacaggtgactcttgtaccatatctgctggcttataagcagtagtcggttaagtgaaggctttttgttttgtgtaaatgcctgagcagtgaaatgatctctgtatcgctctgaagtctgtgaggcatgagtaagtaccatttctccttgtttgacgggagtggttttacccttgtatgcgctctctgtgcctcacactgtgaatgggtataaccaggcatcccaacagtggctcacctgatggctgttccaggaagggtagagatttttttttttcaaagcaccttccaaactttgcaggttctcaaataggaaaagaaggcaaagagacaaagtgatttggggattatttcctgttctgtggtaatagcttttacttagtgtggcatgccccctaaaaatccatcatgatgtcaggaaactgaatctgctctgcagtcatgggaaataaaaccagctagcctcctcactcctggccttcttcaggtctgtgcg

SEQ ID NO: 33900 - DNA, 1063 bp, Bovine  19866881420478
  misc_feature (1)..(1): n is a, c, g, or t
nccaggaaagcttcatgcaggtggcaagaatgtgaatagctaacataatttttcagtctctggcctattcttttcataatattttatgaagcctagaataagttggtatgtttctccttacagagaaaatagctggtgggaatgtttccttaaatccatctattgaaagcccactgtgtattaagtattgtttttggaatattactctcactaaatcaaactcctgtcataccacctcggtatggtcagaatctataattgcaggtgtgtgtgctcagttgctcagtcacgtctgactctttgctaccccatggaccgtagcctgccaggctcctttcaccatggggatttcccaggcaagaataactgggagtgggttgcatttccttcagaggatcttcccaacccagggattgaacccaagtctcttgagtctcttgcattgacaggtggattctttaccactgcatcacgaaccagctgttatattcagtgttagtttgaacctcctaaatcagataatgcagtggtttttatttatgtggatattaaattaataaaatatggagcatcacacataatttattataagagaaaatatttgggtatcagaaatttgcatgtaataaagaatattttcagattttgcttaagcaaaattttcgaaaacagtggctcaagcagttacaaaatcagtagccattttgtataagaccctgtgatgagtgttggaagagtcattttgtatatgtggtgtgcccagggcctggtggagaaggtttgttttcatggtcgcttaaggcatttgtgggtcccatgcattggagattctaataactggcttctaatctctatattgttgttggggtacactgggcaacttggatctgcctgatttatgtcagaggtacctgttagactttgagagtggggcaggcaagtgagtgactctccattagccccttctcctaaaacacaatttacgtgataatactttgaattgttttattcttgccttataggattgttaattcctgtttttattctgggtatattgtgctta

SEQ ID NO: 33901 - DNA, 2576 bp, Bovine  19866881492709
  misc_feature (1)..(1): n is a, c, g, or t
natatgtaagcacctagtgattgaatgtgggaatgtctaggccatctgtcttttgtgacgttcatagaaaataccttctcataatgtgcacatagatatacttcaaccagtagggtagtgtagaagattcggatatagaagtgtatcaggtatatcattacagacggatatatgttatatatgtttatttggagatattaaaaactataaattttgagtactttctggacgtaaggcactgaactaagtgttttacattcattatcttcatccttaaaatcaagttgttaggtgatacagctggagatcagaatgtttaaatagcagttcataagctatggaactgtgttgaagtcagccattcttgattttaaatacatgtacttaagagttgtgctgcatatcttgttattcagactcattgtttgagttttcaccacttgagaaatatctctttgtttaagatcattaactttaaatacattaggtcatgctggtttctagcataaagcaaacattcgtaactgttggcctttattgttgctatttttccaagttacactaaagtgtccatgacactgtctttccttatgtgaactttaaaggcagaatccattatttattacctctgtaacatctggagaaatatatatgtgtgtgtttcaatgtatttggagtttcactagggcaaagaggatttagagagtgagaattaaaagtgagctactttgctactgttcccagtcatctctctgtagtaaaatgcctgcccagtgtatcttgatgaagccctgtccgagctcacaaaaaggaaggtaggtgatggatggcagaggtatctgtgctggctgtcaacgtcttgggaaggattttgagtattgatctactttatatgttttcacaatggaggattttaggtacttttttcaagaggtcatgtgattttcctacaaattggaaaatgacagaatcatggaaagcattatttagtttttatttttgtgaatactgtctttgtgtgttagattatggaatttaagaaataaagcttgactagagaataaccagtttagtgaaaataattgaaagtaaaacccatttattgaaattttaaaattgtgatataatgtcaaacttatttgaaattataagaataatataaggagctcctgtatatgctttaacctattttaaaatagtgacttatgagaaaaatagatttttctcttcatcttagcattttctaactatgtaataggtcatagtattatcacagcagtagaatgaatggtaattttgttaactggggctgcctccccccccctcaactttattggtatataattgacattatataagtttaaattgtataatatgttggtttgatgcatttatgtattgcaaaatgattaataccatgacattagctaatacctccatcttgcaacattattatttcctttggttgtgaaaacatttaagatcctatgtttaatgttaatgctttttaaagtgattttttaaaaaatcaagatttccttccagcatgttgctttccttagacatatgtcttctgtagccagtcactgcccctgacccagcttgaaccccctcacagtattcgtacagattgatttaaagatttatctgtttgaaagtttaagtgaaacccaatttggagtcctggactaaaacgccattgattgaaataaaatcagttactgttttagtgtggttggaaatattatgagaatatgcaggcaaagcccaagtgtaaggaatctaataaaatagggaaaaaataagcctgattttattttgcagctgtacaattataatattctagcggcaagatggaaagcttttatatggctcaattttcaaatgatgcttgaactgactacattaaaccagtataattaaaggtatcttaaaatttaatgtctgatgtgtagttaaattttagaatatgaagtttaaatatttaagatctcactatgtatacttgttttcacattagtcacattattgctaggatcaagtgaaataatttgtgaaaatttaattataaagtagaaaatgactatatgacatgtgtgaggtattttttatttcatttatagaagcaaaagggaacaaaaactgtttatttaagtaagtggaataagggaggtatcttttttttcaatattgcttgcatgaattatacagaatttaatgtaatttgtatgtttaatttcagattcaaaatgctaatgatgtattaattgcaccacttgagaaatttcgcaaagaacaaataggtgcagcaaaagtaagtgttacattttattattcttcatatattctcttgataattaaagataatagatgtaatttcagatgttaacatttttgaaattagaatgaccttttaaaaattctgtacgtcatttaaaatttttgcacagagcctattacaaagactggaattcttttaaacagaagaaagatattattctcctactgaatagagaaaaagtcagcataagtgagtttctcccatcccaacagtggtaggacattagcagttttaa

SEQ ID NO: 33902 - DNA, 1479 bp, Bovine  19866881752472
  misc_feature (1)..(1): n is a, c, g, or t
ncaggatggttgaaggcaacttatgaaggcaaaacaggactcgtcccagaaaattatgttgtcttcctctaatgctatttagtggacggcagtatcttcatggtatccatggtaacaagtaataagtgatatgattttatctgacacagatatgaggatcagcccattaaaatgaaaaataatccatttctagacagtttccaaagcagactatgtacctctattaacggaaagggaaaaaatgtttaaattgtttgccattctttttatcttgggctgatttcttattttgaaatagcttatccccatcccttgcttttttttttttttaataagtaactctccacaatgtttctcataacatttataaaaatctcaaatactgtgttaagtactatatcccagaaatttggaaaccagaaatctgctataagactttaagacctgccctttactgtctggtattttctgagaaaccttgaaatcattgctaaaaaaatgtaatttaaactgttcatttattattttttcttaaaaatatagtgcttttatatatgattgttttgctggtcctaaacatttcaaggaaataagggtttttttttaacataagtttatttgtatttgtttaccaagtagatgataatattcaaaagcaataccatatatggtgtctgtaaatgaaaccaagttaagtcatacactgattccgctgtaaacactctgtccaacgttccagatgccgtctatgggcttagagcagggatcagcagactacttctgcagaagcttgatagtgaatatttggggcttggcaggacctgttgtctccatcacactgtccatactaccactgtagcggaaagcagtcacagacaacacgcgaatgggtgtgactgtgtaccaatacagctttctttcaggacactgagatctgaaattgtgaatctgtcatgccataagatattaagcttctttgacttttaaaaaatcatttaaaaatagaaatttatagctgatgtgccacacaaaagcaggtggcaagccggatttgccttatgggtcatggtttgctgatcactggtttggaggatgtttaaaactgtctgtattactttgagattttatgaaattttattccattaacatataaatactgacaagtgatatgcacatatcctctgctagaatcattataatggtatcacaaatgtataattacaataataggaaaatgatacagcttaaattctacttgttattctgtaaagtgtccaaggattttattgatacccttttggctccaaatgataaagatgatgtattaagacagtggttggaacactatgccttctaaagtctatgattagttgagccataatcttaacataaaggtacaggatccttaaattattttgaaattatttcatcatctttagcaggaataaaatcatatataattttccattatgcctttcg

SEQ ID NO: 33903 - DNA, 1101 bp, Bovine  19866881830290
  misc_feature (1)..(1): n is a, c, g, or t
nttatttaagtaatggaaataaaaatcttttgcacgtatttttctaataaacgtgttcacaatttttaaacattgaaaagtcacaaaagttttctctctaaagaccttgatgacttaaaaagaacagccagtacttatctttcactttggccgtgaatctttataagcagttacattacatatacggacaccttggtggatggcctctcacattcctggcagcagagtcgtttgtggtgttggtttgccagcagcccacagaggttgtcaggggcaggttgaggctcacgaagtccgcctctttcttcccggtggtttcctgtgggagcccgtgtttgtccctgcatgccacagtccctgcaagcactgagtccttcttactgaaatgctggccaacaaagtttctcaaaagaaatcagtgagtgctcttttacctctgaagtcaatcagtcactgaatgtctcacacgggcagtgaacagtacaaactaagagtactttgtctgcggaagtgctgccgagtgcagtacctttatggcatgtagtttgcaatcttttttgtgagttaagatatgaatatggcagacgatgagacctacaaataagatgactgagccatcatctgcgagtcctagagctggaagttatcctaaagattattgaggctcgcctcctatcctaaagattattgaggctcacctccttttaaccgactagaagataaagatggtagaaagtaagtgactccccacctaatttgtggtatagatcatggagtagtaaatgttgacctaatttaggcacacattcaaatatatcaactgaaacttattgtgcttgggcattcaatagagtctaatgattcaaagtgacataaagtaaaggagtacataccggagaaaaagaaatctaagattgctaccatcacgagaagttgttaactgctgtaatcacaccttagtttctactcaagcttttgtaagaaaagctgttgcccagaagtgagttcatgtgacagtagtgagataataaacagacccaagccagagttctattaataaatctataagatttgtaaccagagacaatagaattaaccagg

SEQ ID NO: 33904 - DNA, 1376 bp, Bovine  19866880345737
  misc_feature (1)..(1): n is a, c, g, or t
nggttgtcgatttcctttaaaagggtatagttggtcaattatcactgttattaatattgggaatgccaactaatttcatgaagacgtgagaaaagttaaattttgcacttaatttttaaatgatttttcttaagcgtcatcctgtctttggagcttcagttctttgatttcatgcttaacaacattctatgagtcattctgcacttctgaagatagtttaggctaatagaaagtatttctcatgttatagatcaatagtatggcacattttattaacaactcacttttaactttttgaagatgaaattatattttatatatgtttatggaagtgaaacagtgggaataaatggttgtgttttatttttccaggaatatttagaaagccaaagtcagaaacctgtttctgctccactttctttggagcaagcattgttgccagctatacttccctcaaggtaagatttatcaccaaatggtcaataccaaaatcagattgattatattctttgcagctaaagatggagaagctctatacagtcagcacaaacaagactgggaactgactgtgcctcagatcatgaattccttattgccaaattcagacttaacgaaagtagggaaaaccactagaccattcaggtatgacctaaatcaaaattcttacgatgataaagtgcaagtgagaaatagattcaagggattagatctgaaagagtgcctgataaactatggatggaggttcttgacattgtagaggagacagggattaagaccatccccaagaaaaagaagtgcaaaaaagcaagatggctgtctgaggaggccttacaaatagctgtgcaaagaagagaagtgaaaaggaaagatatatccatttgaatgcagagttccaaagaatagtaaggagagataagaaagccttcctcagtgatcaatgcaaagaaatagaggaaaacaatagaatgggaaaaactagagatctcttcaagaatattagagataccaagggaacatttcatgcaaagatgggcacaataaaggacagaaatggtatggacctgacagaagcagaagatgttaagaagaggtggcaagaatacacagaagaactatacaaaaaagatcttcatgacccagataatcatgatggtgtgatcactgacctagagccagatattctggaatgtgatatcaagtgggccttatgaagtatcactatgaacaaagctagtggaggtgatggaattccagttgagctatttgaaatcctcaaagatgatgctgtgaaagtgatgcactcaatatgccagcaaattggaaaactcagcagggccacaggacggaaaaggtcagttttcattccaatcccaaag

SEQ ID NO: 33905 - DNA, 1177 bp, Bovine  19866880425619
  misc_feature (1)..(1): n is a, c, g, or t
ntttctgggctcaaatcctgcagatggtgactgcagccatgaaattaaaagacacttactccttggaaggaaagttatgaccaacctagagagcatattgaaaaacagagacattactttgccaacaaaggtccgtgtactcaaggctatggtttttccagtggtcatgtatggatgtgagtgttggactataaagaaagctgagcacagaagaattgatgcttttgaactgtggtgttggagaagagtcttgagagtcccttggactgcaaggagatccaaccagtccatcctaaaggaaatcagtcctgggtgttcattggaaggactgatgttgaagcctgaaagtccagtactttgggcacctgatgtgaagaactgactcatttgaaaagaccctgattctgggaaagattgaaggcaggaggagaaggggacgacagaggatgacatggttggatggcataactgactcaatggatgtgagtttgaaccacctctgggagatggtggaggacagggaagcctggcgtgctgctgtccgtggggtcacgaagggtcagacatgactgagtgactgaacaacagcaaaaaggaattataggtcacctcctactcattttgctagtggcattgaccaggggtcaaggtcatgaactccactgggacgtgctgtagttcccaggtgtctctaatatccactgctctgtgtgcatggtgaactggagcaaatgaattatctgctgggataaagctgaccacatggaagtagttttgtttaattgagttagctgtactgtttggtctaatacgttgtgttgaaaaccttcccatgtctctgcttgcctttatttgctcaaaatatagcctatttattgttggtgcttagaataggttttactgtgatgtgaaatgatctctgtcacgttcactgtggtttagctcctactttgtaccctaagggggtaagtcagcggaagaccgctccctttgcctgggcgcactcaattaaaggatctctcgtaacttcataaattatttgtaattccaggcaacatcgaaactccaaacttcagaaacgaattccatccctactccccttgaaattacttaaaaacctaacgtctctccgcatgatcagcaagtctgctattcagttcaacttttcttttttcca

SEQ ID NO: 33906 - DNA, 837 bp, Bovine  19866880435067
  misc_feature (1)..(1): n is a, c, g, or t
ntgaagcccacagaaacggagtgaggaggtgctttaaaagagacagccatacttaaagtgcctcttcccacagataagttttgccattattgattttgcacaacgtttttgttttgcaaagaaagtgctgagcaaaaccagtttttaggtatggtcattctggcttatttgactgtataattaaaagtccaattattttggctgaaggctagattctattcagtgatgtgatcaatattagagaactcaggataatgtaaaaaatctggtaaaaaattagtgtgaaatagtaaattcaaatctctgaagagctgaaattttttagtaattttaggagacctaaaaatcttttaaaagattaaaaaaaatttttttaatttaaaaaagataagaagaactctcctatatcttcataaaaatgaatgtgagtcagacctgagttaatgatctacacattagccaaggtctggatgtgagatgcaacatcagctatcctttcaagtaattgtatactcagaaatgtacctaattaactaacagatcagtctctggcattgacatttccaaggataaatcctaaaaggggaataagaagattgctggaaaggaggaatgcacaattatataatgttaaaaaaaatgcttagatcaagctctttgtaggcatgagccataatcttgtatacttgtgtgcttagattttttatttacttcttaagcaatttattattgttaatcatacaagtgggcttccctggtggctccgacaataaagatgctgccttcaatacgggagactgggtcaattttcttacaaaaatcaaacaaataattcta

SEQ ID NO: 33907 - DNA, 1586 bp, Bovine  19866880438143
  misc_feature (1)..(1): n is a, c, g, or t
ntggctttatgattgccgctagcattggaagaggaagtgacccccaaagtcacaccttccatagctcactttgacaaaaatgtacactggtcatacccttgtttgcagtgacaagtcctatcccagagatgcatcagcattaacctcccttttgtctctgtaacagtccacataccaccatcccacaaaccaacagagcaaacagcccccaaaatgccacctttgcccagtctgtccccaggaagtgtctatcttctcaggtcacctctcatcttctgctctcaacaagcattggctaaagtggtgcttttcaaggtgtctccggatcagcaacatcagattcacctgcagaacttgttagaaatgcatattctcaggccacaccccagacttcctaaagcagactcgggggtgcggaccaacaatctgtgttatcaaagtcctcagaggactctaatggacactaagtttgagagcccctaggctatacatatctagatgcccgagaatgatgcttagcatcctaaagggtctgtcccattaaaaagtagaagagagaacagggttccatttcaactattacaaaagggaatacagaaatcattatatggccaatagattgggcaagaaaggatgctagaagactgtgggggcaggagcaagtaaaacagaggcaactagatgaaaagtcctgcccatctttctgggttattcctgaagcttcttaagcttcctctggcagagagcactgcaaaggcccagaaacctggaagagcaagaaatttgctctggctcagtcctggaagtaaagaagcagggaaaaatagaccataaatgtaaattagggcaaggtcatgaaaggctgagttcttttgcattgggcattttactccatagaaaacaaaaatccactaaagttgtttttggtatttagagaagaaagagttttattttgaacagataattctcatggaatttgtgtgatattcacatagcaatatctagtgcaattgtatttttttttttacctgtaacagcagagtgcatgcagctcactcacactgggtttggtctccactactcacatcagacccccatgtatccaccaataattacaattacaataattacaataatccaccacaattacacagtatccaccaatctctaatgtggaactgaggcatttaatgatcagtagaggagctgtggtgttggagaagactcttgagagtcccttggactgcaaggagatccaaccagtccattctgaaggcgatcagccctgggatttctttggaaggaatgatgctaaagctgaaactccagtattttgtccacctcatgtgaagtgttgactcattggaaaagactctgatgctgggagggattgggggcaggaggagaaggggacaacagaggatgagatggctggatggcatcaccgacttgatggacgtgagtctgagtgaactctgggagttggtgatggacagggaggcctggcatgctacgattcatggggtcgcaaagagtcggacacgactgagcaactgaactgaactgaactgaactgagaggagctg

SEQ ID NO: 33908 - DNA, 1999 bp, Bovine  19866880491699
  misc_feature (1)..(1): n is a, c, g, or t
nagagtactatactttatttatatattttgggatgttttttatgtattacaatagagcacatgatttttttgaaaaagaataaaacatgtaaatgcacaaagacatctcttagttttttctgactcttgaagttgtacttgcagtgctcaaaaactccttctggcaagagtaagaactagaaacctcagaaagcatctgggtcttgaagttacaacatatgggtataaggaagtttagaataaacagaatagattgctgggtgtctccaaaggaaaattatgcattgtttggctcattcccctcagaattatctggttctagtctttcgttgcctctgagcaattttacaactctgtaagttatggataactaattgcatgtctatagaaaaagattattttgccctgctctcagattttgtcctagtagaaagggaaagtcccactcctccctctacctgctttcctgatctagcaagctgtctgtctttgtaattttcttttctttgtatatttcttacatcttaccagtttccttattagcgatgagctaaatattatctttaacacgtttattttatatatgaaagagagtcatcatgattttacatctttttaaaattagtctttaacatggcattgacgtcccagtggtaaccaggatcagagccagctgtgtcacctacagtgagttcccttgcttccctgtccccatccatccatctcatcaccctttcttctattacattctgtctctctcttgctcacatccttctgcccacatacagatggcgacatctgtaatgatgctccctggttatttctgggtgctggtatttgaggagttttgtagcctttttccacttgtctgctttgcttgaatcttttataacggacatttgccatttttataaatcaatgaagtatatgtgagcaaagtctgacacttgtccaaatttgtcaggtgcttctttctccattttttatatctttgatcttcagaaaaccagagcagtgagagatgtgagatattagtagagggcagttaactttactggagtacagattaaaagatgagcaaagtttctgaaagtctgcggtacatgcacaatgcctctggcatagggtgatcccaacctcgagacactcctaaagccagcccagcccctctgcccctgagttcctgctgtactacagcccctgtgaggcctttcctaggtggccagtactttgctggggcaggtttgactccctgtttcattcctaactgcaccatgaaaactggcacatccattttgtaagcgaatccattaaaggcactggagggaaaggcacccatctgacagggtgtgtgcagcacctccaggttttcgagggccattgtagatgcttctccctgctagatgccagtagcacactctccttctccactcctcggatgtgacaaccagaaatctctccagactttgccaaagtcctctggggagcagaattgtccccagttgagaatcattggtcttgtgcattgagcagctatctaatcaagctttgtgctaaattctagaatcagaatgttgtacataacatagccagggggccattcacctgcgggttatcctctcacagatcccaatctttgtagctagaaaaagtaggtaggacttgggttccacaggactctctttgaagaatactgttttgatgtagttccaagtagagccacatactcgatgctgctgtctggagaacaatgccaatgccacaaagaaagaaaaatcctttttgacaaccctgcagatctgcccttcaaagcagtgttcatgcatccttctgggctctgctcagaggattattatttgccagagttcacatgggtcaaatgccaatgatactaaaactctttacttaattagcacatcagattagccattcctctgcagcctaaagggcttcccaggtagatcagctggtaaagaatccacctgcaatacaggagctg

SEQ ID NO: 33909 - DNA, 1735 bp, Bovine  19866880548065
  misc_feature (1)..(1): n is a, c, g, or t
naatataaactgtcttatagttggtagaattggtgagtcaagcagcttaaatttacagtcatcttcttcttcttcttcttctgtattttcttgcttttgttctcaataaaaaactagatagtaagctttttgaggacaaggaatatgttttaaaaattaattcattttcatatttacaagtatttatttggcaactgctgtgtgccaggcactggagatgcaatggttacatatcataaagaaagatatcactatagttaaagaatatacagtttaacccaaggcaaactttgactgttggctgtctggctattttgttaataaagttttattggcacacagacatgcccatttatttactatgtctatgactgctttcaagctacaagacagagttgggtagctgcaagagagattgtatatcttgccaagcccataatatttacctgtagccttttatagaaagtttgctgacttccggcctagtcatgtaccttcccagtacctggtgaaggaaaagccatagtttttgccccactctacaaatactttaaggttagagcaacagattattcacagctgaaaagcatcaccattgttatgatagtaggaaataatccttagtggattatttttaatctttgcattttaaagactttgctgaaatttctagatgctgttgacatacgaacaattttcttgccttttttttggtggatcagtgtgaattctatacacctgtgcaactgtgcaagaagtttcaaagacgaaaatattctgatgcatgaggttggggggaaggattgaatagaaccttgattgctaccattccagaatgtgtcatctggttttctgctgctcttagtcttctctaaacacacttatgctgtgaatttttttcaactttttgttcataaatacttgaagagaagcaatgaactcagaagtcccttttaaccatttccttctcatttgtattgaacaacacaaatgtgtggctatgggattctctgggattgaggcacagttagaaggaagagggtaaaagccagtgtcgttggcatggtctggggtgtccatcctctgtgtagcatgtctgaataacacccagaatgacatttaaataggtgcaaggtgttctctctgattccttctgggtttaggatgtttgtcttgtttttagaactgtgtattgtactgagtattattaaaatttgaaaagaaaagaaatgcaactgattctccaaatgaatagttggtttttttaaattaaaattagaatgctagtgaaagaagctgtggcattccctaaagatgagggaaggacaatgttgtagatattctagggaaaaataaaggaaaaagaaataaacaaggattggtctaggcacattgtaggaaaagttgacaattctgattttgaattactcagtgtctaaaactggcttatacatactcttctggagcacaaacacaacatcttatgaatggaaatttacccagaacaaggtagacttatgaccacttatcgtctcaagttattctttagcatgattaattcaattcagaaggaatttattactttgtgttctaggtactgtgatcattctaaaaatatagtagtgatgcagttaataatttaattgccatacatagttagagtgggctgtaaaatccagtgaaaggtggaattactaagagatggaaataatacagaaaatactttgatattaga

SEQ ID NO: 33910 - DNA, 2582 bp, Bovine  19866880625010
  misc_feature (1)..(1): n is a, c, g, or t
naatcctgaacagttaccagctgatgacattgtcaacactgagcaatggtgaggcaatcagaaagtcttgctaagttgaggagatggagaaaagttgtgaactgactgtcttcccttgaccagtctctcctttacctcctccttctcttggcaccctggactattgggttaaagtctaagactaaacctttcccccatactatttgtctttactgagtttaaaagagaatctatgttcagaggaaatgcttgattttggaaactcagccagtagtgatgcagtgactctccagtgcttagagctctctctatcttctctctttttaacttcatagactagagttaggacttcagctcttcccttctgtacattaccagagagagcagttgttgccccaggagttgagctcgtgggctaaaatcaccagatagtcacagagtaaaatcacacagtataaagacaacacatgaagtgacacactaactaaaacagaatcatcaggatggatgacagtctgcagcctgtatctagagtaagagctcttaataaccacatgtgctgattaggtgtctgtctgctgcaccctctccatggcaattgactgcctggacttctgggtgcagccagccctggataccggtctctgttccgcattccccacctgatacccttaatacattgtcttagatttacaaccctttctggtgactctttgtccagacttgatatgtgtttgacctgtgcttgcccccgaatggcactctcagtacctgatgccaggaaagcaggttctcatcacctgccctgctttgttggggagtctagggcaaggttcttctccttctacttcttcctgtggcaccgtctggccttgttaccatccctcatcctccagtcttgagagacaacagtcttgtctgccaaggacatgagcttcttgtaaaccaggtcaatgccagctgcggtaaagcctatatctcactcactcaatcagaagccacatagcaacatggtaaataaaatgcattaattttgcctaaaacgagagctgctgctgctgctgctgctaagtcgcttcagtcgtgtccaactctgtgtgaccccacagacggcagcccaccaggctcccccatccccgggattctccaggcaagaacactggagtgggttggcatttccttctccaatgcatgaaagtgaaaagtgaaagtgaagtcgccccgtcgtgtctgactcttagcgacccatcgactgcagcccaccaggctcctccgtccatgggattttccaggcaagagtactggagtggggtgccattgccttctccaaaaggagagcaaatccctccaaatgccagaactgagcatcttcctagacacccttctggtggtcagagatcagtaaacccgagtcaagggtgagagtctcttcctattttctcagttttccttttcttcctttttgtctggtagctctgagtgcagaggctggtctggtgggttagcacaaaatatggggccatctggtcaccaaaagagtaaagtcacaacaaagcgttggaactggtagcagaggaaaaggggaagataggagggtaatctggggacaggcaggtggaatcagcaggggtgcagaaagtaagctttttttaatatacatgtctatttacttacttggctttgttggcctgtagttgtggcatgtggggtctagttccctgaacagggattgaacccatgccccttgcactgggatcaaggagtcttaaccactggaccaccagggaagtctcagtaagcattctttttataaaacttgaccttctaagaaattcagtcctggatacctcctcagctctaggctttaggaattggaattcattcttgagcaggctggtttcttttttcagaacttaagcagcgttcctttgatcaaatgatgtttcatgaatctttgaggtcttttacatgaagagtgggtcactgtgatgaagaaaagatgtttaaagaagtcagggaaaagatcactggtgggtacagtggtgaattacaggggtgagtgctggccattctttaaagcttgtcatgaattagttcttggaggtgctgcgagattggtgacatttccaaagagcataatttgaagttgattgggtctctcacgtcctttgaagataggctctgttcttaaaatgttaaaaaataaaacacagaggaacttacccagtgagagtggcaaaacagtctggctgctgacacgtccctctaacatctctcaggaagagcaatgtgtctgtttgaattggttttgagacgcagacagtgtgatggctaaattgtcatttggcaaattggataagtgtgtgatttttgcctcttgggaaagatgacatacatttttgtacatctaagacttgttttttaaaatcctcagtgcatttaaaatatcaaactggctgggctgctcagattgctttgtgctatgatccaccaggcactccagctcttggctacccagtctcacgatagattgtaacacaggcaggccacagctgttctagacttttctcttctctaaaggg

SEQ ID NO: 33911 - DNA, 1418 bp, Bovine  19866880628134
  misc_feature (1)..(1): n is a, c, g, or t
ngccaatattttagtcacttcttttttctttctccccccagtagccttaagacctaaaattggttaattttagattttcatggaagacaaaaaagtcattccatagccccagctccttcttgtcccatgctctttcctccaaagcagaattatttggagttctcttgggtcttttctacctgtcactatgactgtgataccaatgatgagaaaactttggtatgtaccatgactacagtgtcagacaggttcatgtaagtgatctcactgactccttatagccagctctgaaaggcacacaaggcagctattgatactcttctattgcagctgagctcagagaggtgaaatcacagccatatcaactagtttaagacagggtttgcaagatcagatgccatccccagatttttttactactataccagtcaacaccttggtttgaaaacagcgtgttgtttcgtagcagcccacagtgtgtgtgcctcaagccaatattcatagaaggcctccagctaattcttcgtgtttagattaggttagaaacctaggccaatttaaatgaacaaatatctaagtgccttatgtgtgtctagcctggctatatggtggcattcagggttcagagagtagaatgcatatcacctatggatttagattctggatggacctgactcaaatcacagctcttctggggactttgaacaagctacttaaacattcaaaaccttactattaaatgagataatgtaaagtggcctgaaccttgaaagtgcttaatttatggtagcaatgttttatgtacatcatctctttcatccttacagcactctttatgcggtaaatactattctcatccccactttatagactgataagctgaattgattggccaatggttataccactgcattttgcctccaaacacagctggggctgttgaggcttcttgtgattaagacaggggctgtcctcctgtgctttttataggtgtacaactctgtggcgtgatttgggctagagagagggatctttgacattgagactcattcctgcccaattaaagtatactggttgggaatagagggtgaaggaaaagagcaatatttgccacattcacttactcctatttaccaaaagcatgctgatgctggtacaattggtccgtcgtatctgcagggttctgaatccacggattcaatgaaccgtggattggaaatattaaaaaacaaaagtccagaaagttccaaaaagctgaacttgaatttactgcactttggcaactatttacatagtatttacattatatttacaattatttacatagcatttacattgtattaggtattataagtaatcaagggataaagtatattgtaggttatatgcaaatgctagactttttatataagagactg

SEQ ID NO: 33912 - DNA, 2054 bp, Bovine  19866880661095
  misc_feature (1)..(1): n is a, c, g, or t
ntttaaagattgaagctcattgcacatttcgtgccattgcttttttaaaattcattattttaaaaagaatttatagcttttcaaaattatttcttaaaatggtaactaattacctttaacgaactctatcaactattattttcatttttgcctcctctttcaatttgtattcatctacattgtcatactgatatggttgcaagcacaattcccatattattttctcactttatactttagtttaaacatcttcccatgtatccaaatctttctaattatcatttcaatgaatgaattatctttcatcatggttcatacaccataatttacttaacaatttccagagtgctgcacatagacattgcttccaatttttttcttgctggtattgataatgctgttaattaacatgcttatgcatactgcttttttccccctctaatgagttattgactcttacgggaggaaaaggagccatcatatgttttgaaactgactgctggagtccatgaaacaatatttacatcctttgaaatatggctatgtgtaagctgcagagttctctctggtttccagctagaaaggaagacttgggacccagttcttatctgctgtcccttttggagagacctgtgaaaactgtccagtggcacttgctgttcagttgctaagtcatgcccgactcttcatgactccatgaactgcagcaccaggcttccttatccttcactatctcccacagtttgctcaaaatgtccattgagtcggtgatgccatccgaccatctcatcctcagtgcacagtggcacttgggcaagcccatatattagcgttcctctttattttcttttaaacattgttacaggagtttgagggcaaagtagctagcttttatataattaagtccttataatgccagattctggaggcaagatagagtgaccccccctttcccacatcaatcctttacaagccagtgttttcctataatagtgctgcttaaataaccacccattcaatttaaaactcaattgcaaaccagagagcgccatttctgtttaaatgcagaacatcaggcagcaaataggacaccaaatcagaaaggactatgaacaacttcaaccgcatttagaaacatcatttttaacactgtggcaagtgttgccaatttcaggcccagggtagataagtccttaaagtctgtattgttttaaactaaacttcataaagggttcaatggttttcatcttttacgggaaatgagagttattacaaatgcaaaaaaattcaatttaaattaaatttcagccacacctgcaataatgctttaaaagggaagatggagtctgatgctatttaccaaagacatcaccaggcttgggcaactgagcaagtacagcctgaaaatgtctcacgaaacacaatttaggtcatttttattcattgtgctatgcagagtcacagacttcagaaaaacacactaataaaacatcatactctgcttaatggtctcccctcattcggcaccataatgataaatgaaatgccattagcataaggcaagtccatttcttgtagtctgtggagcccaggactgtgacagaattggaatgcagagaattgattgttcacagttcaaagaaaaaatgtaccgtgtttcctaactccatgccgaagcctacactgaagtccaagctctgagaaggctcgtgatccccaggctgtgaacacggagcgctcagactgaggtacgtggactggaatgttgcttcagaagatttttttcaaaagtagcatttgagaaagaccagaaaagcagaaagctggatgcttccaatagcctctcccttgctctgcaaggatcccttattcagttattctaaaaacatcttcagttacgttccattcttaccatgggccatgtactctgctgagccctggcaatacagatagataaaagatagacaagattctgctctcctggagcttacatcctaatgagaaagacattaggataaacaagtttaaaatgacacttttaaaatacttttcac

SEQ ID NO: 33913 - DNA, 1365 bp, Bovine  19866880683589
  misc_feature (1)..(1): n is a, c, g, or t
ntttttttaaaaagaaaaattaattattttggctgtgttgggtcttcattgctgagtgggcttttctctagttgtagtgagcgggagccactctctagctgcagttcctgggcttctcattgcggtggcttctctcgctgcagaggatcagctctagggcatgcagtcttcagcagctgcagcacatgggctcagtagttgcagctcccaggctctagagcacaggctcaatagttgtgctgcctgagcttagctggtttgtggcacgtgggatcttcccggatcagggatcaaacgtgtgtctcctacattggcaggcagattctttaccactgagccaccagggaagccccactagtgagcttttttaatacaccacgtttatcaagtgtcgctctgaccttgtgagccaggcaaggcattatgtctcatagccacattctgcaggttaagaaactgagcctccaggtggtgaaagcccaaatgaatgtggcttattttaggtaaaatgttctttctgcattgtcttgtctaagatggctgtttcttggaggtataggagggatgaggaagtagtgaatcatctaaccctggcccttatctctctcattccactccaaattccaccttgctttgaagcaatgtcccgaggtacttggagcagaatgagactagtcaacccgcattgggttatttgcaatgtttttcagccttgacactatagaaattttatgtaaagtaattttttgtcggtggatggagatattgtatgatgtatagcagcatccctggcctctacccacgagacgccaatagaatccccactccagtcttgtgacaatcaaaaatttctccagacattgccaagtgtcccctagggagacaagttcacctgtgtttgagaaccactgagttattgtcacatacccattgttggggtggtttgtcttcatgacctgtaccacggataatcgatcatgttgagcatctcagaaaagagatgcaaatccttcaaggcatatgggaaagaaaagggatttgaacctcatgttccctttcactggaaagaggacacatgccttcactctgctgaagacaaaggaagataaatatgtcacccctctctgtggcaagagctcttctgatggctccgacttttacaacaaactgtaagcgctgccaagaaccacgcatcagcccgtttaaggaaaagatggcatatttgaacagcttgacactgtgaaggcataaattgttgggagagacaaatgtgagctggagagatttgtaaatgtggcagacagtaatcctggtatttcgcgttaattgtttttctcaggcaggagacctcctgtgatttacatt

SEQ ID NO: 33914 - DNA, 1429 bp, Bovine  19866880734871
  misc_feature (1)..(1): n is a, c, g, or t
nttgactaaccattaactgtcatcaatgctttatttaagtcaactttaggacttaggatataccttggagatttttgcaattataggtttctatatctagagtctgcaaattttgcatatgtagtacttgtcttccttctgctccaacaatattctaatttattagagaacaaaccgtctctttgtggggagccacagcttttatgctagtggcgtgtattgctcctgaccaccgttttcgttctttatttgagatgccaacaagatttcattgttccctgtacttggccatcctgccttgtctatggcttccagacctttgctgtgttatgtcactctgtgactgtggaccagacatgagtcataaaagcaggattgtactggagctattcttcagcatttcaggcttattactctgttttggacagtgatatactttgttttacagagttccaatgaatgattgtgtaaacagataatgttggtaaaatgagcttataagaaccattcattaagttacaccctgcagttggggagagctaaaattttcaaatgaaagaagtaatctatttctgtgtataatctatgtttacacggctttgtacctatgattcagaaaactgtcccaaatgaaaaagctatgatgatttatttattaagctaactgtatttttgttaacctttaatatattcaggaacagagtgaactggatgcttgaagtatttttctttttgagtttagagttttattgttataactgtcttttctatcatgcacatttcattcgtaattgatttagctggctacttttaaaaatgtcatgttcaagtttgaatttcagagcaaatgaacaaccattcatttcttccatcattcattcctctcttcctgccatcatcttcacacccactgcaagtgctttttattcctcccactccattgaaaagtttcaagatcaaggtcaaccattgtctatatgttgacaaaattaacagtcaagtctttgactttatcctacttgacctctaggcagcattacacatgcctagtcctgtccacctacttgaaacatgttcttttctagacttcaagataccattcttacctgtgttttcttgtattttcactgtcatctctcagtctacttgcttggctacacagtctttgctggttaccagacatttgaatagcagtacccaaggacttgctgtgactgtcttctctctctgtttacacccactccctagatgatctcaacttcttttacagcttaataccatctgttactgactcaaaattctgtccaatctagtcctctccctatgagcttgagccttatggatgcacaaagctacttaattcctctatttaatactacaaatagaattttgttgtctctccatcaaatttactaccctgttcagtctt

SEQ ID NO: 33915 - DNA, 1531 bp, Bovine  19866880756098
  misc_feature (1)..(1): n is a, c, g, or t
ntagaatcacatcttcagctccctcccctggggttgttttgggaccaagacatacacagctcaagaaattaaactgcggataactaattcgcctcaatactgagcaagaaaaactgaaggaggttacctgaatcagaagtactgtctcctcagtttctgcggaggactgtcacccttctgggaagctggggggaatgcaagagccctgaagatataactcttagattggatagaccactccactgtttcagaaagctacacctggaacacccgttggagcctaagaatgaccattgtcttggggcagataacatgttataaatgcagaaagaatgctgattctataattactaacaacagctacagttattataccccttccactggagctcctcatgggctagaccttctgcagattttacctctactgttactgacagcactgttccaaagaagacactgctgctgctgagtcgcttcagtcgtgtccgactctgtgcgaccccatagacggcagcccagcaggctcccccgtccctgggattctccaggcaagaacactggagtgggttgccatttccttcttcaatgcatgaaagtaaaaagtcaaagtgaagtcgctcagtcatgtccgaccctcagcaaccccatggactgcagcccaccaggctcctccgtccatgggattttccagacaagagtactggagtggggtgccattgccttctccaaagaagacactagtatctccatgttactcctaggaaaactagaactaagttcaagtgatttgcccaaagtcacacaggtagtgaatggcagaagggagatttttctcaatccatatctgagtcttaaccccagggtgtttccagtgtgccaagcttcagatgaagaatcaagtatttatgccaattgtgatagccagcctccgtgatgaccccagggatcccagccgcctgagacttccaacctggcataatctcctcacacagcaccagggtgatctctgtgaccaatggcatatggcagaagcaatggtgtctcacttttgtaggttataaaaggtttggacttgcctcttgaattctctttctccatctctctctctctgtctctctctctcctcactctgtctctgtcccaccttttgctcttagagaatcaaactgtcgtattataaaccatcttatgaagagggctatggcagaggaactgaagcctctggccaacagacagagaggaaccaaggtgtgccaacaaccacatgggtgagtttggaagcagatgctccattgcccatcaatccttgatgtgactgccaacctgttcaacagcttgactgcaacctcattggagacagaatcaatcagctaagcagttcccaagctccttaatgtcaacagttgtgtgacataatgtttgtttgtcaagctgctaagtttgggggcaatttgttacacatattattaaatcaccagtatactaaatcaccagcgtactttcaaaaagatgataaaatatgtaattg

SEQ ID NO: 33916 - DNA, 4295 bp, Bovine  19866880774735
  misc_feature (1)..(1): n is a, c, g, or t
nctagatatgatttacttttatggtttacactgttcaggggagtaaagttgaagaaggaagacgtttgatgctaggagtaattatgttactagagaactgagccctaggggacctgcaggctcctctcttgatggggattcttgtatctgtcatttaaatatagtggaaattaaaagccaagaagtctcagttctgtactgaaggaaatagggccacaatgagacaagaattccctgaagtctaaggagatagaagtcatatgaaaaaaacatttttctctttccttcacaaacttgaggggcaagaagccaatagaggtaggttatagtactttgtagatagattttcttttctctttctcacgacagacctagtctcagaatgggtgtatggttggaaaaatttcatgacctaagtgcattttattgcttagttgaccctataacatcagaaatgttttaaaggaagtagtatggtgtagccaacaggagggcacggaggcctagtgtggtaagatgtcagacgacctttcattttgtatttaatggtttacattaactgagccaacagtctaacctgccaggtcttacactaagcacttaataaactgttttactatattactatagtgacctctgaaatgggtaccactgtttattatcaagcttcatggcataatcatagacaactagaccaatggactgaaataagagtccagaaacagaacaatgatgacaaagatgatacttcagtgtagtggggaaagcatggtcttttcaattaataagtcaattgaatatacccaaggaaaaaaaaatctgacccttaccttacatgatacacaaaaatcaatcctgagcagattgaaaagcaaaatatgaaagaatataatatgatctatggctagagaaagaatttttaagttggataaaatagcaccaataataaaggaaagaaatattaatctgattacattaaaattaagaaatctgttcttcaaaagataccattaaaagtataaataggcaaaggagaaagtgaaataaaatatttgtaataaactccaccaaagcaagtaggaaaatacagttaacccaatgggagcgggatgagtaaaagatgcctcaagatatttcaataaggaggattcccaaaggccaatacacatatcttgtttagtcttcagagaaatgcaaattaacatcacaactcagtaccatgacatacccacttgaagagctaaagtgaaaagacaaagtgttaacatggagcaactggtttacctcctatcagtggcacgaggaatttctaattgttccttatttatactaatacctgtctttgggagaccggttggggttcagcagctactaaggtagaaccctatggcccatcaattccatttcaatgtatacgccaatagaaaccagtatatatatctgcaacaaactactgccataggccacaacatgaatgagtttcaggaacacaagaagaagatggcagacccagagaatatataccacatgattctatttatacaaaacttcccaaacagacaaatgttaagtcaggatattgggtggaggtcagagattgagagggaccagagaaaactctgggggtgctggcaatagcctgtgttttatctatgtgctggttgcatggatgtgcacactttatgaaaattcactgaagtatgcacatgatttgtgtgcttttcagtatgtttattataaaaaggtataaacacaaagtattaggaccctatggataagtaaattatcatttatctcaaaaaaattaagactcttgaagggcagattatatctctatctacggtcttgtgttctgctaagtgttaagattagtgagtgagttcagtggattaagtacctggatcaaaagggaaggcagtatactgtgtttccctttagtggagcattacctcatgggtttcaattcatttgcaccatgtctatgagggcagtgattgattgccttggctaggatcaaaactgaccacttgagaaggctagtctctatcctagcagggcacacctgtacaattttcccttcttgttattccatcctttgagaagtttcaatatcacttatactgactctcccaggctatgacaggactctttccatcaataaaaaagttatatagaggataaatagacagaatacacttggaaaactcttagcgattgcctggtctttcatttcatttctctggctattcactttttgagacagggtgaaagaggagcaaaagcaaaaggaagaagcaaaaaaggaagataatgtatcaaatccatagagctaattaatgacagtaactcagacagtaacccaattcttgtgattgctagtgtgtgctctcttcactgcactgggtttctccatgatcttgtaacagttgttaatttccactatttgctgttcattcctattaaaactttacttttcactctgcaacacagtcttctccagatcagagattacaccttaacctgacttggggcctgatactcataggcttttccatagtcacctccagctgattaaattaaccacaagtactctacactctatccagattccattttatcaggccatgtaaggaagaaataatggcagcatggaataaaaagggatgactcttgggagtagagtttatgccaatctaggcagtcatggtcaggttaacagaccttaaattctccaggtctcccttaatccctgaacaaatgtaatctacttgacataactgaagaactctacactgaagaatttgacaaaaggcacttttgctggctcctacttcaatccttcacttacttggagctgaaaaatcaaaggagatgatattttcatgttattcaaatgcacattcattttccatcaaatttccattttttcccttaaatgggtgtattttattttttggctcattatttattatcatttcatttatttagaaaatggaaacttcaagcagtttgattaagagattaaataactggactttggacagctaaaaataatctaggtatgggttgcattaggtttcaaaatatttgaggttttgatcaaatctctaaacgcattattgccaaagagcctctccttcttttcaaattttaaacacatgtatgttttaaggaaaattcaattcagagttttcagaatcactgctaaagatacttgagctttctaaagagacttttctttaaaaagtaaaataagtcctccataagcaaaacttagaggttgaagaaattctaactaaaaaattctgtcatttaatcttcatgtcttaagcaacccctcaaaagccataaatatcaattcagtcaaataccttcaactttccccaagaaaagtttcacaagaaaccaatataatgtaaccatttatgagatgcatgtattttatgtctggtgcttgatttattttttgaaaacagctcttagatgaagaaatgattagttcttgagaggctgagcaacttgctcaatatttcaaaggaagaaaatgtcagagctgagatttcacaccaagtctgcctgactctgaagactgtcagctttcagtagaattatcatggactgtctttgagctggagcaaggtaagagataaaagataaatagcatgaaaacataaactttcactactttatcttggactgagaagaaaaaataaaagaggaaaaaaagaaaaagcaccattaaataaagccttcaaagcctgttttatatcatgaaagtttttagccttcagcatacctagccaggaccacctagtggtagctataaaatactgtctgggagctaacaactaattggcaaaattaagtaaatgaacagaaattaccacagcaataagtactatcgtttactaaaagcggcacaaaagtacatttttaagcacttaatggagaaaggatgccagaagaaggaagaaatgaatgtgggttaaaaatgattttcaggaaatgattgaacagggcttccttggtggctcagtggcaaagaatctgcccataatgcaggagatgcaagtttgatccctgggttgggaagatcccctggagaatgaaattgcaactcactcgagtattcttgcctgggaaattccatggacagaggagctggaaggctacagtccatggggtcacaagagttggatacaactgagcgacaaaacagctgccctcccccatcttgctggcacccaaaatagagcaaatttttctttcaaaaaagaaaaagaaatgattgaagt

SEQ ID NO: 33917 - DNA, 1189 bp, Bovine  19866880841589
  misc_feature (1)..(1): n is a, c, g, or t
nccctcagtgtatcgtaacgcatcagtcatgctaaatgacacacccacaagccatgaccataaagatcaaaaaactgggcaatgggccaattcctggaaatccccagctctttcccaaaataactggaatactcctcccactcattagcctatgaaattacacacctttatgaaaactgacaaccccataccctggtgcctctcttgccttcctagatggctcatgctctgtctatggagtgtgtttcctccctgaataaaccttctttcactttaatatggctgttcttggattctttcctgtgtgaagccaagaacccacattggatagccgtcccctcaaatgtgatgggatccagacatgagctgggatgtgaccatcctcttgcaccccactctctttcctgcaacaaagacagtacagggagaagctgctaggatcatcagatacggggaaaatgtttgagtatggatgaaaccggtaggaaagaaccagctcctcagtcagtagagccttgaattgctatgataaaagaaagtggcagagctcagtaaaattaaggtttaggggaaggttcttttgacagaggagataacagaggtccccagaatctaagatctgccaaagatgtgccattcccaacctctccagaagccatgaccaccccccaaccccatcatccaaagcattttgaaaagaagacaaactcaggcaaagttgaaatctggaagtcatagccccctgcaaacacaggccaggctttaatttcaaagagagttcaatctgtgggctaattggaaatgttaggtcaatgacttactctgcagaacctggccccagatgagaagaaacaaaacgttctctcattcttgaaaccaaaataagcctcttcatatttcaaaacaaaaccttatctaagtggatggtcaaaaaagttggcgatggtacaagaggccttctcttttctaccagaagtttcatgttctccaatgaggctatttctaccccaaagtacaaaaaggaaaatctccatttcttcccacatttgagtgtaaagcaaatctgaagtgccagatcctgccttcacttttaagctgttgattcactctaatggtgagctcagacaccctgcagcaaacaggaaatgagtaaatattgtcagccttttaaattgtgacttacttgttg

SEQ ID NO: 33918 - DNA, 1430 bp, Bovine  19866880893299
  misc_feature (1)..(1): n is a, c, g, or t
nctgtgccttagttttctcttctgtagctgggagtggttgccagataacccatgcaaatgacttttcacctagtgcctggcacacagcaatggttcaataaatattcattgtcctgagatcagagcaaagcacttctttcatttgaagagaagagtggggaagacaggatggaatcagaataccttgtgtcagaaagtagagtaatgaatctgaactttattttctgcttaaaaaaaggtgaaggattctgacaaggacgaaatcattgctaatttggtgtcattcctcatttcctgtggattgaaaagttggccttttacagaaagaacttgagtgtccccaagctactggataatttctctgttcctgattttacgtctaggagaactgtgattctctgaggggcttggatgaccacctttgctgaggccagtaaatggaggccaacctgttagtgaaaagcaaagcccagaaagcccaataaaaagaggaaggagcaataaataaacccactgcctagagaaaggtaaactacagaaatgaagaaatcccgaaagcagctccagctctgtcactaccaccactgtactgagagagatggctgcaatattctcagcctttttctacattaatgcttaaaaaatgcaacaatcaggtttgcagatgtgaaatttaggaggcagcctgtttcctgtgatcattggctggggaagctggcacttggcaaaattttgcaagtgggtaaagatgccagcctttatccaaagaatacatgagcaccaaactatgatagtcagtgagcattcttcatccattagtttagaataattcgatgctgtcctattatttctactacatgttgatatatcagattgtttacttattccaggcaatttatctctgttcttttgcccatctttccccagctcttcccccactattgctttcttcagaaggttgaaacccagaagataattgtcagaacaaacatagccccccaaaacctgtgtgagacgtctcaaaggccatgatcttggcaggtcatggcattaaaaggtacaagttggaaaacttctattagtcttgttaggacagtttttcccatttagggctctacttagaaaggtggaaaatttaagatgatgcaggaaaggatggtagagaaagaactgttcaaaggacagaagatggtttaaagcacagagaagcttagaaaccacataagacctcttaagttactaagtcttctgagaagaatgataaaggtaacttgctgtcaaggtaggagcagagtgatggaaacacaggatggatttggtggaatcatgaggagctgggctcccatctagaatccatcacctgtaactgcagaacatcagaggtgctactggcttctttggcccccaatttcatcatctataaacagaaa

SEQ ID NO: 33919 - DNA, 1226 bp, Bovine  19866880904379
  misc_feature (1)..(1): n is a, c, g, or t
ngaacataagttataggaaaacctacctcaggttttaatccatatgcaaatgagcccttagtttttatatgcaggagaaggcaatggcaccccactccagtactcttgcctggaaaatcccatggacggacgaagcctggtgggctgcagtccatggggtcactgagagtcagacacgactgagcgtcttcactttcacttttcactttcatgcattggagaaggaaacggcaacccactccagtgtttttggctggagaatcccagtgacgggggagcctggtgggctgccgtctctggggtcgcacagagtcggacacgactgaaagcgacttagcagcagcattcatgaatgtggagcctctggcagctgaaactagtactttgatacatgccaatgcatgtagagctattagaaagaggctttgtgatagtcctgttgacacaacccagacattcttacctataccagagctcaactggagcacaaaaatatagaaacacaaacagcaaggggtaattcagtgattaaggaaattgcagcaagtgtgttggagataagcctcatttatctttgattccaaactttgaataatagacttatttagcaggtaagtgagaataaagcactgcaagctaatatttgccttgcatacatgcatgcacactcagtcatgtctgactctttgcaaccccatgggctatagcccaccaagctcctctgtacatggaatcttccaggcaagaatactggagtaggttgccatttctttcaccaggggatcttccagacctagggactgaacctacatctcttgtgtctcctgcattgacaggaaggcactttaccagctgagccaccagggaagcccttatatttgctttgagaaacacttaagtgcaggaaatatctcttttgccattttggaaaggttaaggcaatgaaatgctacagtcaaaggctctagaatcccacagagtttcatgtatcatgggacacattgtggccttggccacgcaaggattctctgagcattgctaaagtgagacctcatggtaccaaagttttgctcatggccaactgcaagcaattctgctcactgaggattcaggaagattcacttcagaaggtttgtttgcaagaggcagtttgaattccctgaaaggccactgcccccattgaatctgctttgacttgaaacatttgataataccttttactgtaa

SEQ ID NO: 33920 - DNA, 1151 bp, Bovine  19866880918099
  misc_feature (1)..(1): n is a, c, g, or t
ntcatatgcatttttataaattgacagttggttatattcatataagctccctgctttaaagcatgaatgttcaaaagattctaaagttttatgacattttggtcccctggtcttttagtagtatagcagctttagctgtgtaagaaaccatcccaaaactttgaatcttaaagtaatagccatatcagtagctcaagatttagtgaattgacattttgggctgggtggttctgaccatctcagctgtgctcactcaggcatcttccattggctagtggttgatggcctcgttcatatgttgggcagttagttggctggctggtaggataactgggccaaataaaactcatcatccagtaggctagatcaagcttgttcacactgtgataatctccaggttcccaatggcactgagagaaagcaagctcggatgtgtacgcatttttcaagcctctccttgcttgaccaaaataagcctcatgaccaagcccagattcagtgtgggagaagactgcctagaggagatgtgtataaactgtgggccatcattttaaccacctggcccaagcaacattcctacatcgttctttcctcttgaatgaacccctctgtcgcacctttcttggagagattccagaagaaagttcttacacacaccgttccattctgccccaaactgaataaggcctctttctctcattatgtgagcctaagtggcttagatagtaaaggatctgactgaaaggcaggagtttgatctgaactcagatcagatcagatctgaactttgatcagaacctcaggtttgatccctgggtcaggaagatcccctggagaagggaatagtaacccactccagtattcttgcctggagaattccatggtcagaagagcctggaaggttacagtccaaggagttgcagagagtcagacatgactgaatgactaacactttctttcagataccttgacattaagtcaaacatggaagttcttcctaaattattcttaactgagtatcaaccactgaaaccagagacattctgcttttgatatttcaaagtcaaatcagggtagcgctgatgagctgcagatcttttattttttattcttgaagaatatcatagattgcaagtctactttgttttcat

SEQ ID NO: 33921 - DNA, 2218 bp, Bovine  19866880922147
  misc_feature (1)..(1): n is a, c, g, or t
nctgtgcctggtagctgtgttggtggttttgttttccctgggaggccataagtgtgttaatcatcctaaggcctcttgaatagccttccatgtatttggggttttgaaatacacggacaaatctccatgcatttgttgtgtaatgataccatgtgagcacatgggaaactcccccaggaggtcattaggactgagcaatggaccgtgaggactttaagcatagtctctggtgcatttttgctttccaggaaagagctgcactcccccaacttaattttctgaactaatgaacttctccagggaagcctatggggaaacatgatctcttatttaatgatgtgccgtcagctcacttaatgctgatttctgcatcactcagcaaaggtttggagataatattctcctgctattgtgtgttttcctatggattattcctgtggaataatgatgttaacatctccaggagagttgaattccaagcctgaagtgaagattgactgtcattattgaaaatatcttgattatgtaaatttattcaaactttcctctctggcaaagtttgttcccatccttttaaattcattcaatgccttatccttactatcaccatcccaatagaataggctggtaaagctactgcagtattttttaaaaatgagattgagacagggtgaagaggtaaggagattttttaaggaaacagctatgagaggggctgggttcagttgaagtgcccatcagccttgtttttgggctttgctggcagcatccctctgtcttttaatgcttttctgatttcctggagttgccttctgtggaaaaacccttcattgtttggattttctctacactttgtgatctcaaatgggaattacggagcattttgagaccttggagccaatgacagggtcaagaggtgaccttggagtactttggctcctccttatctccaaagtcatcctcaaatactaaccgttctattggtgagaaaatgacagcaatgacatggccaagtagcattttattagtctgatataaagtctctttagaaaatgttgccattttgatctgtatcctatgctgtgagtaacacgattgtgcttgctgtgcaaacacagcttccaaacaattatttgccaaccagcatgccaccaccaagcccctcctgtgtacaaattctggatctgctctaagaagtggcttttaattgacttttggattatggctccctttgagactctaatgaaagctgtggatcctctgctagaaaaagtgcacagatctacatttgacagacagtttatggggtttactttatccctgaaaccagttaaaataaaacaaagcaaaacaacagaaaatccttgtgaacagacccgaacactctctaggaaagaaaacagaggtccagacaataagacgttcatttgggtctgtttcagtaggtatgcaacacaactgggactagactttaagttactaaatattgctacctctgaattttagtgacttgtttttctagtgacatgtagccagaggtgataatcaaaatattgaccaaccactatagcttgggaatactgatttgatgaatcaattgattttctctgtcacctccagcctttgttcaaaaatgcatgttccgtaagattagaaagggcctgataaccagccaaagacttaaccactaggggggatttccaagtacatcagcaggcttatgtggcatgtagggtctgatctgcctcctggccacagcagaaggagcagacatccaagattaaatgtggaacaagatcatcagtgcactgacagtctgaccaccaatgacaagagttcagggatggttccttgagtgatgtgcagtttgaggtttgctgggagatggagcaattgattctggtttcctaggcaagagctttgcattagacaactgagttctgggtatggtttatagtggagatatgcaacatcatcaatcttaataatcaaccatgtggacaatgctgatgggaccagtcattttgcataatctctttcttggcaatataaatccccataagccatatttcccatcttctgtgggtcagcaaatgttaaacctgtgatgggacatagaactcatctaatgcaagtccatggccacccaccctatctgctgattgtatttccattttatagatatggaaacagtcttagagatgaaaagtgatgggct

SEQ ID NO: 33922 - DNA, 1457 bp, Bovine  19866880936171
  misc_feature (1)..(1): n is a, c, g, or t
nctgtgtttcaatgtgtatgacacgtgggtaccacaatgtcgtcttcaataagtggcttccatttatttgcactgttcccattctctaaaagtaatttttaatttacaatatccgatatgattcattaatctagaaaattagtttctgggcaaacatggtctgtgtgtccaaaaattgaaatccaactctttgtgctcttttgttttccttcaaagaaacttttaggtttgcaaatgcagaccaaattaatttagcaaaatgagtgctgccatatttacaacacttcatgtttgaattaattgtcctagagctataagaagtgcagggcaccaaggagaagatgctggattaaaatggaagtgacccgtcagttaacagtgagggcaagcgggggcatctccaccctggagacagcactcgagacacaggtaaaagggcggtgactcattgaacaaagggcttgaaaggtgacatctgggatgagtaatttctagcagtactacagggctcgtacctgagcttttcaaactaatgctttagtgaagaatcaagaagtagcaggagaggacttctgggggtggtccatggttaagaatccacctgccaatgcacaagtttgatccctggtctaggaagatgccataggcaactcggcctgggtaccacaactactaaagcccactcacccctccggtccatgtttcgcaacaggagaagtcaccgcaatgagaaggccttgcaccgcacctagagagtagccaccgctcactgcagctagagaaagcctgcacacagcaacgaagacgcagcagagccacagataaaaaaaaagaagtagtagtagagaggcttttctagccatttaggagtacaaggtaattggctgtagaatccaaactactaatacctaggagacaagagcctggctgccgtccaacttgcctgatctaaactttctcatctgcacaaaggggataacaccaaatttccaaggacagtgatgagatttcaagagaaatctcacttaaaggcattttgtaacacctaacaatccctgtacagtggcattgtccctgagaaataccacagggacagaatgcaactccccatacaccacgtgttggacactattctttcaactaaagttcacatttttctgagtcaaccctacacttaataagccttgctgaactgatcctttgggaacaagaagaggagttgggcaaagaagtaaattatttctcattgatgatagtaatggaaaactaagctcaggacaagttcacaatttctataaattttactaggcagtgggttttatctgaattaatctaaccagtccattctgaaggagatcagccctgggatttctttggaaggaatgatgctaaagctgaaactccagtactttggccacctcatgccaagagttgactcactggaaaagactctgatg

SEQ ID NO: 33923 - DNA, 1126 bp, Bovine  19866880968614
  misc_feature (1)..(1): n is a, c, g, or t
ntctctgtccatggaattctgcaggcaagaatccagagtgaatattcctttctccaggggatcttccccaacccagggatcgaacctgggtttcctgcattgcagacagattctttaccctctgagtcaccaagaaagccaaggtaagtacccccaaaaaagtatggtggacaagaactctattcttttcctgacaatagactgtatccatttgtgaaactcatgagatccataagaatttggtataaaccttaaataatcacatcttgctgaaaacacaaagaggctgaaaagtgagttcagctaaatgctgtggtcactgtggtggtcgtggtgaagagaagttctatctggacaccaccagctggagtgtctcatgccatgtagcctaaaaatacatattttccactttgctcaaagacctcacatgtctcatcccacattaggattttaatctgtagctatcttttcaggaagaggttggatataatctcaaatcaaataaattcagagttttaatgtgactccttagtcaccttgcttcctgatatttttctgtattctgttccctttccactctttaatctagatttttgatctagatctttccctttagtgatcacccttaaaaggagtcctgatatacacaagtgtgtcttaattttcttttaaattcaaagtgatgctcagctttctcggctcccatagtccctcaagttgatgttccctcccccttctcccctgcagttgtctccatctccccatctgatgtaaacctgaggtcaaaccattttgctggtttttccatttggcagtactcatacattccctactgctttattaagcacctctacggcctcaagaaactttccttattcatctgcaataagcccattatttaaagacactgaagaaagaataatttatagacactaccaatgagaataatgtctggtttgagaattatgagttccatcactaatgcctttggcttgatttggctctttcttcatgaacttagcttgcccctgacccatcatgagtaactggatagcaatatgaagacagcttttggaaaattccacctgtttaagatcaacctcgatttgaaatgaacaagtatttt

SEQ ID NO: 33924 - DNA, 1974 bp, Bovine  19866881001635
  misc_feature (1)..(1): n is a, c, g, or t
nttgaagagactaaaaggaagaaaactaccatttaaaacctccacttacttccctaacaatggctttttcctctccttttctttataagcttattaaatattttctctgtttccactgccttgaatccttttcatctcagctttcttatcttccaaagtttccacaggaaagaagagtgtcttcattgtttttcttagaataaataaatcctcctaagtgactcattctcatcacagttagaagcatttcttaagtgcctagtatttgccccaggcacataatatactaagagaattctagaactcagacagctatctcctgcaaccttctggtatttacgggtagaattaaggttgtgtgtgtgtgtgtgtgtgtattcctttcaatttgttaggatgacacaatcatgctcatcccagacagaaagtagaagcttccccctctaagaggctttttgcaaaatcccctcccattttcccaagaaaactcaatccttctcaggattatctcatcctgctgctgatgaagtcatcagctacctgcctagtacaatttttacaggcggttcaaggatgtgctttccccagaataccctcgtccccacccaaacctgcccaaatacaaaaatacctttccaactgagatggcactgacatcccaagaatttccactgtaagagttccagagggccactcttaatgttcggatggtaagatcagaggtcacttgcatgaaagagtcatttacacatatttaacacattttagcacatattaaatgctcagattggtttgcagacatttggcagagaacgactgccgacaaatgacgagcccggagagacttttctggggaggatcagcatcagggacaaggccccagtcttagaagtgaccctgaccccagagcattttgttaggtcacgggtctcaaattatgccttgcaaaatcagttggctgtaactaagactccgtgcctgcagaaacagagctttgtcgttctttgtttctcgttgctcataaaccccccaactggagtaatttctgctgaattcattttaaaaacatccaagtctctgttatttcttctgcttttttgtaatgaacaagatttctttattctgtgtgttatcaaggaatgcttctggctttgtgtcccttaggtgaggcagatctcaccgaaacaatgcccccttgaaggtcccatccgagctcgttagtagaaagtaaggatgcaaaagccagccagcttgtttatcccgtgttccatcttttatcctatttccatctcccttttttcatttccacatttgctcggattcttcgtatgtttcccactgtttctttatttgcctccagagcttaaaatcaaatctgcctgccgtacaagaacgccacagcaacctccctctctgatacatgcagcaaatcacattacgatcacttcagaaagggcctgccaggcttcccagaatgctgtacaaaatcttcctgtgttagacaaaaacatttcaattggaacaaatgcaggacctcaagatccaaatgagttcacatcacaaaaagcagccttcctcttattggaaacaagttacagattttcagctgtcccagtgtaaaatgcccagatccagccctttctcttctttcaagggcagctttattcaggccaggttattgtatgttgtggatcatatttcttcccatgacaggcacataagatatgccctgtatttttagtgtattgacacatatatttctcaaaatgcccaataaaataaatattatcccaatgttacagaagaagaaactaaggctctgatactactctcctgcccctacaaactcccagaggtagtaagaggcggaaccaagtcttgaatgcaggctctgcaccctagaatcaatattcttggtttccctagtggctcagtcaagactctgcctgcaaagcaggagacctggattcaatc

SEQ ID NO: 33925 - DNA, 2279 bp, Bovine  19866881112183
  misc_feature (1)..(1): n is a, c, g, or t
ntattttattaaggcattttacttgggatttggcttctgtaaacatcatagcaaacagaatccagcagtatgttaagagaaaaatcatgacaaagtaaggttcattttaggaccacattaatttttaaatattatgaaatctatatgatttcatttattaatagcaaggggaaaaaaaacaatgtggttgatcatcttgatagatgctgaaaagcatttgataaaaattaacactcatgcccaatacaaaacctctcaataaaatataaataaatagatatgctcataacttttaccatgtatttataatctatggctagcctcatgctcagtggtaaaactctcattaaagtcagaaaaaaatgttcattgtcatagctattacctggtagtatttttttccagacaagctaattctactagaaacagaaataaaatgaatagaggagacaatatcatgatttgcagagtgtgaaatactttgaagccattaaaaggacagtaggttctccagatactgactcataaagatgtctactccatatctgggagaaaatataggatatgaacagtaagtagaatatgatgtcatttttgtaaaagcagagtacatgagcatatgtaagtgggtgaggagcatatgaaacactcttgaattgtattcagcaaaatattaactgtcttgcttctgaccgatgggctaataggaccttctgatttcctgctctgtgccttttggaaattgcttgactttttaaaaataaataaataatttgcccaaagtcaaagccagtttgactttaaatcctacacttttaaccactcctctgttattcttattattagaaaaaaatgtcattgctatctccaaaacacaaatatatgtattacatatatgcttactacccactccagtattcttgcctagagaattccatggacagaggagcccggcaggctacagtccatggggtcacaaagagtcggacacaactgagtgactttcagttttcgtacacatatgtatgaaacatttaaaattatgacataataggatttctaccatgcagtcaataaattatatttattagcctctctaaaccctgcttaccttaaatatgagcagggactatgcttattcagctttgtatcccctagcaacaagcaaatgtccttcacagagtgttaatattaaacagacatattttatacatgtaaatataataaacactaggaaattggattacattgtacaatgaacagtgaactctcttgagaaaccccccctggcctttctttgtgatgagcagccatgctggcctgcagcttctatgtgggccaaggtacaagccctggcagaggtccaaggggccatggattcagagcctggcatccagtagaagcccattgagagatgactttcagcagcagaaagatatgcatttcctctacacagcaatctggcccctgcaaaagcctgaaccaagacttcatctttctgctcactgccatcctacatggaggctgtgaggaggaggttgaacatatggccagcctgtggggtaggtgaacgacgcttatatgacccagcgggtactgagaaacctgaaggccctaggtgagctgtctggaaaacaccagggttcagttttcttcagctagaatacagtgccttgtgtttttccaccgtctggtttctgagctcaaagaacatgaagaagggctcaagctgacatgagcactggctgtggagggaatcagatgttccaacaaatggttccagtcatgtggtcctgcgatggacattgctgaatgtccctgcagatgacctttttgccttggatgggggaagtgccatgggaagacccactgcaggcttcagcgtgtccatgcggggctgctactatgaagcctgtgagggtccggtgccacctgagtggttactcagggattgggcaagtggagggggtctttgcaatgtggtggccttcctagagcttcttccccacccctgctttgtagtatacccaccacccactcatgaccccctcaatctccccttagaacttcatgtggtcctgggcttcctaccttgattggattaaactcttctctccagttagttctcaagtacccaaatctctctttacaagttgcttttcccttttattggatctaggttttggattcttgcccttaaatatattcatctcatctctccctcccaccacctcaaagtttccatgatctaggtctccattttcgcaagaaagagctaa

SEQ ID NO: 33926 - DNA, 1551 bp, Bovine  19866881127550
  misc_feature (1)..(1): n is a, c, g, or t
nttggctctgtggttttcccttctcggcctcatgttcatttctttctgagtaatgttttgggcccagtggaaaagtgcacgatgttttctgctggttgaaatgaggttaaagtaatgaaattctgccaactaaagtttaggagaaaaatgcttagtagttgctgggacacagccagtttttatgaaagcagttgtgtaaccagaaaaggatctcagtggcttctacagcagtggatggtcctcaagaactttggtagacactgggaggtttgaccagtttgaaaactggtcagaaatgaattcccactgggctgtaagctccgtgagggtacagctggtgtcctattttagccaaggcatccctaattcctaggccacaaatcctggaaaaatcaacggaatgagaccaaagaggagaaatctgagtgatacaatagatgctctgatgtccaggatacatcccctctcctccctgtgaattggcagcagctgcatgggcagttgtaggccaccttgtgctggatggtatgcaaggctgggatgtgaatctttctgtattctgcctcaggtcctttttgaggtcataggacttgaatggctatacagggaagactagaagccgggtaatggtaactctcctggggaaatcctcagcccgtgagggctgggaactgttggctaaacgttagtggctaaagtcttctgtcttttaggtggaccccgtgggaggcatcccctacgagtggaagtgattctctgttgctcacagcagcagttctcttggtcatgtactctgattttcttctttctgcatcccatccacccccctccctcattcctgcttcctgagttcctctgccaaataaaactcttgcaccctagtccttggcactcactcggctttggaggaaacccaaactaaggcaggtgtgtaggaggagggcacaagcttttgtttttccaagtgggccctcccatgatttcaggcctattgccattccaccatgacatgctgatggcgtcctaactatagggatgcagagctctgccctgggtctgcctgcctgggttcaccacttacaaatggcaggactgcaggcacagtccttttctctttgtgcttcatttccttttctgtaaaatgaagatgataacagtgtacctaccagggtgatgattataatgtgatgagaacatgtctgtaaagctcttggctccaggctggcacacgctacgtgcctgcccatgctagctgttgttaggatggtcacttctcatgcgaaattttttcactcttctatactcatttctaaacctcattttctatttatattaggaatctattattcctaacatgaaactataagcttaagactggaatctgtggcttttccatctttgtgggctctgctgcactcagcattatcactctcacagagtaggcattcagtcacattataggaaagaaagaaagtccttgctcttatgggcaatgatttgaatagacaccacctattctcagaactggaggtcggaatcactttactgtcc

SEQ ID NO: 33927 - DNA, 1452 bp, Bovine  19866881240920
  misc_feature (1)..(1): n is a, c, g, or t
ncagtatcccaaccacccattcatcctccaggggagtcaccagggggactgaagaatgttgtaatctgagaagggttgcgtctaatgatcaaggaatttcagggcaatctagtgactactcatagttttcctgtatgtatgatttcatgctaagatcttaaattggtcaagaaatttctagggagctggaaagaaaggacagtaccaggtaaataagcagaagagatttttatttctatgcctggtcttagagggtactacgaagcaagtaatcaattccagagattctacactccagacatggaagtgaaaagtgaaagtgttagtcagtcatgtccaactctttgttatcccatggactgtagcccaccaggttcctctgtccatgggattttccaggcaaaaatactggattgggttgccatttccttctccaggggctcttcctgattcaggaatcaggaaacccaagtttcctgcattgcaggcagattctttaccatctgagcccccaaggaattggaagtctatgggataactagagaaactcctcctcattaaaataatgggtattatgtaatgccacttgggaatttttttgtgtgtcttcagtcaaatacactttataaataaaataatggtagtacaataactaatacttgttgaacagctatcatattctaggttttataaatttatttattaataaaaatatagtgaaaaatatgttgtagatagctgtgaaactagcttgtcccttgtcagacattaactgtagagtgggaatttgaacctagattggcctggccaaaactcatatggatttaggaccatatcaccctacattccacaaaacaaagtatccaccattcttctcgatgcatgtttataagaagaaatgtataatgctatacacatgctctcctgtgactctgggtaaagaatggttttaaaagataggttttttccttgcctctatagtgaaccatagccttcagcagttggacttagggtattttaaagacatgaaaagatctggaaaagggaaatcagtcattaattaaagcagtttcctgggcaaggatccacaaggaatgagaagctgggtgcaagccggttgcttttaaatgaccatcccatttatttggctgcagagatactcctgggccaattaatcaattcccctttccttttctattcaaactttgagcagaccttacttcatctaaagtgattgccttgcaagtctgcaaaacatcaggatggcaaagtcacttcttgagcaaagcaaagactaaggctttccttcagatgttcctgaagatggataagaagaagctggggcataattttacccgtgaccagtgatgaaatgctcagccaagtaaattactaagaaaagtcagacaaaagctggaacatcaagggtatgattatttctcatctcttcca

SEQ ID NO: 33928 - DNA, 882 bp, Bovine  19866881544960
  misc_feature (1)..(1): n is a, c, g, or t
natgagagacagaattctgtgagtgaccatctgtccttttgtataagtggctgcctctggcccagggctgtgggtgaatcagagcatgtgatttatcagacatatatttagaaagtaaacgattgccaaaagaaaggagggcgtgaagaaacaatatcacccgtatctgtttctcattataaaataatattgctggtttgcacgctttctagattccttagggcattctattgccactctgggtttgttttctgtttttttttttttttttacatatttagaaggcatttaatagaaatgttgctgcatgggaacaaaaatatttttctcacaaaatgttcccattcaataagttgctgcatatttttgttccatatggtgcttaagctgacagtgtctgtaggcaatgcaattgacaagcatcagagaagtaggcttatacatttaaagtgggtatatgatttcatgtccagagatttttttagacaaaaatctgtgatgtttaatttaaaaaaaaaacataatgttaaagaggagttcaagctaacttcaaaaaaaggactgcagaggaagtaaactcattcattcactttattcattcatcaaatttactgatctttttggggggattcaaagatgaatgaaaccttgtccatggcactgaagaactcaccccctagtggaagagaaagaaggaagacaccaaagggtaataagagtctatgtgggtactctgggaacacagagtagggctcaaagtgatactgatggtggggcaggaggtgaggggaagtcttccctgaaaacgtgacccaaagagggaattcacaaagttactccctcagttccttcaggtctctgctctgtgtaagtaaagccctt

SEQ ID NO: 33929 - DNA, 1004 bp, Bovine  19866881786722
  misc_feature (1)..(1): n is a, c, g, or t
ncatcatatagattcttcccattgctctaagtacatgcataatcccatctttatatttctgtatacaaccaaaggcagctattagaataagaaagtgagggaatgaaacacttcccaaccaaccagcttgaatattataaaaatccaaatcccctgaatattataaaatttgcatgttctctacattctcaagaaagggtgagttcagattataaatagacagaaataatctcattgtatttctcaaagaaataatattttcaaaactctacaactctggcaaaacattggggccctatattaatctacaaatatatctctatcatgagaagtgtactgaaacatgtttcaagtgagaagtgttaaaacttagagcaagaaaaactctcagagttcatttaattcactgaatttttgctttgttttcatgaaacatgttttaagtgagaagtgttaaaacttagagcaagaaaaactctcagagttcatttaattcactgaatttttgctttgttttcaatcattgcagtccaacaatacattaaaacttttcataaaaatagtaataaatattcattaacaggcttcaatcaatcaagcactgtatgagaactgatcctctacgactttatctaatctccacatctaccttatgaaatagatccaattatcacatttacaatcacattgcttgagggtgacaactacgggattcaaatctactctgtctgacaccatggtctgttctcattttgtctccaagtaaaacagtaacataaacatatttcaaaacttcagaaaacaatccaccctaccacaatactttggagcacttgattcttttcttctatgaagctctttccttacctgtatggtaataatgaatattttctacttttcaattaatgttatatcaaatattttctgtgttactatagaaaccccatgataatcacttcccttattggctgcctaacatttcatactgggataactatcatcta

SEQ ID NO: 33930 - DNA, 1140 bp, Bovine  19866880228923
  misc_feature (1)..(1): n is a, c, g, or t
ntggaaggactgatgcagaagctgaaactccaatacttggccacctgatgtgaagaactgactcattggaaaagaccctgatgctgggaaagattgaaggcaggaggagaaggggacaacagaggatgagatggttggatggcatcactgactctatggacatgagttagagtaagctccaggagttggtgatagacagggaagtctggtgtgctgcattcggtctgacataactgagtgactgaactgaactgggctttcatttttgaaactttttgacaaagaagtaatggagagggggccagtcagccagtgtgaaaaactctaatgaggaaactttacactagatattacatgggcaatataaacagtccttagactgtgtgctataaaaagtgtatgttcccttatttcttgttttagcatgtatcagatggtagaagtgcttttaaatctcccctctcctctccccaaactttgtatttcaatagtggaaccaaggatggaatgcagtcaaataatacactggatttaccatgataacatcactttcctgggtccttcaaagcttttaatcacggtgtattgggttatctgtttgtcttgtagttcttggagaacagaggtggtataatgtgggtctacaaggccttcagccttcagatccattttgtttggccctcaaaatgctggcctctgaagcacataaacaaataaaacttcagccaactattttcagataggccccacttctttgaaaaatgaaaattggaagatcatttctgtgtggtaaaataccacctgggaatttattatatttataaaattgaagggagaaagagttctgtttctcttttctaactagagtctccatttctaactagaaaaaaaagactgatgatcatattttcatttttaatttagttcattttcctagatatggttgtaggtgaaaggaaataaagtgtttattatctttgccttgagatcctcgaaaagacattctgtctgagatcatgcaagtatccatgaatgtaagcttgaaatgattataattatgggtttgatcatcacatcttacacatttctcttttcattttgacatctattattgaacacctgtacgaggtcaaaacggta

SEQ ID NO: 33931 - DNA, 1659 bp, Bovine  19866880421345
  misc_feature (1)..(1): n is a, c, g, or t
ntacctatactcattcctagtgtagaaattgtctagcctgtctgtgatccaaacaagttagagcaaaacgacattatattgcacaatggagagtattagtccatgttcaacagcttctgagtgctaacaccaaaggaaaggccacccagcaggctctgtcaaagtatccccttcctgggaacatctgagcacaagaactagcttggagtagccttccatggaaccatagtccatttgcctttttgcttctctctctgtgcagggtcatttatgcgttcatttctgaaatctatgcttaaaattttgagactatctcaaaatgagcaagctttttttttttttttccccagaaaaaccatcatcaatttggcaatggcacaaatcagaatggtttggcaaaagaaaaagtgcttggcctatatttttcctctcaccttatttaatagcccatatattaaaaaaatatgtctgagattctactgggatgccccttctgagttatgcccacccccacagatttctatggtgatatctggataagtgcttcacacatttaaggctttattagccaatgttgtaaataaataaattacctaggataactccacaatatgaaaccaggagattcggctcttatatcttggagaagattagctgtcttatgccttgattataaatgttgccctccgggtgtagggaaagtaggatggaaagacgcaaaagagagaacttgatggtactggggatggctgccaggaactgaacaaggcagatgatgaactttgctttaccgagtaatgctaactgatattaaatttggcccctgaagtggtcttgcctcccaggttcttaatccctccatgttgtgtgtgtgtgtgtgtgtgtgtgtgtgtgtgtgtgtgtgtgtatgcgcgcatttctctcttgtagccaaattttcctgtaacaaactcatacttgtgcaatataaggaggatgctactaaaaaacaaaaattttaagctcctaaattgggcttttaaatcataattaagaggaaacagttggggaagaaaacatccagaattttcagtaaggctggtgaaactatgaggctttccaggatgttatgggtttaaaaagataatgctcaaagtcagattatgtgactctgtgaagaaaataaaattgcagatagaatgtaattatggatgagaaaaataagggcactaatgggcagccgagtgggtggaacatttcttctctgcctcaaccccagtaaccctcagtctactctactctgcctttcttgtttgcgtgactaaaatgccctgaattcagttaagggtaattgagttaaatcagtttcctatccaaataatattaaactaatgatgaattgaaccaaaaaaataaaataagaaactgctttgtaaacctctattttaagcctgagaagcagcccaacgcaatttagtcttctctgccttccctctatgtttgagaaatgaagcagtgttttgcagagcaatgcatttttttcttatgctcatatctatctccttcatgttggcaaaagatcattgaattctgttttcagacatctgaactcttgctgtagtgactgccaagtcctgccacagggtcaagggaactgcaagaaggaacccgggaaggaga

SEQ ID NO: 33932 - DNA, 1630 bp, Bovine  19866880542100
  misc_feature (1)..(1): n is a, c, g, or t
ntagatagtgttgtaacttctactttcctttaatacatattaaaactttgacatattatatattagtgatatggtgaagtgaggatatgttttctttttttttttaatatttagtctttgaggagccactgcttctatatatatgtctggacctgggtcctgcagtcacagttacttttccctgcttttatttcactcccacctcattacttggctccaacaaatgatgatcctcaatgaccaatgagcatagtcttcttatacagtttgttgtatctaaggatgtctggccaaggcagtaagtggggcctgaaatctagccatgtttctctccccaagctgtgtaccttggcatggggtgtgaatgcccgaagaaaggtcacctttctctagttctcataaagactccatctgcttgccaagctgttcaccttcagggctacctctacctagtagggaagtcatttgctcatttgtacaaaggctatggagccatatgggctagcagaggccccgctaatgaagaaactccatactctttgcctcagtgattgtttcatggatgggcccaagctcaaatctggccaatcacaatattcccttgaacttacttcactattagcttgaaatattgcatttaatggctagggttgcaaaactgaaggatgactgcagccatgttcctcatcatttacagggtctatatgcagcattaagcaaacacaatgaggaaagagagctaagagattggaaaaaagagaacaaactaatttgaatccctggttccagccctcactgaaataactaccagcatttgagctacaggagccagtggattcttccttaattaacttgttgcaagttgagtttctgttatgttcaaacaaaagagttctgatatacactggtggtatagtgattagttcagttgttgcaattcattagaaaggatgttgtacataatggaatgctactaacctccccctaataacagtgctccagttactatgtaataacaagcatctgttgcctttcaacctgaacctgtatgtaaaggcaggtgttttcagattaaatgactgagtacagtggcatgaagttagtcaggaaaggatctctgaagacagatgaatgctttttcccaatctcaaagtaaagaaactggattggcaaaagaatgaaatggaagattccttaatttgaggaaagagcaggagaaaaggcacaaagaaacaagttagagatatatattatgactctcttttaagtttcaaaggaatgaatttattagctcactactgaaagtctccatggatagtatggaagcaggattgttctgatttgtatttagatatgattgtctggagtctctcttttctctcctctcagagagggagctgctctttctttgttatttcagcataagtcttaggagtaattattactgaattattatgctgcttaggtcatgctgctgctgctaagtcgcttcagtcgtgtccgactctgtgctaccccatagacggcagcccaccaggccccgccatccctgggtcatagtactaagtaattatgctgcttaagtcataggtccaagcttcactggatctgaatggctaaggtaatgtga

SEQ ID NO: 33933 - DNA, 1691 bp, Bovine  19866880594096
  misc_feature (1)..(1): n is a, c, g, or t
ntgaatggtaatgctgttcctgagatgcaaacacagaggagcaggctggaggagcatgagtgatgaattcagtgcagggatgctgagttgcgtgtttatgagatacagtggagctgtgcagtgctactagatatgccaggcaggagctcaggataaaagtctgtcctgaagacataaacagtgtaaactgtaattgaagccacagaagtagacagtattgcttggggaatttagagaggtggatcttaagcttgataaggttacagaattcttactttcctccaaattaatgcatgtaagcacatactgctgtaaacaaaaagagcaggtcaggagaaaatccttcaaacaccaatttatggaggctgggctgagaaggcttagtcaacatttctctgtctccgcttcttatgcaaatgtccatttttaactcactctaactgcccatctttccagctctcaggtgttttgctgaggttctgtttatagcctgggacaaagaccactggtagacttctgaagtcttttatttggtatagagctgtcctagccatacttcctttcccaagaaaggaccctattcccacccttgcttctagtggcagttgtatcctgtgactacttcgtatccatggaaagtgaatagaaatgatatggaccattcctggccaggacttttaagaaaaactttttttggttcctccaatgtcttattgatccctcctgatggtactgatggtaattctaatctgtgacttggggacaacaaagccacagagtagaaacagtcctactctcaggatccctgtgtgaagagagttcccactaactaggacactcatttgggattgtcacaggagtaagatacaacttccattggtttagacttatatttgtttcttttatagacctttagcccacaccaactaatatactatattatctctgatttaaaaaatttttttcttcattccaaccattcttgctctgtgtcttgaatctaacactcctcgagagaatccagttggctttgtattcatagatcaccgtctgatcaagtattcattctggcacagattttcctgccaatcgcctggtccttcttatgttcagctataggtgactgccttaagtttaatcacagatgcttggaattgattctggctatgataacagggtcaaatgccactgcccatgaaatagtgtctaagctactttttctggccactttcctgagaaaaagaatagccatccgtcccccattttccatggtaaagtcccaacttatgcctcttttttctagtgtaatcattaagactactccccttttactcttgaaagtgttgcagcttggaatataaattacatgagttccctattcagaagaggcacacctcatcacaaatatttctccagtgccaaacaaataaccatgtgcaaactccatttttatgtgcaatactgatattcaaatacttcaaatttaaaacacttcagtatttcttgaacttggtcccctcatttatccaacctcatttttttatgctgtctaatagattcattccttgtcacctagccagtcatcttatcctcttctttggaccttggatatttaatctatccaacatctattttcctttttctagtaatacccaccccctcctttcttgggcaaacacttatcaatgtgt

SEQ ID NO: 33934 - DNA, 1846 bp, Bovine  19866880656491
  misc_feature (1)..(1): n is a, c, g, or t
ntggtaatatacttctacatttctcagcaattttctctaaatgttttatttcagttcagtcgctcagtcatgtctgacttattgcgaccccttgaactgcaacatgccaggcctccctgtccatcacaaacttccggagttcacccaaacttatgtccatcaagtcagtgatgccatccaaccatctcatcttctgttgtccccttctcctcctctcagtctttcccagcatcaaggccttttccaatgagtcaactctttgcatcaggtggccaaagtattggagtttcagcttcagcatcagtccttccaatgaacacccaggactgatctcctttcggatggactggttggatctccttgaagttcaagggactctcaagaatcttctccaactttacccaaaaaggaagtagcatgagtgactttataaaaatgatccttaaaccagtcctttatgtttcactgacaagaaaacatgtcagtgttttcaaggtatgattttagataacatgaaataagtgaaaactctgaaagccaagtcaaaacatcttattccttatgaacttcccctagtcatgactgctcccagcatttgagaagaggtgtaaattaggactacaacccaaagagttaaactcccagtagaaacatccatagatgccgcagcatgtgttgtagaggctggtttgaatcagcactgttagttttaaagaaagataaaaacagagtctttattgtcttgctttggttcaatattaaaagtgaggcattttcttcagcaattttccatctagttgcgacacaacagtactcatcatgggtgatggacaagtagatgattgagtagtttttgaggtaagaactgcttagtagaagagttgtggagcaaaccagccaataaatccatctataaaaaataatggacagtgatgacagagctataagcacagcaggaaacatttttagctccttttcctgtcatgggggtgcactttcctctgcattagcaagggttgggtcaacacctgcaatgtaatgcattttaaatctcaaatgcaagatcaccctgctcaaaagcaaaatgttcaatcagatttcctttcagtttagtggagccattgtgattgtgtggccacctaacaaaacacatgggctggacatcacaagaaaaaaataagccaaattatgacaaattcttaacatctgataataccaacctatttacatatagagataaagtgatctaatccaaatgacagaacctgacttctcccacaactacaaacatagaaaaagtgatcagtgggcacattttattcctaaatcctaatttcagtttcatttccaccataaggtttccaagttattatcaaagacaagtggaaaagagaatgggaatatagacaagtcctggctgaagctcaggctgttgggcaaaattggaaacttgaagagaagcctaaatttatgagatactaaaaatttccagagaaataactcaatctaagagatactaacaaatctcttttccttggagggcagagcaaagagtcattaagatggcccccatggatatatagctaagtggaatatctcataaataaaaaccaaaacttctgctttgctaagaactcaattagacacagaccacataagagttcctggtaccggttttatgtgtgacttcctcaaacagatttaaaacagttttgcattcagtatacagttaatgacagcagagagaaattgattttctcttttaatattgttttaaaaacaggctaacattatttaatttccattgtctgaatcaaacctggaattctggaagtagcttataaac

SEQ ID NO: 33935 - DNA, 1675 bp, Bovine  19866880687742
  misc_feature (1)..(1): n is a, c, g, or t
nctgcatctcttaacatctactgaattggcaagcagtgttttgtttgtttgtttgtttaccacaagcaccaatatctttaatgaattctaaattagaacattataaatatacagtttataaattatgtaaaaagcagtatgcataatgtcatctctttgggtgattgtaagatattccatatattatacctttggtaaaatgctgttgtctcactaatctatttttacaaaacaaagcatcaaaagcataatggcttaaaagaacacctctatttgtccatgattctgtgatttggcaattggattgggttcagctggtagttcttctgctaatctcacctaagccatgtattcatctgcagtcaactggtggctccagaaggacagatggtccaaaatattaatagccctacacattttgggcttctgaggttttgttggttgggtctctctttccagttgtatctcaccctcaaggagcttatctcaggcttgtttaccaggtttcagtatgttctaagatcgttccaacagaatctacaattactcttgaagtctggatccagaaatcaatttcaccactttcaccagcatttcaacagcatcaatttcaccactttctcttggtcaaagaatgtcctcaggggccaactcaaattaaaaaagagtggaaatagactttaccacttgatgaaaaaaagtgctagtagacacattacaaagaaatatgtgtgcagatgtaaaaatgatctgtggccatctcttgcaatggattacagatatttatgaatcatttattatcatttctatgctttctatacttgaatataatgtttaattcaataaattatcaatcctgaagaatacctagtcttataggactgaaaatttaggttatatgtgcatgtgttcccaaagatggggaatatttttgtcttttctcttcccatgtatgcaaagttaaaacaaatctcaaggctgttgttcattattttacctgtaaaaacctgcatattctttctagtgaaatggaaaaaaaaaattccaatgaaggctttaaattaaataaaactacaagttcaggttaaattacatcaattaattaagggtatcacattttctttaatttctaaaatatttgaagtaattccatgatgagaaatgatgtttataaaaggtgagctgtagttgaaacacatataaatgaagagattatgagtatcacttataggcacttataatttaatgacttccaactaattatcatattctgtgcccccagcaaacagcttatcttgctctccaaattgtttcttcctccctgttctttggacggtagtcactggagccacaggctaacagtggaagaatgttttaagaacaacatctgctcgcattgtaaaattagccctgtgttagtggctttttgcttttatttaaactttaattgtgaagaaatgagatgcatgtatagcatttgttgaaggaaatattttcttaaaagagtaaaaattgttagaatgtttatatacattaggttaaataaaatcagagaaccactgaaacatttctttccatgaatgttatacactgaaaagaattaaatcaaatttatatttttttctatgaagataacctatatgaagaaaatatgaattataaatatttctgatat

SEQ ID NO: 33936 - DNA, 2802 bp, Bovine  19866880734909
  misc_feature (1)..(1): n is a, c, g, or t
ntattggtgtttcagcttcagcatcagtccttccagtgaatattctagactgatttcctttaggatggactggttggatctccttgcagtccaagggactctcaagagtcttctccaacgccaaggttcaaaaacaccaattcttcagtgctcagctttctttatagtccaactctcacatctgtacatgactactggaaaaaccatagctttgactagacagacctttgttggtaaagtctgtcactgtttccattgtttccccatctatttgccatgaagtgatgggactggatgccatgatcttagttttctgaatattgagttttaagctagctttttcactctccactttcacttttatcaagaggctctttagttcttcactttctgccataagggtggtgtcatctgcatatctgaggttattgatatttctcctggcaatctgagtccagcttgtgcttcatccagcccagcgtttctcatgatgtactctgcatataagttaaacaaacagggtgacaatatacaaccttgatgtactcctttactgatttggaaccagtctgttgttccatgtccagttctaactgttgcttcttgacctgcatacagatttctcaggaggcaggtcaggtgagaatgcaaaaagataggacactgatggtgtatacctagtacactttaacattctgtttgttttttttttaatttactttattattatgctataagtgtgcctctcattttaaaaacatacagctggattgttaaaaaatgtcagtatttgaattgcaacagataaatttaattcatttatatttactgtgattatcaacatatttacatcttttatttgattttattttgtactttcttattacccagctatcaccatgttttttactcctctttttctttgcaagcagggtttcttctctttcatttattgattttatttctcctttggattgcaaattatacattgtctatttttttagtgcatattcacattttcagtttccatatgtaacaaaggtgaagccacatctcaactctactcctgaacaattttaggaacttggaatgcttaactctgcttttcttccctcacatctttcatgacattaattttctgtattttaattctatgttgttatcctaatatatagactaatcactaacttactgtttcatgtcataaatatgtaccatatattaccaaaattttttctcattattctctgctatatcacagtacaccttttgaggttcaatttccatgttcctaagatgaagcttttagaacatcctttagtgaatgtgatggtaccaaacactgttataattagaaaacaggtttactttgccttcattctttagtaatagtcatggcagagattttttaaattttattttatattggagtacatttgattcacaatgctgtgttagttttaggtgtgcaacaaagtgaatcagttaaagattctggtttcaaaagcagggatgtctctaactggacacacacacaaagttctaatgatttctataagttatgacttttcctgagaacttcaggctccttatggcatgagacaggagggcaacaggaggactcaccattctggcaaggataactgacctgggttatcagcctgatgttacacaagagggacagggaggaaaatgtttggctccagctgattcacttcagtaccttttgctatttccttgctcaactttgacagtaaatggactaaggtagaaaaacagcctaaaaagggtaagctcagatcccacaggaatgagtgtcacagtcacatcatctagtaagccacctagacaaagagaatcagctgaggatagaaaaaaactagaatgtatcaatagtataccttgtacactttgtagtatatagagttggtgaagaacagggaagcctagtgtgctgcagtccatggggtcgcaaagagtcagacatgaccgagcgagtgaactgaactgatcaatagtatagaaggaagatttgtgcataattcgtgatcctgaaaccagctgtaccagtggggctgtagtttgacccattaacctttctcttctgtgttttcctaaggaaaataggtacaccagcatcctagaagatttgctccaaaaatttatacatatgattgtacctaacaggcacatatttcctttcagagctcaaagactaattctcccagctgtcagctcatccttctggctgtatgggccctctgggagctgcccacagctggagagatctggtttgtccaaaataaacacttcttcctgggaaagtctgccttcagttgacaggtcagtatgagactacaaagactcagtcctcttcgttgcaactctgagggttgtctcagcttcagagctcctcaccttggctagctgaggcctttgctgagacagcctccaaacccaggccctcccttggctgttaatcctgcaagcaccccctgatgcactctccatctcagagtctcctttctggggtaatcaacaccttcaagtgcccttcactcttcaaatatgtatgtccctccaggaggaccaacatgttttctgttttacaaaaatttgccttactgatctcttagttcaaaacctctgctaagtgtatctgccttcaatgcttcccatttgttcaatgccaaccctatttacaatgcacaaaatcttaatccacattgacattccactgccttttgtctgcaagactatgctccttatcccactaagtcatatagtttacatttccctgta

SEQ ID NO: 33937 - DNA, 1861 bp, Bovine  19866880800641
  misc_feature (1)..(1): n is a, c, g, or t
ntgtacaatgttgtaacttcgggaagggaggtatcaatctaaaccacaacaaacaataaagataccaagacagaggtgactcataaatggtatatatttgatgtacagtctcagaaaacaagaaacactatttaaaatagcagaagtataaaagctccaaggcagagatgattttaaaaatatctaaaagaggatattgatatgactattttgaggtagtgatgaaagaaaaggatgaatacataagacattagaaaggcatgatgcaatgtagtaattacatgaagcaaagaaaatagtgttatttccatcataattcttatttcatctttataatggttttcaaatttagcgtaactcactagtgttaatagccaatatgtcattggagtatccataataaaatctggttaaaaccccaaaacctgtcttaagaagctatgatcttaggcagcaaagcctagaaggtccactaaagttctattcttcatctctgacatctagactcaggagtgatgaagaaaaccctgttcttacaaaccattcaagttagggtacaaaaataaaggtaaacacatatgtgccactaacattgcacatatattcattcataggtaaaaagacatatccttgccatcaaggatgtcacaattgtgaagaagagacaaacataatggtaaagctttctgaatataagagacacgtactattttagtaatagaactgtgtataaaacatgataacatactcttcctaggaatatttataaaatactacagtggaaaaggtgatttctaatttaaacaaagaataaaattttgcaagatctactgatactgaaagagtatgcgaagcaagataaatgacatgggcaaaggcaggaatacacgcaacatctataatgttagggtaaccataggtattttttttttatcattggagcctgtaaaacaaaccaaaccaaaacaaaacaggagtattcttgcctggagaatcccagggacggtggagcctggcgggctgccatctacggggtcgcacagagtcggacacgactgaagcgacttagcagtagcagcagcagtgctaagaagtagaagagaggcaaatcattagttatagctttgttctgttggacatggagaaccactgaagtgttgaacctaggaagaaacataatcagattactctgcctgcattaaagaaaacagactaaatatagtctagtctagaggcaggaaattcaggaggccattgcaagaatccaagtgtaagatgaatgagggattggatcaaggcataatggtaggtatagagaggaaaatatgtatctgagagatttttaggaaaaaagatttacaagacttgcttaatttactactactaataatgaggatggtaatgatcataacaatcattgttgttcattcactaagtcatgccctactgtttgcaactatatggtctgcaccacatcaggctcctctgtcctctactatctcccagggtttgttcaaattcatttccaataggtcagtgatgctatccaaccaccccatcctctgccattcccttctcctttcgccttcaatctttttcagcattggtcttttctaatgagttggctctttccatcaagcagccaaaatattggagcttcagctttagcatccatccttccaatgaatagttagtgctgatttcctttaagattaactggtttgatctcctttcaacccaaggtacgctcaagagtcttctcccaaattgaggcacaatttgaaagcctcaattctttggtggtcagtcttctttaaagtccaactctcacatctgtacacgactactggaaaaaccatag

SEQ ID NO: 33938 - DNA, 952 bp, Bovine  19866880862109
  misc_feature (1)..(1): n is a, c, g, or t
ntctcttttaaaaatatcatctagctattttctcttcattagtttttatagatattgtttgtttattaattcttatgttaaaattaaaaatttacagctacctgtgaattttggggtatggccaataatttagaatccaatcactaggaaaagctgcagcatctgatagtgatctggtctcagatttgaggagataattctatccaaaattctttttctgcattaggattttaaagtaaccccttcaaaccaaaatgtctatgttctattttgagagcttgaaactaaccacacccatgcttagactgtattcttagaccatatgtaactccctctcttccttctgctctttgttgatacctggtattatttgtgcatattcctgaatcttcttaaaagtatagaaaatatttcttatcctacccaattgctagcatagtattttgtatgaagtagatgctgaatccatttgattaaatacattacgggcaatttgtgaaatgaatagaattaacattacactatttctactaaaatttataatgcttcagcatgttgccaaatggccacgtctattcttcattgatttcctgtcaataattaaacacatattttattgttccattttacttaattgttcagaatttcccatttcagccataatttattacttgttctatgttatttagtcctgctttctgattctaaatgaccacaatatcattttacagatataattcatattagatagaaagcttaatatagcttctcaacatttgatcacttcataatgtcatgtttttggattaatggtagactgtatcctatttcactaagttaaaatgaggatctaataaaaattatagtgtctagtaagtataattttattaaaataattgagagaatatatatctagaagtcacattccccttaatggtcactgtaggaatgt

SEQ ID NO: 33939 - DNA, 1665 bp, Bovine  19866880905815
  misc_feature (1)..(1): n is a, c, g, or t
ntacttatactaaaaaaaaagttcccatacaagaagaaaaattaactatgtgaggtgattgatgccagtgaatttactgtgataaacattttgcaatatatacatgtatcaaagtatgttgtgcatattggcttaatataatgttaaatgtcattacctcagttaagacagggaaaaaaaagtctttgacatactaagcccatcagtggatctccttgaaattaaagatcgtaacttttcatttctgaatatctcttttaatcaataaactcctctagaatacttcttttccttctgagtgacctgttatccctcttaacccaagtctcagtttatagctggagaaggaaatggcagcccactccagtattcttgcctggagaatcctgtggacagaggagcctggtgggctgctgtccatagggtcgcacagagttggacacaactgaagtgacttagcatgcatgcatgcatgccttggagaagtaaatggcaacccactccagtgtttttgcctggagaatcccagggatggggggcctggtgggctgctgtctatggggttgcacaaagtcgggcacgattgaaataatgtagcagcggcagcagcagtttacagcgttacatctagattggagttgaagctggagatttccctgaaattatatatttcatcagagttataatggttataaatagaaacagaagcaaaatcattgaaaaatgtaacagaacccaagtaaagttttgacttgtagtccattctaatgtgtagaagagctaaacttggagaaacttttcatttcttattatgtgaaatagttactaggtctcatatagatatcacagaactacaatgaagacacatgaaagccaagaatccaatgaatagtccctagtcatgcccagctataataaaaactatggttttccctcctgaaggattattctgggtcttttgcaaatttaaaaagtgctcagtatagtgtgtgcctcttcatttgtgctccataaatattatgtgtcattaaacttattattgggtgtctgtagtatgtcatcaaatgctttatctgaacatatgataataattcttgaatcattgttctgagttactcagtttcaaacacagataacctcagtcaaatctttatatgagccatcatcctataacagaaagtcaccctacatattttgccttaaagttaatagaaaatggagaaggaaatggcaacttcctccagtattctcgcctggaggattccatggacagaggagccaggtgggctacagtccatgggtttgcaaagaatcggaaatgacttagcgactaaacaacaccctatccattttgccttaaagttactagaaaaagtcaccttcttgaaagataattcttgagctcaactttattcagtgtttccatctggatctatactattttatttgcctccttaagacttatatgctatgataagcaaaccatgaggtaaatttaaatttaataattatgctctattttctttaaaaagcaaaacatgtacacatgtatacctgtggcagattcattttgatatttggcaaaactaatacaattatgtaaagtttaaaaataaaataaaattagaaaaaaaaataaataaaaagcaaaacataacttgttta

SEQ ID NO: 33940 - DNA, 1686 bp, Bovine  19866880906004
  misc_feature (1)..(1): n is a, c, g, or t
ncctgccctgtgcccacgtgtctattctctaccagtgagtctctaaattattagagccaccatggagaagagtactgaggttcctttaaaaaaactaaaaagagaactaccatatgctccagcaatcccactgctgggcatatcccttgagaaaatcttaattcagaaactatagatgtttttttaaacttcatgtttagactaaactttaccaaaacagaacattttctttttgactgttacatctctagccttcagaacagtacccagaacacagcagttattaaaagctgaaatatgtgctgtaattaaaataaatagtattctctggtaagacaaaaaagtaaaaagcataaagagatgttatagtttctgagtaagtattacacatttaaaagtatacagtgtaagtttgtattaaaatcatattgacctttaattggtgactttttatcccttctttaattaaaaaattggctatcacattttaatcaatactctatcatatccatggagaatgctataaccaatataatatttttacaaggcatttttgcctgcttctttgaaatcagacctctaaatatatgatcttaacaaaatttatagcccgattatgatccgatttagaaactaaaatatacagttttatgtttctaacacaagcttattgagttagaaagattaatatgatgagagaaaagctcccaaaattttagggacagtggttctgcatttgcaggttattataataatcaaaatatggtaaatgccagttgcttcttatgtgcttaatctgatgatatattcatgttactatgatgtctttatgaagctaagtactgagtatcagattaaatgtcttagcaggctcaaaaaccaaagtcagaacccttaatttaagtttgaattaatccaggttgccatttgcgtgctttttgataatagtccacccaaaatgacatgagtatagagatttttatctcaaaatgatatccctgccagcaccaccaactgttgaatgttaaatatgagattaggcaggtgcagagatttttagttacctacaaaaagcagtatgtagacacccaagccaaacagctcatacactaacaaaaatcaacatccaaaccatctgcccatggagcaaacatgccagtcatttttccatttgactggcagtatttctagaaatggatgattttaaacattatttctgacccagaaaaaaaaaaaaaaaaaaacaaaacaacccaccaccaccaccaccagcaccaccacagagctttagttttatttacctggcaattgagctgattctaggcaaagttatgaggttaaaaaaaagtcttcaggttgtggcccttgctctttcatttgcctgcctccccattaccagtttatacttacatgctcatcctagcatttattaactcttgctggctgcctaccagtgactaggatgagctgatgcttacatctgatttatttcctcttaggcaagacatgttttttaggactttacttataggtgattacctgtagtaattaaatcagatctaatcaattcttgatgattagactacctattaagttataattcctaggttaaaaatgacttatctttataaaatatgcttcctcctccccattaaaaatctttaaagactaagttaaattcttaaa

SEQ ID NO: 33941 - DNA, 1597 bp, Bovine  19866880964026
  misc_feature (1)..(1): n is a, c, g, or t
ntatttgtaagaagttacatcccccatcttccttatcaagaaactgagaaatattttgatcaaatacaaagcgttatatatcatacatagaaaaagatactgtttaaaactgtcatttatatgtgaaaagtacaaggagatttacttctctctcttctctctctcttctctttcaagtgtaaatgttttattcttgcaaggggaaaatattgcaataattgatggtggttgcgacacttgctattttatatacaaaaataattagtaaatttcaaatagggaagtagatagtttatatgaatattaaacagtgtatttgctagaaaagtttaagaaggcctctttcctttttgggactgacagacattacatgatagtagaacttaaatgtagagatgtttagaactcataatattaaagaaaataacctttaaaaactgtatttagtttttaaccatgtaattccatttaagacacaagtctctcaggaggagtctcacttgggaattcttcagttttcattaaaataagttaaaataattcagattgtcaactttgacaccttaaaattacataaaaagagaaaatgctaaaaccatgtatatcttctccctccataattttacctatttttcataaaataatacccattaaagttttccaatctttcttttgtcttaaaatgggtgcttaaaactaattttacacctcaaggatgtttaaaataataaagcagttactaaagcaacagaagtttttctaagccagcactttttaaatataacttccaataaacaggaatataaaagaaacactacttttacagggtgaatactattatcacctttttcccaagtaaattataatttttttttacattttattgacagcgctactcaaaatgacatatatttcagattcatgcttattaagttcaagctacttcataagagtcaattatgagaaaaccagtgttttccaggagacaaaatagtctatcttacaagattttaagaccgttgatacaggaggtagccagaaggtggtctattgcagtctttagggggaaaatatgaatctgggcaagtcaggactagtctaagaccaccaagagtagttcactggtggtcctctttacataaaaatcaaggactattcctgatgtataatcactgtacaaactgatatggatatacgaggtccaacattcttaaccaatattgaggaaataatttaatagctctctccataaaatatgtggtgagctgagagctcactctgaaggaagagagtgtttagggtaccctagcttttttaagcaactttgaacataggtggcattactttatacaagtggctattaatttataagatccattaatatttctatcttccaacttctagaacaaagaaagatgctatggaagaaaaagaaagatcaaggcaaataacaaaatttgggactctgaaaatctttgggtgaaaagatatattattttgtagttatacctcctgttctttaagagaactattgaacggaacagaacaaggaatatcaaggctctaggaagactaggtcaacatcaagtcagaatcg

SEQ ID NO: 33942 - DNA, 3577 bp, Bovine  19866880982327
  misc_feature (1)..(1): n is a, c, g, or t
nctgaaatctatttatatgcaattagctatccttattagtatgagaagaaacttgtgcataaagggagaaataaattatcactagaagccattaatgaaatctatttcaaaacataacattttacaagagtcctcattcacgtaatatttgtttaagccttgaggggaaatggtgagttctacgcttaggtgaaacccaatactacattatttctcatgccggtgggttttataaaattcatctatcctcttcttagaaatgactagataattttaactccaatgagtctttttagggaaccttatcactgaaataagggtcctatgtatttgtcacataattgccagacttcttaggagaatttatttttactcttaacaatataagagtattaacagggaataactgttattccctgaggtttacaaacattaacattcagttttatactctaatagcaataacatagaaataaatgagctttaataaggaacataagtcttactgcaataagttgaacttctatggaaaagactaaaataagcaacaatcaataatcaatagagactataaattaatttcataagctctgcagattttctctttgggtttctcattttgttcttgagctcataaattccttggttagtccatatctgagtctccatcagttttaaacactgcagatattcttccctctctcatctgcttaactttgccttggctactcaatattgaactgaaatatttagtttttgatatattcaagctcataccatttttttttttttttgcctttggttctttaaagtttttattaagaaatctttctgcacttttttaggttgcagtggtgttcccagtattttcttctactaactttgaagtttcagcattttatgtctttaattcacctggattccatcactgaatgtagtattttgtctgcccattttcctagtgtgtgctactaaaattttcctttatccattgatttgtgatggcaagtttataataaattgtcttcatatgtacatagatctatctctgagctttttctttgtttccttattcatttatcttacttattgccaaaaccacaatgtttttattaatatagttctataatacatctcaataaataatatagggatttctcctattcctttactcttttttaaaattattcatgtacctttactttttacatacattttagtgtgtttatcaatgtcttccaaaattcatactagactttacatttgtaaattacagtggggttacatttataaattaaaagaggaaaaattaatatcttcattatagaaggaaatcctattcaagggactagaattggctcttcatttattcagaccaatatgtctgtccattgttagaattttaaaattctatttatggaaaactggccttcttagttaattcctagaaattttattccttttaatatatgaccactgctgatacagagaaatattactcatcattacaccattcttatatctagcaagtgtgcttaattttattagttctaagaaaatagcaacccactccagtgttcttgcctggagaatcccagggacgggggagcctggtgggctgctgtctatggggtcacagagttagacacgactgaagcgacgcagcagcagcagcagcttcttgatttaaaaaaattttttgcaacaatgctataatctgaaactgaagactgttttctcacttttccttcaatactgccatttcctctgcattcttaggtattctatccttaggtaatagtgtatggactacctactttattaagaaggtatggtaatagtggatagctctgtcttcctgcgtttaagaataatatttagtataagttttaggtttattatatataggcttccctggtggctcagactgtaaagaatctgcctgcaatgcaggagacccacgtttgatccctgagtctggaagatctactggagaagggaatcgcaacccactccagtattcttgcctgaaaaattccatggacagaggagcctggcaggctacagtatatggggttgcaaagagttggacatgactgagccactaatacttttaagatactgcttccgcagctctttattaaagtactttttaaacagtattgtacagaaaaatgagaacatcttagactgcactacaaccggaactgctcttatctttgctcctgttaatttacctttgcccttggatgactaagtaatttaacatgcagtgttcttctggccatcaccctctatgatccttgtgctggcatttcagagacaagaccacatagaattggaatgaggcaggacagtaggaagaagctggctggcctcctcatccatcctaaagcaaacctcactcttcaacaaactcccgcctctgtcaaacaagacagagttgcacatcagatctgttgtacaaagagagaagagaatagtacctcttctattggtatacccaaagagtactgaaatagagaaagaatcttcttttaaatatgtgaacagataccaaagatcatttggaatatatgaagagtttatttcacatataaagtgttctctggtcaaataaatttggggaaagttggattaagaaagattaaaaccgatttatttattgcagatcataggagagtctgtgatattctaactcagacataacgaaggatcaacacaatgtgtgcgtctcctatcaagcttcatcacatactccccttttgtcccttgatcttatagcatcaatatttatggaacatactttagcaaattttaatttccaaataaccaacttagttacccaatttctagtgtcacttttcaatatactgaattctgaaactgccatttaaaatttagccatggtgctggttagaaagcacagatgataggagagacaaaattacaataaagacatttatccactgatattaaaaaactcaaagtaaattatcattaaatagttcacatttttaaaagccatttacataatatttagttttgaatgttatggaactgtcctcctcagtctgcataatcagtctttagcaatgcatgctattatctgacagacaatagctttgtcagtttcagcatggagtatcttgagataaacataaagtacgaaccaaagatttacatcaacagtgaatggtattctctaataattgtccacagctgcaagaaatttattcatttttattcttttcaacctctctatcctctaatttaaaaacatatcttagaagcatagtggctatagtcagaaatttgtacaataaaattattatatggcacagtaaaacaaatatgggtattcagagaaatgaaataatttgaaggcatgaagtttatttataaatgttggtttaaaaaccttccattccattgatgacatttttacttttattattattttaaaaatttcatgggaggccaaagaaagtcacttaaatagaaattgtttcattttaggttaaacaaatttagtaatgtagaagtatttttctatttgatgtatttacttcctttt

SEQ ID NO: 33943 - DNA, 750 bp, Bovine  19866880995910
  misc_feature (1)..(1): n is a, c, g, or t
ntacttatgtaaagtgaactttgttttaatttatagttaacttggcagactgtatttttacatggatataacaaatgtggaagctttcccataggggtgcattatatatttctttttagaagacaaactaatccgctgaaataaaaattttcacagcataacagtgagaacagtagctgtctaattaaatctccccctaggtgacagatatcagatgaaaacattgaggttggctccagataacatctagtccactctttctctaattttcatttctcttactttaaacaaagagggaagtgggagcacttatttgtggaagtttaaagagagctgtaaaagtggccactagtaacaaatgaaatatactccatagaatgaagtagaatgtatagaaacagcaagtgcctgctgtttcaatattcaaatatgttaatagactgaaaccaagcaaaaatatattgcgttggccaaaaagttccttccatgttttagtaaaagacacatttttcattttcatcaagaactttattgaacaatgcattggccattttatttcactatcttctgccatttttaaggcaacttcataattccatcttcccaaaacttatctttttgaataaagaactcttctagggcttttacagtcttccagggaattggcggggtttttttttttttttccatagagactgttataaatctaaataaagaaaatggaaggtgcaataccagcttcccatgggg

SEQ ID NO: 33944 - DNA, 759 bp, Bovine  19866881016733
  misc_feature (1)..(1): n is a, c, g, or t
ntttcttgggagataggtttcagaatgaaaatagttaatgttctggtttctgagcatctcccagtaatttatgttgtccagacagatttacagagttctttctcccggttgtgacccctgctcacacaaaataaaatgaggaaaattcaagtttaaaatattacaaaaagaaaagtaacttttaaaaattttcatctctacataaaaaaaaataatttaatataatgaatgcctagtaatgttaatcaacttcctgaaaatcatcaggctaaaataattattttccctatattatcattctggccttcttgtgactgaaaccctacaaataaatgatgtggcatttccttcattaaaatgactttttttttttttttttttaccatttctgtgaaacatacattaagttgttttggaagtcaccagtaataaccttgccctttagacctcagcttgcagagataatgagttggggtttgctgaaaatttcatctttgctttaggtcagggtattgaatgacccaccccagtaaaacatactggtatttctttattctaatcacaattgggaagtaaaatgtcattagctgactgactggagaactctagatggttaattgaagtataattcatcaattggaaagctttgttgcttttctagatctttcaagtcaggcagaacagaatagtcagaaaaagttcccagcagttcttccgtaggaagctcatttagcccttaataaatgctatttctataaa

SEQ ID NO: 33945 - DNA, 2236 bp, Bovine  19866881104678
  misc_feature (1)..(1): n is a, c, g, or t
ntttttaccctaacctaatgttttattgttaccttccagattatgcagtatatttcatataaccaaggcagtgcagtaattctctggtttaagctttttcatgcaacaaagcttacttttttttttttcttttttttgttctagcagccaggaaacatttgactgaaaaacaaatcacaatcttttgagactaggtgcatgctgtgtaattttgagttcagcatgtgtcttggggaggtgtgtttaataatttttttttcctgaggcagttttattttgtctgcctggagatacaaagacattctgttcaactgttaaagctctgtattagtataagcaacagctttaaaatcaagaaaaaaattgcaaattatttttagatttctgtttacaatatattctgattgagaacactttcctccttttggggcatacaagtagggtttggaagacattttcatatttagggtaataaaagtagaaaatgacagtactgaaaaaaattgcctttataaatatttgtcatgtataaaacacatttggtccctttctgattttttaacatatatatatgtaaatcattttcaagtatttatttaatgtgttcatgaagtcttcagagagaatacaaaatagttctcttgtctcttaagagtgaaacttaaaaaaagaccttgcaagtattcaggctcatgtggacaatagctacttattgatataaattacttcatctttttttttaaccaaactcctcagatagaattcaatgaaatttgaaattttgttccttatattgttcccttggttttttttttttttttgtcctaaacaacttttttctcaaacatttaatgtatatagctttattgctgggagtgagtttctttgaacattgtaaatacaaaaaatatatagtttttacctacatttacattgtttttgaaatataaattattctcttgaaactgactccatttctgtcactccaaggaatgagataggattgtgtatcaggttttacgccatagtttagaactaaaaaaaaaaaaaaaaatgctggcagaaagtgtagagtctgcccttctaggtgaaaacacagtacagttgtaaaagatgtcctatttccctgcacagaggcagaggtgctgccacagtgcctaacacactctaacaacgtattagaatgctttagtaagacatgtacaaagtttcagataaataacatcaaatgtgacttcagttacataacaaatcactgtccataggcattagtttctataaaaatcccccaggcagtaatgtgttaacagacataaacagaaaaatcaacagtaacacaataatagtagggtacttgaatactccatttacatcattgggcagattatccagatagaaaatcaataaggaaacacaagtcttcagtgacacattagaccaaataaatttaataatatataaaacattcaacctgaaagattcagactatgtgcacattcttttcatgtacacatggaacattctctgagatagattacattctagaccacaaaacaagcctcaatatgtcaagtatctcttctgaacacaatgttgtaagactagaaattaactgtaaggataaaactgcaaacacacaaatatatggaggctaaaaagtatgctactaaaccaccaatggatcactgaataaataagataggaatacaaaaaatatctagatacaaaaatgattgtccaaaacctatgggacacaggaaaagcaattctaagagggaagtttctagcaatacaagattacctctgaaaacaatagaaaaaaaaaatcaaataaacctaacttatccctaaagcaactagagaaaggagacaaaacccaaagttagtagaaggtaagaagtcataaagatcagagcagaaataaatgaaattgactaaaaaagatagaaaagaaactaaaatctgattctttgaaaagataaaattgataaaatatttagccagactcaagaaaaaaaggagagggtctaaatcaatcaatcagaaatgaaaaaggagaacttataactgaaatcacggaaacacaaatgattttaagacactactacaaaccgcaatatgccaatagaatggacaaccaggaagaaatgggcaaactcttggaaaggtgcagacagaaccaggaaaaaacagaaaatataaatgggccaattaaaagtactaaaattgaatttgt

SEQ ID NO: 33946 - DNA, 2992 bp, Bovine  19866881125032
  misc_feature (1)..(1): n is a, c, g, or t
nctggagtgggttgccatttccttctccgtgcatgaaagtgaaaagaggtagtgaagtcgctcagtcgtgtccgactcatagtaaccccatagactgcagcccaccaggctcctccgtccatgggattttccaggcaagagtactggagtggagtaccattgccttctccaatatgtatttactacatataatattatgtgaaacagctaaaaaaaaaatacctctctgcttcttctctgtccctttacctatcaaccacatatctgctgctgctgctgctgctaagtcgcttcagtcgtgtctgactctgtgcgaccccatagatggcagcccaccaggctcccctgtccctgggattctccaggcaagaacactggagtgggttgccatttccttctgcaatgcatgaaagtgaaaagtgaaagtgaactcgcttagtcgtgtccaactctatgcaaccccatggactgcagcctaccaggctcctccatccatgggattttccatgcaagagtactggagtggggtgccatcgccttctctgaaccacatatctaaatctccccaaaataaaatagtaatataatgtattttatttcaattggaattggagctactcatccagtgaagggctgtgaatttcaaaaactgttattctccaaaaggaaaaaagaaaattgttcttattagatttctatcttaaagacaaaaggaaacttatagtgaaattacctcttaagaatcacacatataaactcctcactgtaaaagacaaattcacaaaacaagtacacacaaagtctttggcatgcagtttataaagttttatggctttgtccttattcttagaaggtaactttgatgcctttagcaaatattagtggtctggtcccattaggatgtgatggcaagacaacagaattaaatttcaatctataaagcagaatatttttattttattagcaggtaaattctactaatggaatacattcagtcttctaaacatggaaagatatttcatttcatttaaaagattgcagtaagagttaatgagaaagcataattatctgatcctgtgtttatattcttttccttttatcttcattggtagcttctcacatcttattcttcaggatagatgctaatttgcctaacttttattataacccaaatacaccataaataaacagagtatacaataaggagagctgtttattcctttctctaagtcattcagtttccttctgttacaggcagcaaagtcaagccaaataagtcttgggatgtactatgaattcatcacacaaagcacacattaaggcttataagctagaactgtattaacattttagtcactaaacctgcttaattaaatgcaattgtattttcctcacattatagccattgcgcactaaccacattgcctttcctgtcctagaaaggaaaccttcattccagtgtaagtttagaatttcaaacattatctttgagatgaattagatcatcttcctttaccaaggaaagaaataaggaatatcagtatgtttatttggtagtagtgccagactaaaatttgatacaagatattgagggactttctataaatcacttaatgaataaattaccatgtaaatactactgtctgtcagttttgtattattttcctgtaaagtgaaagatatactcaggaatagtcaagtcaaactagtcatacaagaaatatagttttaataattagacaataaaaatgtgaatttgcaaatttaagtactttagatttcactaggatctaggtcaggctattacatatgtatttaatatgcagacattgtacattggagaaatacaaaggtaattcagaaatgcaattaaatgcaaaataagaactgaaacatacatataaattgcattttatggtattagaggaaggaaagaactatcttcttcctgtagatctaaaaagacatcattgaaggagtaatacattacctacacttttgaggatggttacaatttgtgcaggaagagaaaatgttagttaagatttaaggaaccccataagctgtgacacagacataagaaggagaaaggagtctgattgaatttaacagaagtaaaaacttcaagatgggaagtactagaaagaaattttttaaaaagtagttggaaggaaatcattaaacgtcagacagagtctaaactctttttgtagaggataaggagccgttagaggtttttgaatagtgaacagaaggggtactgagcctatatctttcatttcacatgttgtacattttaacctcttttcaaatctgtgctgatcaatcataatttctcataatcatggtcaaaaccacaatatgggcttgaaccagcctttcagttagctctctttagcctagataatacatttaggacaggaatatgattgaagagtagaccttgacagctgtgtccttaaccagtatctcctgatctatgctggcaaaagtgaagtgttatatatgcattcaagactaaagggttctatagcttatttgacggtgatggagcatggctacatggtacagtgtgcttaaggcaacttttagcaatacaattcttggctttagtatgaggagctatttcttcagtggactatcagttgtcagtcttgtttcctttaaaaaaatggtaattatattattgctctgaataaggcagaaacacagttatatcagtacttattatattactattcaggttgtctttatatcctggaaatatatcaattgtgtgcaatacaaattattctatttctctgacaggacaggtcataaatgaaacatactgctattcacagtgtgcactggttgcttacagttccatttgtggaaaaaagtatgcctctctctgtgacaacttcacagatttattcaggaagcactttagttcaagtggaaaagttgcaggcacgcccaccaggattttaggatctcctttcattgtacg

SEQ ID NO: 33947 - DNA, 862 bp, Bovine  19866881150963
  misc_feature (1)..(1): n is a, c, g, or t
nctctttcactaagcttcaatcatcaaacccccacttggaagtctagtgggcatttcaaaatttacatatccaaagccaaacttctggcttgactcatctcttcctcaccttcatgtaatcggtcagaaacccctattgaccctcctttcagaatatatatgaatttcaactgctctaaaacttctggcactaccactgtcatcaacttttctctgaatgatggatgtaacttcctaacgggtctccttgcgtgtctgcttgctccttctagcatttattctcaagactgtagtcagactgtgctaattaaaatataaattagactaaatctcccatctgttcaaaacactccatgctttacttttcattctatgtaaaagcgaaaatacttaacttagagtgatataaggtcctatgcaatatacctgcctctagctccaacccaactgctcttttttctcatcccctactaacctccaccgggttcactccatgtgagtggcactgtctttctggctgttcctcaggcctgcctttgtacctgctatctctgatgccttgaatctcaacatcacctgtccagtggttcattctcaattccttccagtctttcctcatttatcaccttctcacagaggacttccctgattactgtattaattgggaacccttctcccccaaggacttctccatgtctcttctttaatgtttaatcacattttaatacgctatagacatatttgagttttgattttaataactctctaaataatgtaaacttcataaaactaaatatttttatctgatttggttactgccatttcttcagtacctggaagcagtactgaatagatcctcaag

SEQ ID NO: 33948 - DNA, 1002 bp, Bovine  19866881155379
  misc_feature (1)..(1): n is a, c, g, or t
natattaaaatgtgaaaaatgtgtttcttagaagtaataaaatacagtaattcatacgaagtactaaatacagtgcctgacacacatatttaataaaatattagagtagtagtattgaaagataaaaaacacacgttggatgtatatttgattttcctgtctgtaaactgtaaactttagtttggtatgtatgtgaaaaatctaggtttgtcaaccagaaccatgtagtttaagttattcactctggcatagctttgtttttgagttgctgagatggttggtagaaaagagacccatgcatgccatttgtcatccagcttataaaggagattttaaattgtcttgttaaacctcaacaggttcaatatcttattgataatcctgccagaatcagggcgatatcccttaatacgaagtcctcaaagaatagcgttttcctgagtatactacagactgtgtagaaaacaaaattgatgtatgtataaataactctgtcctttaaacattttgttatgaaatataaaaaaggaaagccattttaaaaaacatttggctaattacagaatgtctgtcagtatgtctatgaaaaaacccttcaagatgctttatattatgctctatttgctatcctatataaagtttcaaaaatgcacaactctccagttcagtgcattaatttagctcacgtaggttaacatcctagtttaaataaatgtgttagcagagaaaaattaccttctaatttcacttttataaaaattttgctgcactagatgtcatactaaaatattttttatgtttttagaattctgaactgaacgggcctatgcaatgaatctcgaagggatgaaactttaacctctacaatatccacatactgtgtgcatgtagagataaagagaatgatctttctttttgtaaagataccagcactatggttatctttggccccaccctaatgacttcatttaatcttggttcctaatgcttctatctccaaat

SEQ ID NO: 33949 - DNA, 798 bp, Bovine  19866881189291
  misc_feature (1)..(1): n is a, c, g, or t
nctataagttaaagcgactccaagtgcctcctgaggaaatttgggaccaacccttcccaacaggcattttctaagtagaaatggggtatcattatcccagctccttcaaaggcccctcctctttccttagaaatgctggtctactcccaggccacagaacaataaagtgtgcaaccctgatcttcatcaataacacaaagcacttgcattccaagcatttgttagggaatccaactacaaattactgctgctcagtagccatcaaaacttcagttaagagaataatatctggaaaaatttctgaagtgtaactgaatccacataaaggaatcattaaaatcaacccatgggttagggctgaaaaacagagaaatgcacacccagacaaccaaacattgtcctccacagaaatatttctagtcaattatgctttccccttggcattgtaccctgggcctgcgctgcaggactcagtaataaacagttccataaaactactttgatgtagttactgcaacaatttcttgaggatactgttcactgtgtcacagtatccctttttatgaggactcaaaggagaagtttgtctctggattcagtgccaggaatcactgctgcttctaggcaacaggtgagcttcttttttattggcactaggcaacatgtttcctctaatgccctctttcctttgactgcttcagaactcaagagtcaggtgtgtggctggctgcaagcaagttagatgcctttatggcattctgaatgatctcatatttttttctttgctttccttctccc

SEQ ID NO: 33950 - DNA, 703 bp, Bovine  19866881217492
  misc_feature (1)..(1): n is a, c, g, or t
natatcatttcctatgtttgatgaatatcccaggcaaaacctgataatgctttatttttaaaaaatattttattaaaatagatattttgtcttgggtttcaaattgtcttgccttctgggtatagataaagctgccactgaatttgattttgtgtattgtgcttaaaaggaaacaaacacacagttttaaaatttcagccaggatatatgtaaagaaggaagtgaattacgcctgcaaagagtagaggagttaaacagtctcaaattgatgcattaaaattaacttcatctagtatcacaatcagggcccagggaaaatctatggtatctactctgtgggcaagaaagagctgtgtcatactttaaaggaagatcattgatcctgtatttttctcaatcttgaaacacatattaaagtacaaaaaggagaaaaggaagctggtctgattatttcccctgagatagggagtagaaaggtctggacctaataggcaggtcattttggaaaagctatgactatatcaatttcaaagtagtatgaatggatgctcaaccttgagtagcttgagcaaaacactgcagaacttgtggatgcccagagagcacacagagaagacaaaatgagcaaggcttttcaatacaggtagctcatacatttccccttaggtttgtttttcttttctctgcagctgaaggctgaaag

SEQ ID NO: 33951 - DNA, 1423 bp, Bovine  19866881280776
  misc_feature (1)..(1): n is a, c, g, or t
ntttgcctctaaatgagtataggaattttttaaaaaatcaagtcaggtaatctcttcattttttaagcttcagttcagaattttccacagtttattgtgatccacacaatcaaaggctttggcatagtcaataaaggagaaatagatgtttttctggaactcttttgctttttcgatgatccagcagatgtttttaagcttagaaaaacataaaatcatgaaatctttatctgggtatgacaggcagaccctaaggtaaccccagtgatctccgctatctggcattcatgcctgtcagatccccacccctagagtgtggttgggacctgtgacttgtttataactaatagaatgcaagaaaggtaatagaatggcactcctgagattatttcacatggtgtttagtcttactgggcttcccaggtggcgctactggtaaagaacctgcctactaatgcaggaaacataagacatgcggattcgatccctggatggggaagatcctctggagaagggaatgacaacagactccagtattcttgccctaagactcccatgaacagaggagcctggcaggctacagttcatagggttgcaaagagtcggacaagactgaagcgacttggcatggaggcaagtcttgctagtcaaattgcttcagagcttttctttgctggcttgatgaagtaaacagctatgctgagaaagcccacctggcaagcaatcactggtgtttgatttgtagcacctgagggcaacctcagttgagagttgacagccaagaacaagtcagggcctttggacttacagccccaagtaaatgaattctgattggatgtgcttaagagaagatatattcccagctgagccagatgaaaatgcagttcataaacttgtttgcaaccctgctacatcttgagcagagaacccagtcctgtatcaggatgccagaccaacagaaactaagaggtaataaatatgtgttcttttacccactaggtacataggaacttgttgtggagaatataaaactaatgccctggatgagaagcaagattggcaggaatatttcagaaaggaaaatgacatctctattttaattcacttgcatctgaaccatatctgtgtgcactatcaatccttgaaatatagactctagacttctgaaattacgtcagtgatctcgaccttgaggcttagagcaaatcccagaatgaacagtgctttagagttccatcatgtcaagtggagaagaagttttgctttctctcaagttaaagtattttttattcttgcaagtgagaattcatctcctgagtcattattattcaacatcaaatatacaatatttttgagttgagattttgctaatgcacaaggaaaaaataacaatattcttttatttttcttgctggcccttgat

SEQ ID NO: 33952 - DNA, 1254 bp, Bovine  19866881421359
  misc_feature (1)..(1): n is a, c, g, or t
ncatatggataaacccttttcttttttatctgtattttcatgataaatatttttgtagctatatctgagcaattgtaaaatacaatcctaaaattaaaacatttatcatgatttttctactttaccattcagcattgaattcctaaatagttcttaagaagaggctaattcatttttataactttggaaggtgtaggggaatgaagtaagccatggattttccactagggcatctttcaacatcttgtcagtctgtatatgatcccatgcaaaaggccttcaagatttgagcccactattcagtctctcaacaaagatccatatagtcaaagctatggtttttccagtagtcatgtatggatgtgagacctggaccataaagaaagctgagtgccaaagagctgatgctttggaactgtgatgttggagaagactcttgaggatcccttggacttcaaggagatcaaaccagtctgtcctaaaggaaatcagtcctgaatattcattggaaggacagatgatgaagctgaagccccaatactttggccacctgatgtgaaagctgaatcattagaaaagaccctgatgctggcaatgattgaaagctggaggagaaggggatgacagagcatgagatgattggatgacatcactgatccagtggaccaccatctctgggagatggtgaaggacagggaagcctggtgtgcagcagtccatggggtcacagagagtcagacatgactgagtgtctgaacaacaacaacaaattcagtctctcaaatctgtgtacaaaatacaaataacttaaaaatagtctaaaccctaaggggcttagatattgtgggaataactttcaactatgttagggagatctattagttggcttagtagtttgtttgttttagtatacagccttgtcagttcagttttccattcagaagacatttagcctgagattcctgctacaggaacagcagtagctgaaatgctaaataacagtcctttacaggggcaagtgtatagtgtaggctgatctcatcttgtgtacctgagaactataaaaagagagtgtactgtgaaatagcctaatatgtatatttatatatgttgaattgaatgaccctctcttaggttgcactgtaatttctaagagagatttacaggataaaacatctaactcaatgcccaataaaacagaaagtgaaatcataactgcttagtggcggcatggtgagccagcaagagatgtga

SEQ ID NO: 33953 - DNA, 1160 bp, Bovine  19866881422819
  misc_feature (1)..(1): n is a, c, g, or t
ncccaataatataatattcctgtgagttgcattggaaatacctgatgctgtaatcgcctcagtacaaagaaacataataaaagccatgtcaataaaggacaccttgttattcagtagaattgtgttacatggacatcttcatttaaatttatataatatataccatataaagcatgaagatttttaaagtaagcaagcaacaaaggtcatacattcagtaacatctttagaaaacttgtttttgtgtgtgtggtaaatacacctatatttccacctcatagattcagcctatgaaataaattatttatgaattattttaaagagattttgatatactaatcacctaaatatgtctgacgtcagtgcataattattatttagaaacattcagatctgattggttcattgaaaattttgtcacacaaatctgaaatgacagattcattacctgaatgtattcacccctaaatttttgtatatattagtgtcattatgtcacttcttctctggaatagtaaaacatatagttattatttttgctcttcttaaacattatgttctatataacatgcttcacaaatacttctttactaccactcctgagacggaacatgttttctgggaaagagtcaagattttgttttctttgctgaacttctgttataaaagaaaatcgtatatcaaggatgaaagagattacagtatttttgatttgaacctctactttgaagaagcccaggtcactgtcagatggactatacctacaatttctttattaaactaaaatagtgggtaaggtggatggttgctaagggtattgactttctcacaaacttaagagtctcccagattgtcatgctggaactctgtatttactcagtctactcctactgcactcttgcattgcccattttaaaggtcctttttggactgaataacattagatgagatccagaagaccagaaaagaaatgtttagggatatgccccacttgaactcttgcctcagatgccatcagattttaagttctaatcactttttctttgataaactttatatactaagtattttgaatcatttctccagttgctgtgttttggactatttgcaattatttcacaatataatcaattccagatttgtcaacactttatttgtaa

SEQ ID NO: 33954 - DNA, 917 bp, Bovine  19866881510914
  misc_feature (1)..(1): n is a, c, g, or t
nttccctctcttgtaccttggtgccacagcaggatgcacgctccttttaatcatgggattgtgttaaacaaatttttaccagcagagactataaaaggcccctcatcatttccgagtatcctgacctcttgactgtccccactgcagcatataaagacaaaggctatgctaaatttttcatcattttattccatttcagatccaattatgtgagggtcttccatcacttacaggggtgtatatgctataacaggaagtgccgcacattaatcagactctttttatccagcagacaccagtgctaaatcacattacttcacaaaaaaggaacatgaaatagaggcaaacgtacaaggagggtgctctcttttgcgcagttacaataggaggtgacttgtgcgggtggccttcccatcaagtcccagagagtatcaaagagcattttgtttttcatgttttctgccacattcctccccaaaaggaccctcttctcccacttgctttaatgttcctctgccagttcatatcacagaatccaccactttaaacactgccctgggcaatgactttctagttgaactgttgtaactaatcggcctgaaagctgaaaaatgaccagcttgacacttgttcagccctcttagcaatgaaaattctccctttatctcagcagtctctttacaagcacgtaggacaaagaccttagatgctgaatatttctgacaaatgacattgaaattgtggatctgagggaagcagaaagatttacattactaaataatcttaactatttgggagttaacactttcttaataatatttcaaaattctatgtgattgcttaaccattatgaagataagttgcttatatttcaaagaaatgtataaaagtatattataaaagttaaataactttca

SEQ ID NO: 33955 - DNA, 1118 bp, Bovine  19866880082185
  misc_feature (1)..(1): n is a, c, g, or t
ntccgtctagtcaggctatggtttttccgtggtcatgtatggatgtgagagttggactgtgaagaaggctgagtgccgaagaattgatgcttttgaactgtggtgttggagaagactcttgagagtcccttgaactgcaagcagatccaaccagtccattctgaaggagatcagccctgggatttctttggaaggaatgatgctgaagctgaaactccagtactttggccacctcatgtgaagagttgactcattggaaaagactctgatgctgggagggattgggggcaggaggagaaggggacgacagaggatgagatggctggatgacatcactgactcgatggacgtgagtctgggtgaactccgggagttggtgatggagagggaggcctggcgtgctgcgattcatggggtcgcaaagagtgagacacgactgagcgaatgaactgaactgaactgaggaagtgacaggccaaagacttaaatgcggcacggtctcgctccgagttgcttgttctactctctcttacttatttctacagaggtgctgggtggttagtgaaagaatcctccgttccctgggccaggtccctcttctaaataaacacggcaatatactcaatttccttctgctcctcctgcctttctttcagccttgttttctttcggtgttcactctgaggcttcttttctccccaccgaccaatgactgtgatgcagttcgtgttttctgttgccatgcagaaggcggcagagagtgatgccgtgtgagagaaagagaaagccttccagatgaaatgccatgtgtaaatggaaattgtcattattatcagatgaataaatggagaagaggcacactggctcaaacagaactgaaggaaaaattggatggtgaacaaaagcattattaatttaagaaactgcctgaatttgcctctggcagtttcctttgtaaacaccgttaacaccctggaatgcttgaattgtatttaaatgcctagcttaaatacagaaaaagaaaacagaaacctaggcattacttttaggcattcagaaaactgtttgcttgaaaatcttcctgagcaaaataaaactagcataggagacttcccaat

SEQ ID NO: 33956 - DNA, 888 bp, Bovine  19866880347665
  misc_feature (1)..(1): n is a, c, g, or t
nttcttgcctggagaatcccagggatggggggagcctggtgggctgccgtctatggggtcgcacggagtcggacacgactgaagcgacttagcagcagcagcataggaatatattataatatactgtaggaatataagataggagtcctctaaatagagattaaatcattttcacccagacttcttccattcttcctatttttatctttccttctttctctcttgcccactgtccttttctaccttctatcattcaacaagatgtattgatatgatatacagtacaagatgtattgtatatgatgtgcctgagattgtgctgggcacagtgaacccagaaatccaaaggttaatatgtagttatctttgctttgttggaagctcagtctcactgatgacacagacatgcaaacagttattatacagtgagaaatctggtgtgtgtgcagggtatccagagaaggtataagatgtgggaagcaagggaagatatcaggtttcagccttgggaatcagttctatgaaatacagtctaagttcataaatatcagtatatccttaattgattcagcaaacctctctagaaccagaaattacattagatactcaggatttggacatgaaaaaagatacagttgaagcttcaaaaagtttttgattagaatgggagaaagacaaggaaagcaatgattatatatgtctgtatctcataactgaaatctttggatgtagctgtgtttcctaattctgaatttttagaatgttgataaggtgcacaaactctgcagtacaaaacactcataagagagtctggggtaggtaccccataatgaaaacacattcaatcatcttaaatggaataaaggtgataaatagcctcacatcaat

SEQ ID NO: 33957 - DNA, 1869 bp, Bovine  19866880365741
  misc_feature (1)..(1): n is a, c, g, or t
ncttcactttcacttttcactttcatgcattggagaaggaaatggcaacccactccagtgttcttgcctggagaatcccagggacgggggatcctggtgggctgccgtctacggggttgcacagagtcggacacgactgaagtgactcagcagcagcagcagcagtatatataatagataatagtgtgtgtatatgtcaatatcaatctttcaatttatcctcccccccaaccccatcctttcccccttggttaccatgagttgttttctacatctgtgactccatttgttttgtaaataagttcatttgcaccatttttttagattccacatataagcaatagcatttgatatctgtctttctctgtctgacttacttcactcagtataacaatctcaagtccatccggttctctcacttctaatccagatatttcaggatctacttggtatttattttgtccccagtggaaaaagagacctgatctaccattctcagtacaagagtcctttctctactgaaagttcatttaaatagcctactaaactatgagattctggaaagcaaaaactagttcttatttacccatgctgtgtgcctaatatctgttaagtgccaaatatgttttggatagattttattggtccaacgaaaaaaattcagtatgtaagtggtgtgctggaactagctaatatcagctttcaaggaagccaactctgtacatttcttcccaactccacgctcaccttgcaccagcagcttgaaataagccacagtgaaagtattttgtgatactatgacttataataagaaatatagggacttctctggtggtccagtggttaagacacctcatctgcagttcagggggtatgggctcaatccctgtttggggaactatgatcccacctgcctctgaaaataaataaaatggggggcttatgttaaaagaaaagaaatatatatttggtcttcaacctgttcctggcacgtgcgtgggtgctctgtcactcagtcatatccaactcttcgtgaccccatggactgcagtctgccagactcctctgtccatggaattttccaggcaggattactggagtggattgccatttcctcctccaggggagctttccaacccaggatagaagctgcgtctactgcagctcctgagtctcctgctttgccaggcggattctttaccactctgccacctgggaagcccctgttcccagcacagagctcctaaaacccctgagagtggtaaaggtgtcttgttatgttattaaggtggcttctgaaaagctcctaaggaagggaggtcagcagccagtggaaccaaccacctgcttagaaggttgggactgaaagtccccatccaccccactccctcgacctcaggggaggaaacagggactggaagttgaatccatcgccaatggctaaggatttaatcagtcatgcctctgtaatgtgtgtgtgttagtagctcagtcgtatctgactctttgtgatcccatggactgtagcccaccaggctcctttgtctgtggaataatgaggcctctataaaaacccaaaaggaggggacttagcagagcttccaggatggagatgcagctttcctggggagacacaggcagagctgcatcctctgagaaaatgtggaagctctgagcctcttccgcagactttgccctatgtatctcttccatctggctgttgttgggttatattcttttacaataaactggtaatctagtaagtaaaatgcttctctgatttctatgagctcctctagcaaattactcaaacccaggaaaggggtcactaaaacctctaatctatagccagcaggtcaaaagcacatg

SEQ ID NO: 33958 - DNA, 883 bp, Bovine  19866880401950
  misc_feature (1)..(1): n is a, c, g, or t
nctgatgtatgggaaagtctaacttacggaaagcagaagcaagcaggagcagcctgagagacaaggaaaggcgagcggccggaggacaccgagtagggtgaacagctagagtctgcagatgcactcagaggttatcactatgaaaggctttttagccatagcagggcatattcctttatcctaaaaccaataagaaggtgggtttggggggctttttgagggagaggattatattcacgtcatcaattttatgtttcaaaaaagtgtttctggctacagtgaagagtactggctggcaaggggcctaagttacgcagatcagctgaactttttgaacagagaggcactggtaacgtggcctaggggagggaggatgaattctaagctgtcaatgaattctaaggatatacagaaggtaacactgacaggtcatcttctgctgtatttatgtggagcccatgagaaagtgtcagggaacactggcagaggaacaagtctgtgaagactgatgctaaattcagggctggacatgctgaatttgagatgtcttggagttgatacggggtagagcaagcagacatttggttatgggtgtgaagcttgtcagagagctctgaagtcccagccagagatagaaacttgtgacgcatttccacattcacaggtctggatgtgaccaatgggatccacagacggagatgacgtgcagagaaaggttataacgtcagcagtggcagagaatgctaggaccaaagccctgaggaattcaagtccatcaagcccaccaagtgaagggcgagcgtaagggtgaaaggaggagcagaagaagaaaaagaaggaaacaagactgctgggtcgtgggggtgagggagcaaggattcca

SEQ ID NO: 33959 - DNA, 1204 bp, Bovine  19866880402940
  misc_feature (1)..(1): n is a, c, g, or t
ntaaaaatatgaaaatgatatcagtaggaatattatgaggattaaataagggtcatatatataaaagtacttgacataggccagacacagggtaagcatttaaagatgtgagctattattattcgggatcctactgaaaggtacagagcttggtattaggaattcaaaaatacagtgtctgtttttagtctgatacctccccttctctactggaggtatttctcgtaacatgtctcaataattcttaaactaaatatgtcaaaactgaagtctatgctttcttaacacagagtcaatcattcccagtattaccaatggcaccttcatatattcagctgtcaaatataacaaacattaattttgcacttcccctaaccctttgttgtaaccattactatctctagctggttacttttctctaatgtttttgcttcttctgtttatttcttcctcctacacttttatcctaggactgggcctttccatcccatgcctagataactttcgctgtttttatttattcagggttttgcccatttaccaattagatcctgtatcccagtataaaaatcatcttcttgtaacacaattccataaataaagcacaattccaacaaatcaattcctgcctagctctacagaatttccctgtaatgttcataatatcagatcccagttccttaggttgctgtatcaagtactataaagtcctacccattgactctctccacttctttctctccaagattagttctctttagtgaaaggaaaactccgagtaaggcagtaacaatctgatctgggtgtacctagcacccaaatcttggtctctactcatgatccttcagtaagacgaaccagatgttcctggagaagtgtttgattccagggctaaggcaaaaaatgttcaagatgaacccggaacaccttgtggtgacaggaagcaaggaaatgctttaaaaaatgaggcttgtcccaagaacaatgaccagtgcattttcttgacaaaactctgttagtctttgccctgcttcattctgtattccaaggccaaatttgcctgttactccaggtgtttcttcacttcctacttttgcattccagtctcctataatgaaaaggacatcttttttgggtgttagttctaaaaggtcttgtaggtcttcatagaaccgttcaacttcagcttcttcagtgttactgg

SEQ ID NO: 33960 - DNA, 4393 bp, Bovine  19866880444121
  misc_feature (1)..(1): n is a, c, g, or t
ngtgcttattgcattgcagtctgctagattcctcaggaaaggcacatgagaacaatattctctgtgttcatgcatgtttacatcagtttaccagaggctttttatacttaaaggtcaatttgactgaacataaagattcttggccctcgttttctttccttcgctttcttacatatgttaccatattttccttagtcagtaaagtgtttctgcaaaagtctctgacggcaatctgattttctttctattggtctttttgctgggctgtccaaagaacttttctttacaggataatgtcagccattatgggccagtttccagtgctctcaacatgtaatttcaaattctcttttatttcaggaaagtttcctgaattataatttcccttcagggacccctattatataatagagattccaaaatctgtggaaattttatcagtctgtcaaaaccaacggaccccctttcagagtaatatttgcatgaaatggaatacatagaatatcataggaaagtaactatattgagatatagttcctaaaaatatttttaaaattgtttctacttctttattatcagagtaaataataagaactagtggcaggtctaataataactataagtttgaaaaagtgacgaatgtaaatgacatttggagttttttaagctatagatattatgaggtttgtgattaattttggtgacaagtcacagttactgttaacactactgtgttttcatgccttaataactaaagaaaaatgttaaatttcatctaaaggtgaatggaagtgtagacatatttttatcaatcaaacccacagatcacctgaattttatccacaaacctgaaagttcatgcctctaggtcaggaatatctgtactagatatgggttgaatcttctaaacttgtccctttctctcagctgttttaaaatgcattttgattttttaaaatttcttccttttttgcaggggaaggggagagggccgcactgggtcttcgtttggtgtgcgggccttctctatttgcagcacaggtgcttaattgccttgtggcacatgagatcttagctcctcaaccagagatccaaccttcatcccccgcattggaaggcagattcttaacactggaccactgggaagtccctaaaattttcttccttttcatgttctacttctcttattgcattatcctttctgtctacttgcttttgtgttcctcttggtgcaattccattacagaaatgattttgttattttatttcaagttgtttttaaaatcttccttaatcaccacgtttctgagtttttctatttgtgattcattgtcccagcatcttccatttgcttgcttgctttcagttcactctggaatcctgcagctcagttctcatctgctttgtgggcaggtctttcaatgtgcctcccaggtcacggggaatttattcttctcctcattcactttgttagattgcatacttttccctttgctcatatgtaagtaaacaagtttttgtctgcttttaagagggaggagaggtcagaataacttttctagattcatgactgtaaactcccttttctgtttttctctcaaagtgatttaaaaatatgacctcggacttggtgacacctccctttttaactctccaatcccattgttatctggatatttttgccccttttgttactaatctgctaaatttccaatctattctcaatagttcctcctggaaggaaacattggcttattatgactaatggtctatagggtccaggctgtcccagcaccatcagatctcaacaagcacatcccttgctcccatctgtgatccggatcctgtgaaactcccaaccagttcagctgcattttccagtgagtacgcgttagggatataggggttctcagaaccattcaggattcacactgccttcccctgacttcctttctacaaagatgctgatactgcataaggtatcctgactctcaaggggttttccctggtccactcatatctaggtgtttgtggagataccttaaaacctagtaacagtagataggtagaaagacagatgataaatgagatggatgataaatgaagagatagagaggtggacagatggatggaaggatggatggatagatgatagtcagacagacatactgtctgtgggttgtcagattttatgtcctagctgccctattagttttaggcagggcagtgattctctacaaggggcaattttgttccccaggggacatgtgccaatgtctactgacagttttggtgctgacaactgaagctgggggtaggggtgagaacagtactacaggcctctaatggataaagcccaggaatgctattaaacctcctacattatgcaggacagcctcccatgactaagaattctccagttcaagctatcagtagtgcagaggttgagaaaacctggcctacagaattaggggagattcaaagttcagccacaactgacgtcttcccctatgcttcccaattgcctcatcaactcttcatccagaaattgtgttcacttctgccccctgctattcacccctagttcaggcccatactatctttgacctgacctactgtggtagcttcctaaggtctgcatgaagccactctccttttcccccagagtccaaatcactctatctaccatgctggagcaattccctcaaagcacagctcacatcatgccaaacatctgctccaagagattcacatgattcactggcatcttgtaaataaagttcaaccccatcagctgcaaattcaatgttttctatgctctgtccctaatttatgttccttttatcccctgtactccttgacacataacttgcaatgcagtcaactgggaatctccaccatttgacaaatatgtctcttttcccctcaattctttgttacattacaacaaatacctcaatttgtagcatctcatgtccctccagacaggtcccaaagctcccttgtacatgaaatcttttccttccctcatattctccctgaccactccaaccaaaactgccctgtctctcttttagatatcttaacactttagatacacttgtcttacagcacttaaattatatgctatagtataatcacagtacttcccactctactgtaatttaaggattgagtatttttcctcttggcattccccacagcacctaagaaatacttagagcagatgctcagtaatacttgttaaattaatgagcagaactcagtcctacggaggtaaagtggtcatccgaaattcatccttctggtcagtggcagagaccatgtggctgtaaaacaaaaccatgacaatgggttcctaagaccattttgtgtacatgatactacaatcatcacattattagtaataattacaaatctaggactggatgttggacaggcggcaatgaaaaactaacaggtaacatggttgctattactgaggagaatttctaggcatagctattcatgcaggtagacggtcaacaagtgattaaccagatatagaactgaatactaaatgttaattatttgatactccatctcccaaagcttcatatctctaacaccctaagaatttatctccagtttgagttgcatttttaaaataataggattatatccatagaagagacataccataagtcttaatagacataccatactttgcctcagatcccctccctttctttatactatgtattatatcctttatagagttatcctggcaccaaacatttcatatacacatgtatttctgcaggtagaacttgactggtgccttcctgatggtatgttatgtgcactgagagaatcaccactctccagaatgctttcccatctactagtccctgtattctctactcattatagattcacattttgatgtgtaaaacagggatcttcataaatcatttaggccaggaaaggataagttttggatttcctgtccccgagcaggcactatgatgtcagtgagctgtgacactgaggagaagaaccagggtatttatgagaaccaagcactcctcagggcaagcgtgctaggtcactccacgtgtgtctgactctgtacaacaccatggactatagcctgcaaggctcctctgtccgtgggattctccaggcgagaaaactggaatgcgtttccgtgcccttctccaggcgagaatactggaatgggtttccgtgcccttctccaggtgagaatactggagtgggttcctgtgccctcctcctggggatcttcccaacccagggattgaatctgtgtctcctaagtctcttgctttggcaggtgggatctttaccactagcaccgcctggcaagcccaagtactccacagtaattctg

SEQ ID NO: 33961 - DNA, 744 bp, Bovine  19866880482141
  misc_feature (1)..(1): n is a, c, g, or t
natacagttaagggagttttaagaaaagccttttgttgtcttgaaagacactgcaaagttgggtaaggcctgtttatgttggtaccaaaatgtgtttggtttaagtttttgaaagtgagtgtgccaatttgcttagattatttttttttcctacagtaagaaatattcattttagccaacaaaaagtataccagaattgtgattgaaatggagaagatgactcatgatttgaacttgaatattctgaaattaagatcccttctgcacagttcactcttaaaaataggacattcagagggtgctctttgtttatcatgttgaaggacaagaaccaaaattgaaatgttgtctatcagaatgaatatttttcatgtccctatgctgtgggaattattagacattattaagatgctattgtttgttttctctttcaaaacagcacatatcagactataatttattctgagttttatttaacatattttccattctttttcagttaaggaccttcaaaaataatatatctctgtcctgattccaaattgaattcaagtctgactattaaaacagcttgtagctgctttttaatttccttattcacttggtaaacaccctgaagtggagcaatataaaagaatttggaaaagttgtataaagcctcctagtttctgctttctggcatttaatttattggatttgatttctcctttttgaaactcaatgcaatgggggggaagtttaaaa

SEQ ID NO: 33962 - DNA, 1261 bp, Bovine  19866880496713
  misc_feature (1)..(1): n is a, c, g, or t
ntatatgaaagcttcagctcattcggaagctgaaagaatacagtgttgccaacttataatcagtcagtcagtgaacattcatcttgtgttgtgtgcagaatactgaattaggcagttggggcacgataaaaggaggagaagactctttctgcatcagatggttttataatttaattgaggaaattatctaaacttaagagcagcttattaaatatcaaatacaaatttaaatggtaagaaatgaattggtgtatactgagggaacacagaggaggttttacagattaatcagagacactctctacaggaaattctatcagcactaaaagtcctaactttgaatacctactatgtgcaagtcctgtgcagcacaagctgtgtcttatttgatcctcacagctatctttaaatgaagtattatgtttgctcccatttaaacatgaggaaaccaagtactagaaagccaagacaatatgcctgaagttcctagctaatgacagactgggtcatgatctaagctgaaggcagtctgacacaaaaaaagctgatgtgctagtcattctgtatacagtgtttaaagaagctgtgttattagtgcccattggcagaaacgtggatggacctagagattgtcacacacaatgaagtaagtcagaaagagaaaaacaaggactgtagaatattgtttatatgtagaatctagaaaaatggtacagatgcagttatttgtaaagcagaaatagagacatgaatgtagataacaaacttaccaggggataaggaagggaatgaattggaaaactggatagatacatatacatcaatatatataaaatagataactaatgagaatctcctgtatataacagggaactctactcaatgctctgtggtgacctaaatgggaagaaaatctaaaaatcagtgaagatatatatagcttattcactttgctgtacagcagaagctaacacagcactataatgcaactatattataataaaaattgaaaaaaaataaagaagctacattaagatggatgttggctctggagggatggatgaagaagggtgagcacattcctggataaaggagcacagatgtgaaggtgaataatcatgatggaagactgaaggcagatcaaactttttattttaaaaagtattttatttgaactaattttaaacttaaaggcagtaaaaatagttctttttatgtcccttaacacccccttctctaatattaacatcttacaaaacca

SEQ ID NO: 33963 - DNA, 1000 bp, Bovine  19866880553349
  misc_feature (1)..(1): n is a, c, g, or t
nattatacagattattcttacacactgatttttctcaagtgtttttttaggcccagtgagaagtacagtatgtgttttaaatgataacatcaatcagagcgatggtttctgtgtgtctgttgagataagatggctctagtttcacactgaaggccaggtaaccagatacagcattaatgcattccatcttgaatgcttggttgaggcccgttaaaaaattcaggaccgtgggcgaccagtgtttatgtctttgtctgatattgtctgtacttgtggttaaaggcaaggggaaaagtaagaaacaactcatgtgcctcgataaagtatttttgaagtagctctcattgtccgtggcatattctaattgctgggccagaactaacattctaatgatgatttcagtatggcaaacagcctgttggaccaagaaacatatctagtcgaggcgggccagggccagggcaagcgtgagccatgtaaggcactcaccttgggtgtaaaatgtaaataataataaaggtcagatcactgttaactgatcttctctttctgtctcaggctcagcatggcaaatgttactggtcctgactttatttaaaatttttgtattttgttcatcatggattttttttaaccttaattttgatttttggaaaaatatgggtcatctggattactgaggcttggggcacctcttcagatttttcacctgatgctagtgcctcactctttacccaagtcctggccctgaagatggactttataaatggataacaaagcagcaaagggaggaaagttaccagtgtgtatactttatagaagagtcatccaaaccacacttctaaatgtgtggtctagagggatcttgggaaattactgcagcttgtttcctaaagatatttagtcctgctgtgaaataaaggactggactaagacttgcctgggttatagaaaatggtagaaagacattagaagagcagccggttggaccgagggcggg

SEQ ID NO: 33964 - DNA, 1221 bp, Bovine  19866880567830
  misc_feature (1)..(1): n is a, c, g, or t
ncattactttgctagcgtgagagatgaggcaattgtgcagtagtttgagcattctttggcattgcctttctttgggattggaatgaaaactgcccttttcccagtcctgtgaccactgctgagttttccaaatttgctggcatattgagtgcggcctctttgtcttaactgaatatattaataacatcactttaccttgtatttcctcagtacttggctcaaggtaccagctaaaggaaaatatttaattaattagcacaaaagaagcatgatcacttgctgcatgtttcttatctgggcctctcctgtcaagctcaatgagaatatatatcgaattcatctttggatatttggttgccaccaaattatgcaagataaactgaagaaactcaaatatttggtgagtggagctgatagagtttggtttgctgtcatatttcattctcacatcactggtataaactgatgcacagccaagagccaaacaactaatgttcatggtggagaggaaagcctcgggtgccacaaggctctcaagtgcctatctcattttgaaggatacagtaaattttgtttcataacatcttagcagtaagaggatgttactctaactttgctctttgaaacttgccaattatagtaaacattttgcatgaagcagaatatttcatggtatgaaattgcaggtctgtatcagtccagatgacagtttatttaggtaaaatagaacctcatttcgttaacaccactagaaaagagacttttacattaatcccttaacttactgattagagatatagttacaatccattgccctggtttatcgaagtgacttttcaaagagaatgatttaaagaattacttctcactataaatttttagctctggcagaaagccctatgctgctgctgctgctgctaagttgcttcagtcgtgtctgactctgtgcgaccccatagatggcaacccatcaggctcccctgtccctgggattctctaggcaagaacactggagtgggttgccattttcttctccaatgcatgaaagtgagcacatgcatacctgtgatggattcattttgatatttggcaaaactaatacaattatgtaaagtttaaaaataaaataaaattaaaaaaaaaaaaagaaaagtgaaagtgaagtagttcagtcgtgtctgactcttcgggaccccatggactgcagcctaccaggttcct

SEQ ID NO: 33965 - DNA, 3525 bp, Bovine  19866880572538
  misc_feature (1)..(1): n is a, c, g, or t
ncgaagggacctgtcctcttgaggcagagccaacccaccttgatttcctttaataaaacagtaaattcaaggattggaaatacagtctacattacaagaaggacggaggtcatcaacatactgtgtgagcttgtcagccccagtgaggccacctatacgtggaccaaggatggagcactgttacaaccctcagaaaagtaagtacaatcagagtacagtgtttactctgagatgccttctaaatggatcttccagctttccttaaaatattgtcaaattccttctcctaagaatgtgcttccaacaggatcctttggaaaagaaactccaaaatgttagggcatggcattcacatactcattggaattctaaaaatgaaattgtaccatcacagtcactaccatgaaggtgtagtgccaaactggataccataagattaaatgtaagactctcgcttttcaggtcacttaatacttaaaaataagatcagggacttccctggtggtccagtggttcagactctgtgcttccaatgcagggggcacagatttgatccctggtcggggaactaaaatcccacatgctacgtggtgcagccaaaaaattaaaaaattgtccctccaaaaaagtgaaatcaatcaggccattaaaaaaacatacttgcagttctcttagaatatgcaggaactgcaagaatcttctatatctgggagatgtggtgtctcgtttgaactcacaccagccctatgagtctggcagggcaggagttgatactttctcaatgagatcattgaggaacagaatctcatgactaattcatggccagtcagaagcaggggccacgtcatctggaccccgccaggggtgttagagggtcacacaaataatagctttggtagaaagattacctgaagtcattttctaatatcaggcaatgatttatgtcacaaaaccgaaaagtaatgataaggatcaaagttttttgagatgtttgaagcagtattcagtcactttattttattgtaataactatccatgtcagtgagaaaatgtcgcatttcattcattttacataaaataatggaataatagaaacattcactcattttgtcttctctactgtctccaaatcttgctgttaacacacacagggctgtagacatcttgctttctttcaatttgcattcaacagctccttatccacctccagggatttttcagagacatagatgttaaattgttttgcaaaccataaggtactttaaaaatgcaagttttatttttatcatcctttttttttctgcatcacctaatgtgtgaagcattaaaagaaatctaggtaaaattcaatttttatatcactggactgtcttagaatggaaagatagaacaaatctaattttaaattcttttgcctaaaactctgaacattagagtataatgtagtttttgaagtggaataaaccttccagatcaactaacttagcagttctcaaatcttttggttttaggactccttcaaacttaaaaaaatgatgagaagccaaagaacttttgttaatatgaattaactttatgttaatatgttaacatatctcatgatgtttacgctgttagaaattaaaaccatgaaacattttaaatagctgtttgttaatccatttagaagtaacagaagtaagcccaattcatgtttatgtaaataacataatttttgaaaagcagtattttaaagattaatgataatgacattgtttcacatctctgccaatctctttaatgtctggcttaatgaaacatagctgggctttctcctcaatgcttctacattcagtctgttgccatatgttgttttaattgaagtttatggagaaaattgtgcttcatacatatataaacaggttagttgggaggataaggaatacattcataatcttttaaggtaattatggctattcttctttaatgctacactaaaaatagacaagcagtagtttcttaaaggttaggtgggatgtggaatctaaaaccatgttaaagagattttggtagtctgttacaatgaaatctgttgctttatcttgttctttgaatggatcttttaactagactagattttataacatcatacattggtcatttggaaagtgttggctgactgagttatacacatcttccaaatgttaacacgttccatcatacaataccaaaaatacgcgtattctttaatattactatcccaacttttcagaaaagtctttgagctttgggaagcagtcagactcacagtgagcatgacggattttctgaaattctaattttcactcggaagcttgaattttatcatcggcaacaattactgtcagttgttttccttgcattggccagctcatttttgttcattaaaaaaatatatcttccaaatacctaaatccaaataaccctggcttatctgtcagtcattatttcaagtaaagtagtatgccatgaaaaaggagctagttcagctagcaattcaaacagtcacacccacagactttggcagacagcagaggtatggtgtgtatttcctgttttgttgtacagaatgttagaaaacttacactcgggggtagagatttagtgaaataataagttctactgcttcattaaggatattcttatgggaaattggcattttgtttttactgcaagtgtgtggtagccagaatacagtagctactggtacactttgctgccacagctttgattccattctggtgccaagttttatccacaactgcttttactatcagtgcaaatatcaacactcacagtgaaaaaggcaaataacggtatagtgtcaatatttactattatgaaaatagttttgacctcacggatccctgggattcaaggaccaccctttcaggattgctcaacaatttcactttagaaattataaggaacataagccaaacccaaattgaggaacattctattttttatcagtagtcctcaaaactgtcaaagtcatcaaaaaaatggagggggtgggggaaaggcagaaaaattgtcacagaccagaaaagactaaggagacacaatgtctaaatacaatatgatgtcctgaatgggagattgtgcaacaggatagcaacgttagtgggaaaactaatgaaatctacataaagactgaagttttgttaacaacagtgatggaccgatgctggtgctttagttttgatgaaagtatcacgtgctgaagatgttcacgtcagggaaaaccaagaaagaaggagataagaaccctctgtactgtcctggttgcttttctgtaatgccaacatcattccaaaataaagtttattaaaaaaaaaaaagaaagaaactataaggaaacagaggctgagaaagctgatcagctgatttgtggccataaagtactggagggatgtggtggaagaccgtggttagttcaagtcagtgtttgttaactgagttggtttgtgatcgtctactgctcaagggaatttgcattagttt

SEQ ID NO: 33966 - DNA, 1242 bp, Bovine  19866880587861
  misc_feature (1)..(1): n is a, c, g, or t
naatttctgatgatcttattttcttctactgctaataaactagagaaatggacagtaaggaattttccagtcaggacttggctcacgtattgtattaatttaatatctgggctgaatctaaaagcccactggcactgagtgatgatgaaactgcaaacatcagaggaaaaggtttccttgttttaaaaatgacaaatacagtcatctcaggtcatcagcctattgttgttcagtcactaagtcatgtctgactcttggcggccccatggactgtagcagtccaggcttcatccttcactatcttctggagtttgctcaaactcatgttcattgagttgatgatgccatccaaccatttcatcctctgtcgctgccttctcctcttgcccttcaaatttcccagcaccagggtcttttccaatgagataattaacctccattctggtggtaaggctcagtggtttgatgaaaagaaaaatgtgtctcaaggtagtagcagctttgcagccccagcaccagtgagcacagctggcctctgcagtcgtgtggatattcacccagctgtgatgaaattgggtttggttttgagactctgtgaaggagcctgtttgacactggttgatcctgctgatgttcttttcttgagtttgttcctggctgaaaggctagagaaatatttttgcatcttacagccttgggacttttgttataagccagtagttcaccaattgtagttaataacagacatgtattttccccatacttgaagataggaagttgtcattttaactgttacacctggctaatgactgtgattccagactaattacagttttctcacatatactaatagctctaatttagaattttttaataatcacaggtagaactgacaagcttttgagaaatggaaactttgtaccgtatatcccctggaggaaatttaggttgttgcacatataatgcccttatctactgtaatgagatattattatttttatttatttatttattttattatgggcctttccaggtagtgctagttgtaaagaaccttcttgtccctgcaggagatgtaagagacatgggttctatccctggtctacctccaggaaggtcccctggaggagggcatggcaaaccactccaatattcttgcctggagaatcccatggacagcggagcctggcagacttacagaatcagacatgactgaagtgatgtagcatgcacacatatttt

SEQ ID NO: 33967 - DNA, 1406 bp, Bovine  19866880592133
  misc_feature (1)..(1): n is a, c, g, or t
nccagctgggtgcacaggcttcggtacttgtgactcttgggcttagttgcccccggcatgtggaatcttcctggaccagggattgaacctgtgtttcctgcgctggcaggtggattcctatccactgcaccatgagggaagtcctattgtggaaagttaatactgctctaggcatgatgggaaattctttacttgtaatatcttatcaataacttaaaagcaccctttgacttagtggcatgtaatcagataagcttttcttctcattttagggtctaccatacccactgattaactatggaagactataccaaaatagagaaaattggagaaggtgagtggttttaataatataaaaggatttttaaaaaatgatttaatgatttgacatctttgacatgtaaatattcaaattcagtttttaaagtatctaacagtacattaattagtgcattaatatatatgttttctacataatagcataagcaaaaaaaaaaatagttaacctttcaagagaattgaaattattcttacatgtctccctaccagtatccctccaataatcttacattcttctaatactaaacacttaaagcaatatatctatatattttttaaaaaacactattgctattttgtaggtgtgttgaggagagtgttagggcagtgaaattatgtgctttagtttaaagtacgtctgcatatactctctgaagttctagtcagggtcatgtatttcatttagtggttaatgtcttcttaatgtcttttgattaaaatatatcaactcttatttcaattattaccaaattgttctgtgattttcttctgagttaacaaaaataattcattgaactcaggttataatttgaacccctttctggctttttagatcatagagaacataactatatgcatgatgtggaaccttagttagcatttagcagacactctataaccatttgttgataaacagtttttctgtttattgttcagtctccatgctgctgctaagtcgctttagtcgtgtccaactctgcgaccccatccatagacggcagcccaccaggctcccctgtccctgggattctccaggcaagaatactggagtgggttgctattcagtctccataatttgcctgtattgaagatttttaaattttataatgcttagttcatttcaaagtgcaagtcaggagagacagagcacttgtgatgtctaaaactcaattcagtatatattggagtgttcactgtaagttaatcagtggctcttatgagtaaattttaggaccaggtgaatgttgtacacttgagtgagaggtaagaatactttaaaaagtttgactttaccattaactacttatttgactatattatgtaaattactgatcttcctgagtttg

SEQ ID NO: 33968 - DNA, 1499 bp, Bovine  19866880672139
  misc_feature (1)..(1): n is a, c, g, or t
nttcttgcctggagaatcccagggaacgacggagcctggtgggctgccgtctatggggttgcagagagtcggacacgactaaagcgacgcagcagcacacacatgcatacatatgaatatgccttaatttctgtctttgtttagccttcttttcaactactttttttttttttgatacctggagatttttgtttattcttatgggaagacgatttctacctaaaacaagtgttaagaattgaagtgagttttataaaagatgatgtggatccatgcttgaaaatttctggcccagctgataggtgaagggacggtgtatatctgccatgattttattgtagcagatcacacgtccatttcactcctgtagaaagtgaggagcttgcaacaacagaagcagctatttggcagagagtctacattacatgcctcagtgtttcttttacatgtgtgttcttgtgggccaagttagttggagccagctgctccccattctctaactgcaaacatgccctgactgtccttcggcagtggtgggccgaggagctcttccccagaggttcaggtaggatttgattcactggcttccctcctgccataatctccattcctgcctctgtgaaaacagtttcatttgtctaatcccacagtgtttgaaaataaagtattattgtcgaaatgatattatgacctcctagtatactaatttaaggataatattaattccagtaaggtgatttggaatgttcatttcaaagaggtctcattattatgtggtcacatttttcgaccccctagagaaaactattatctcttttaagccaagttattgtctgttgttaaggccaatgaatttcctattgtttcttatttgatgccacttaaccaagaaaataaacaatggcaaaattttctctttttttccaagtgcttcccaaatgccttatgaagttcccattctttcactcaataaatatttattaagtgctaatatttcctatgtctagggcatgtgtgttatcagacagatttattttcaactagctgatatgattctttagatatttgatatgattctttcaacctgattctccatgactcagtcacaatagcttagaaaacaggggaaattctttatgcatctttagaaaatgcacatttatagaagttattttaagcaaagtaaaatggcaaggtctgggcatactctactatttagcaaaaataaactcaatatcttaaaagaaaattactctttgagatagcaaaatataatagcttttcatggacatatttcaggaaatgatatctttggttggaaatgatttgaaaattagccctgtgtcaccatgaattgttttcaatcaatttagaggcggcagactgaatgatgaagtaggcaaaaggcaagcactggaaccagaaagaccaggttcaaattctctatttggcattttctttgggagcccttgcataaacctcttaaacgttctcttatc

SEQ ID NO: 33969 - DNA, 1746 bp, Bovine  19866880735108
  misc_feature (1)..(1): n is a, c, g, or t
nacatgacgttaatgtgttgaacagcacatacattcctcatctctttacccatctcagcggcctcattattcataagtctgtgggatcttttgggtccacaaatgttttcctgggctcaaccacaaaggaccatttttcccagccatgtgcccagtgtttgggcagcagccagcatccttccaggtcctggaacacaagtgaccccagtcatcagtcaagccctgttcctatctcatctggcactgctgtttcccaaggacattttcatcccaggcacagtactgggttgggctcttctgatattttgttttctggttacaatacaagatgcaccagctcagagcaggcaggacagtgggggacagtaggctgggggtgatacagacacattttctgtgtgccaggtggagtggcatcactacagtcctgtgcttcagtgcttcagcacagaatccatatatttctactacattaaaatcttttaattacttgcatacatttagtctaacatatttttctgttttggattagcacaaagcagtaataatcccccttcaattgttttacttaatgcccttctctacaggtaaatggattaaaagtataagtatacaattatttttttaaataattcttataaagaacttggaaatgatacccagaggagaaacaaactatagttggaaaaacattagtgttaatacatgcaattctctgtttaagactactcattcagaaaaggcatcccctcccctgcctccacccaatttataaattcacagatctggcaaaaagggagagttctgagggggtagctgactacaccctctcctttttctcttggcctcacaccattctctggttccagaaagaactgaccgtggtagacaaaactgttactatttgatggagaaacggaaaactttcagggagcgtggtagactttattcggttattacagggtacctggacaaatgtaccttctcagaaaaaagctacagaatcaaagtcaaagacacaggcctcttggttggattacgatccacacagctgacggttctatctctgggaaaaggggtccagccctggtttggggacaacattagctttggaggtgccagaactatcccatttcctatattcagctattaaggatctggtcttatatttttccctgctaaagttgacacaaataatttatattttcaaggagaactaagtttaagttctataaataatcaaaacatatagtgtcagccatgaaaatttcctcacatactatagactacttcgattgcccataaaattattttatctaaaaaaaattattgagctacaattgaaatacactaaactctggatggggcttcccaggtggttggtgctcatggtaaataatctgcctgccagtgcaggagttataagagatgtgagtttgatccctgggtcgggaagatctcctggaggaggaaatggcaaccaactccaggattcctgcttggagaatcccatggacagtggagcctggtgggctacagtccatagggtcacaaacagtcggacacaaatgaagtgacttagcacacacaagctttgtatacataaagtactcaatgtgattagttttgacataggtgtatactcctgattctgtcatctccatcaagaaaataaacatttctgtcacccccaaagtgtcccttggtaatccatttttccctccaccatctttcccaggcaaccag

SEQ ID NO: 33970 - DNA, 828 bp, Bovine  19866880782641
  misc_feature (1)..(1): n is a, c, g, or t
nttgatcatgctcaattaagaattaaaaccagttctatactgaggtctcttttcccctattgcaatagtttctgaataaaaatctgttcttactgctttaagaaaaaagttttttctcaactatagagctaggatgtgaccataattgcccatcttggtatattgcaaagtccttggctataggagccatctcataaacttctcttgggcccatcacttggtggtttgtacagagtcaagactgaaggaagtaccatgaagtgacagatgcctcagatggaaagggagtaaacctctctccctcccagccgtttccatcctagccttagctccctggtggaactctccacaaatggccccccaaacatggcagccatccagtcacagctagaaatcaacaggggcttgtgggcgctgatggtgccatcatccaggatgaaggtcacatctgttgggtgagagaagatgcatcacgtgaggatggggtgaaagaatgtgggacaaccgacccctcaggtcgacactgctcccagatgactgcttcctcctgaagccagtctgtgagcaccacatgacccaatctcaagctgggggctctaggtttcaggagcagagccgcagtatctccaggacatcagtagctgagatgactcagaatgctactcggaccaacccagattctgcagaaggctccttggagggaagtcccctgcctttgggacaccagctcctaaagcctgtttcatacctgagaaggtgcctttggccaagcactcctttaacccggtttgtccggtgggacatggaaaggccttggtgatctcctcg

SEQ ID NO: 33971 - DNA, 730 bp, Bovine  19866880877828
  misc_feature (1)..(1): n is a, c, g, or t
nttcatcccatctccccatctgccttgacatccatatgtttgtcctctatatctatgtctctatttctgctttgtaaataagattgtttatacccattttttttttcagattccacatatgtgtgttaatatatggtgtttatttttctctttgtgactaacttcactctgtatgactgagtgccatccatgacagtgtatcactaggtccatccatgtctctacaaatgacccattttcattcctttatatatatatgctacattttcttaatccattcctctgttgatggatagcaatgttaataattgatgccattttcagaatgagtgaaacacaaattttaccaatactctgtgaaagaacaaaagtatatgttgttatgtttcaggattgaaatatttttgttgatcttaaatcttttatggaaatgaaacaactactcatgaatggattgaaaactttcttgctctacttgctctactctatttcttgctctacataatacttatgtatttgtgcacagactgacctccttaatttggcctttagccctttaaacagcttctgaaatgaatgtgtgatcatgctaaccttctgtagcaatcttttacacatggtttaaatgttgccattactgaagtcctgactttgtaccagggatggtataaaccaagccctgaggcagctattgggaatttcaggctgaaatgatttctctagaggctcc

SEQ ID NO: 33972 - DNA, 1456 bp, Bovine  19866880887769
  misc_feature (1)..(1): n is a, c, g, or t
nttggaattctggcccaccagtacttacagtagtatgtgcattactgtaattaaataatgtggaacgtcacggtggagaattagctcgagcagctaacccagtactggtagaatccgtgtcgctctttgcagggtcactcacacccctgtttcccagcctgctgccatggggctgccatctcaagaatcccccattctcagctctttccaggggactggtggttcgacacgtaggaagagaaatgttaattgcatatagacacaacctcttttacaagacaggtaaaaaatggggaatattttaacataaacatcaatccttttgttcaatattttagcatcatttcttcaaaccagtgctaaatctttccacatgcacccctgaaaactggcccctgtgacatgtttttccctgtaaggctgtgctttatattgattttaatccagtttctcccaagtaaatatgttaatattaattttaatccaatttctcctgaataaaaatgtttgagtgaggaaataatatgattcattcctagcttctgggcccctacggatggatctggccttgctctccgttgtcttctcccctttgtacttgttcctgccttcctaccctgcacctgtgtctgttaactgcccaataacgaggtccatcacaatcttggtggtcacccacagtagctcatagaacctcgttccttcctgagttagtatgtgaatctggcactctccaagagacacttaagtgacaacttgtggtaggaattcagctgtatttaaatggatggaaggcctggtgagggagtttccacctagatatgaagcccccggatactcaggaaacatcccgaagccttgggctcaggatggcctgcagtggggcaagtgtaatgtgtaatcatggtcaagaagcacagaatgtgtctgccacatagacagcagccttgctgttagtagttcctgactattctggaggagttctagttgggtggttggtgtattcatggagggacaccaatacttaaatatgaacggttgtaaattggggatagagcttcctgtaattagcctttcttcaggaatctttaattgaaggttggctgtttgcccatcttttggcttatcccattacaaaaaggtaatcatggagaaagtgtaatgtgtggtttttcaactagtagtaggtctcttttattgtttgaatcattgagtgtttcttaagaaccagtaacccgatcttttatcactcccgggaccgcctcctcctctgctctgccgatgcattcaacacatgtgttcgcctgggaggcccagcagcaccagagcaatttacattcggtttcccagcctgcgaggagcagcaaatcagcctctgggaaggcttcggagacttgtcggcggtctgtagcttatttctgtgaggctgtgtgtgtgtgtgtgtgtgtctgtgcgt

SEQ ID NO: 33973 - DNA, 3555 bp, Bovine  19866880960618
  misc_feature (1)..(1): n is a, c, g, or t
natacaagctaaaactgatatttactatcagaggtatttagcattaaggatatgaatcccttaaggggaatttagttacctcttttgtaaatacaggaaaaatagattttataatttgtaatagaaaattatatttatgtcgaagtctaaaatgttcaaatttctcctcttttctcttcctcccgaactcccacattcattccagaaatgacttaagtaaggcatttaaccagatgtataaagctaactaaacataataaaaacatgttagaggaacataaagtgatttcagaaatgacaacgacaatccattactatatggatctatacactgctttgggaaggatgtaaatgagaatttttctctcttattaccagtatgaaaagggaaatgtgatcaattagatagttccctgagaccattaaatactaaatgaacccattactcagaagtactactgttgctggtactaagattagacagaaattcctcccattgcacttgacaaagttataccatacacagtgttctggacagcaaagctacaatgaggtatcacctcacaccagtcagaatggccatcatcagaaaaaaaaatctacaaataataaatggtggagagggtgtggagaaaagcaaacccttttgcactgttggtaggaatgtaaattgatattgcctacagagaacagtatggaagttccttaaaaactacacatagaactaccatatgacccagcaaccccactcctgggaaaactgtaattcaaaaggagacatgtaccccaatgttcattgcagcactacttattgtagccaggacatggaaacaatctaaatatctatcaacagatgaatggataaagaagatgtggtacataaagataatggaatattattcagccataaaaaggggaaaaagtgggtcatttgtagacatgcaggtggacctagagtctgtcataccgagtgaagtaagtcagaaagagaaaaataaatattgtctattaatgcatacatgtagaatctagaaaaatggtacaaaggaacctatttccaaggctggaatagagacacagacatagagaatgaacatgtgacacacaggggaggaagcagagggtgggaagaatggggatatacactgccacgtgtgaaatagctagctagtgggaagctgctgtgaagcacagaaagctcaactgggagctctgtcacgacctagcgtggtggggtcggggaaggtggcgggccgaggtggaggggatatatgtatacgtatagctgattcatgctgttgtacagcagaaatgaacacaatattgttaagcaattatattccaataaaaacaaccaaacaaataaatgcagtgatgagtttcataagtctgggtgggctgcaagcccaattcaaggaaagcatgattatcacttgtgatttgtccttgttatcctgattgcaatttgatcactcataacacttctgaagtcctcaaaatatcaaatcatataagaactttaaacattatcctgattttattggtttttgttgattctttgggttctccattaatccccatttttaactgtttttataaattatgatacaaatctacatattttaaaatatacttcttttttagatttttgaaactttctggttgtgcctattctccaaaactactgtattgagccatcgtagggtcactgtggtttatgctactaacttcatagtgatttatgtaactttattccctcagcctgctcagttgcttatattccgtaaggcacagggcactttataaattaataatttttaaaaaggctacaataagagttgcaaaaccagaaaaacccacagtgggcagatttcactttctgttccaaattgctagcacaggtctattagcaaccagaacaatggtgaggattataatggtgtttcttgcatcacatctttaaaaagaagttacagcagagtaggtcaaggtgaaaatagctgaaacttctagttcctattgtaattcagaaagtacttatatttattattattattgttaatattattatcatcattatcattacaaatagtgaaggtagggatgcataaataaagtctgccctaggggcagcctgaagctatattccagcaagttactgtgcttcagtattatgagaatttttatccatcatcaataaaaaatgagcagagcagttattatggcagtttccacagtcaagactgttactgctattacatctcttagtaaaagggtgatacactctccattctaagatgtcaactcatccacctttctgacattaaagtataatgtacagtctttatgtggattcttccctagtgaagtcacattcccatgaacttggggcaaggatacaatggggctaaattaactctgggcagaaagaaaagtaaattacattttttataaagcaatagtagcactgagctgcctccattgctttctcagaaaggaatgaagttgaaataaatttgataaaataaatattttacagagcaggattatgctcaccagtgctggaattatgccagaccaatgcccttgatgctccactgggcacactctctggaaatacaaaagaagcaagtacttctctacccccacactctccagcgccctggatatgaagagcagcctgagcaaacagtctgactgctgcagtcatctttccagcagcagggtcattggtgttggggcctcagaatatcaaagttccccttcctatatgctatttttttttctcctccttaaattttaattttaatttaaatgttaaattaggccctttttattttgtctttttaactagccaatcttgctaatggtcattgaaggcatatagaagtttcacaggtaactcactaaagagtacatatggagaagtctgaaaagcatgagattaggaagagaagaccccacttcacgtccagcctctaccctccttcaatgtgttactttggggatatgctttttacacttccaaacaggtatttttaggggcatatgaccaatttgaaatgattcccatttttctgagaagcaatgtctgtctcatctgcatactctttacctacagcaaattagaccttattcatcagattttctcccccaacagggttgataaaaggtaagctatggaaagtatcatactgtcatatggacaaagtaacagaaaaagctaatttgcagtgagaaaataatgtagaaaggagagaggaggcaatatcggaaaaggagactgagtgtcgtgtattcttatgccttcctaagaaagaagccagaatcaccttgacagtgttcccacctccagcctatactgagaccctattgacatgttgctgcattcaggttttgtgagacaccctatgtcatagccttgggagtgctctctattgtttttctagatttttgtgggtctttgtcaagaattctaaagacaatcttgaagtctttttttttttttttctaatttttccaccacagaagtaagaattcctgacccattattat

SEQ ID NO: 33974 - DNA, 1415 bp, Bovine  19866880966722
  misc_feature (1)..(1): n is a, c, g, or t
naggaggacttcctttctacccgattcgtagtgggtagaccggaatggtagagaattttttaatgaaaaatttcacctgaattgaaaagcaactgattttagtacataaaaaatatgctaagatatgaaggtagtactatctaatctaattcctgctgtgtttgccactgcatatattgaaccagagccatcacaagggcagaggattaggaccagagacaagctgggggaggcaaaggagagatgagatttcaaaaaacgtttatgtttctggattgtggctattgggctggatatgcctttttatatctttgcttctaaaattcatgtcattacatgcactataattgtctctgcttccatatggtgacagaattctaaccactgtatcaagatctcgatacataggcaaagcgaaaatgttgcatcagtcgttttccctcagttacattacaagtacaggacacccccctcgccccaataatgaaacacaaatttagtcaattagaatagtatcagtatcgtgaatgtacttttgcaattacgagagtaaaaacattccacattgaaataagaaatgccatctgatttcaatttaacacaaagggggagaaacacattccatttaagaatgacaaataaagctgtcagtgtgatccatttatagcccctcagagaatgccacaaatccacataatgttctgaggagctagttattgtatttgctgtgtccgagagaaggccttggaagtctctgatggtctgctagccaaggaaactaaggttagctggaagaaatgtgcaaattcagtcagcatcccgaggagaacaccccttaaaggggagcgtgaaggcgcttggctgttgtctgtaaatagtgtgccgcagcaggaggggtggaacgctgcaggatacacccttgtcttcttttgtctgttccccacccctcctgcccttgcgttcatgttattcagtcgctcagtcatgtcagaatctttgcaacccgatggactacagcacgccaggcttccctgtccttcactatctcctggcgtttgctcaaactcatgtccattgagtcagttatgccatccagccatctcatcctctgtcgcccccttctcctcctgccttcaaccattcccatcattggggtcttttctaatgagtcggctctctgcatcaggtagccaaagtattggagcttcagcatcagtccttccaatgaacattcagggttgatttcctttaggattgactggtttgatcttgcagcccaagagactctcaagagtcttctccagcaccacagtttgaaaacatcaattcttgagtgctctttacggtccaactctcacatccgtacgtgatctagaagggtcttaacggccaaatgaggcctctctctcttaggc

SEQ ID NO: 33975 - DNA, 987 bp, Bovine  19866880980103
  misc_feature (1)..(1): n is a, c, g, or t
ncttaaattgcttaggtaggtaccatgcaaagttacatttttctccctgagttcctaatgattcttgctctcttaaatattgcttttctggcttcttgagtttgctgaatcattgcctgtgcctctgggagacatgctgttacttccctaaggagtcactcctgacaaaaagtgattaccagtgtgttcgcagcttaggtgtttctgctgttcggcttctctccggataaatcacagttgttgcagagcaagtatgcagctaagctcaggactagaagagtgcgtggaaaacgtgctcaaagggattggtgacagattcgacattggttttatcttcagccgttgctcctgacgctgcttttcggagctgatgtgttggttccctctgtcttgtgtcttactcttgacttgagttttgaagctgctgccactggagctcttgtatgtgtcagagatgaacacagggaattcaacaacaagcaattggataacgtttctaacaacatgtagctttctaaaagcagtggattactggaggtgtcctcacctggacagtctgttgaagaaattcagggcgactgatcggagatcatgtgggttaattaagggcatattccaaaagagggttgcattttactttcttggtgataaaagctgggaaagcttaagaaaatggctttaaatgccatcatgcatcattaattagagctgacaaaagaggcaatcagtccgaatgagaaaagacagagcataatgcttcggcaatgaaagcggatgattaaaataggatagaggatgttcccaagcgagtgcaaaaacaactgagtctgcgaggtctggaagagtccatggtgccccacccgtctcatctaggtgtgtgattctggttgacatttctagttagtacaggacctggtggtggtttctcagacctgcgagatcctacggaggtttgaagtgagaaatagggtgaaaagagacatgctg

SEQ ID NO: 33976 - DNA, 1861 bp, Bovine  19866880981787
  misc_feature (1)..(1): n is a, c, g, or t
ntatggctgctgctgctgctgctaagttgctcagtcatgtccgactctgtgcgaccccatagactgcagcccaccaggctcctccgtccctgggatttttccaggcaagagtactggcatggggtgccattgccctctctgccatgtatggcagttctattttattcagcctgtgctgagcaccttcagggcatctcccacagtcccttcaagatggcagactcaactacttactgactttcatggataataaaatacaaggcaccttttctgaagatacctttccctcacattaggaaatctaactcttcaaagaaaatgaaaacaaggaaaagagagtgaagtactgaaagtaaatttgaaaagtgaatttggagaatgaccactcctattttctagaagagtaatggatgataacaagcctgtgtctctgtgaaggtctttgcattagccggtctctctctctggaatgcttttccctccaatcttgcttggctcagctaatattccatctccttagagaggctgtccctaaccatccaatctcattcatttcctattacattactttgttttatgtattacagtacgttgccatccaaatatttcacgttgttttttcattgccttccctcatccccactggactaaaagtaccctgaggtcagaggtcaagtctacatgttgattgctgttttctgagcaattaaaacagtgccaggcacttgtacttgcacttagccgctcagacgtgtccgattctttgcgaccccatagactgtagcctgccagactccatggggttctccaagcagactacccggagtgggttgccattttcttctccagaggatcttcccaacccagggattgaacctagatctcctgcattgaaggcagattctttaccatttgagctaccagagaagcccttgctagacaccgagtaggtagtcaaaaaatattttgtcatttagttgaatggcaagagacccagatctggttttctggggttattccagtgaaaaagagtatatttttaatcttttgggtcaaatttgcctttcagaattggattaaaatgaaactcctccataataaaaatttatatgcacaaaattttgcatataatttgagagagtccatggacctcaggctaggaatttcagcaataaaggtgtatgcataaatattaagaaaacctaactgaaatattgagcgaaatatcacaaaaaaatttaattactatgaacatcagtgtcttaatgttcatttatggtaatgaattgtgttgctctgggaaaattttgcagccctccagaggaaaaaaaaaaggctatctataaatgttgtgtattttatttatatgctggaaaggatttaaagcttatagagaaaggctaataaaaatacatactgtagagcaacataaaatatattacaaataggtaggaaaaaatgagtcaaaagaaaaaaaaataaggctaggaatgtaagatagggccaggagagagattcatactcaaaatttatgccatgaaattcaacattcttgctagaagatagtaacaaattttattcgcggttttttagcagccaatgcaaaggagaaaaagtaatcagttatgccttgcagagggtcatattttatatacacttatatatgaatatatgtatatatatttaacagcacacggctgcttgaaagaaggaagcttgagtgcaggaataaggaatagagattatatttccactgtttgtttttgataagtgcccttgtacctgagctggaaataacctatagtaacattttcaaaaataactagcactgggatgtttataatcaagatttgatgcctct

SEQ ID NO: 33977 - DNA, 1469 bp, Bovine  19866880985831
  misc_feature (1)..(1): n is a, c, g, or t
ntgtgagtacgtatttctagagtataagtgtatgaaacaccactaaacaacaataaggaacaatttttctatttattgagtttaagttgttttaatttttcaacctttaaacaaagtttgattttacaaaaaaaatctcatattgttataaattaaattgctattgatttagtgatattttaaggccttaattctaaaaagaaatccttttgccttacacttttagagatgtaattatttgttccttccaagaagtctggaacttaagttatataaaatgaatgtaaaaacgttatacatcacatacttttattattaattatatatgttaacctaatacagcatatagtttgatacattttatgattattttttgaaactgggctctctatcagacctgattatgcaataaaatgtcttgaagttttgttcagtcagatttatgagttcatcatcagcaaggataagtgcttcctcagatgatcttttgtagaattgtgctctatgatcccatcttgaaaagtcttgtttttttcctatccaaccagcagagagcactttagcttgtaatatgagcattatgtatataaatgaatatagtcaagctcttgctttatcaaagaaatgggccagacagttatcttctaaactataaccttactcttttctgtcaatttcagtttgtttcattaatttcctaaattttgcattatttaaacaaactttcatagtttaaaaaagttattataatgactttgtcccaaaacacagtcttgttatttgcttggtcaaaaatttcatgttagttgtattttgtgtatttcataatcctaattagtttgtaaatttttacgtgaatggattaaatttagtctcaatttctgtacacctttgttttgtttttttttttagagtttcatactctgtgaatattcaaatacttgttgataaagacttttctagagagatgattcaactcagtaagtgtttagacactaagaatcaaaatgtcagaaatctactgtaaatagacatactgtctttgttgcgtgactaacgaagaatgcagagatgttgttagcctggttggttgtcctgctcacatccttgactgtaatcggaatttgtctaaagcacctgttgttgattagttgctcagtcatgtctgactctttgcgaccccatggactatagcctaccaggctcctctgtccatggattttcacaggcaaaaatactagagtggctcgccatttccttattcagagtatcttcctgactgagggatccgacctgtgtctcctgcattggcaggcaaattctttactgctgagtcaccagggaagcccgtctaaagcatctacttcaccttcttccctttacagggccacaactaataagccctagctgatctgattgaagtaaatgaaagcttgaggtggtatatgtacagccagttcccctatttt

SEQ ID NO: 33978 - DNA, 712 bp, Bovine  19866880993907
  misc_feature (1)..(1): n is a, c, g, or t
ntccagagcttccctggtggctcagctggtaaagaatctgtctacaatgcaggacaccaggtttgatccctgggactggaagatcccctcgaaaagggactagctacccactccagtattcttgcccggagaattccatggacagaggagcctggtgggggtacagaccatgggttgcaaagagtcagacatgactgaatgcacctttcagaacaactggggaagagggtcaggccctgtgaaaaagaatcatggaaaatttggggaaagcaaatatacagcccaatccatgggtgtactagggaagaaaagcatagtggtctgagggaaaataggtgtgatatgtgagctgttccccccccacccccacctcaatcacgtctggggggaacagccagcactacgtgaagttaaacaaggatgggcactatccttgaggcaaccagaaaataaataaataaagctttggggacaagtgacacttttccacctaagtggactgttttcagtgtgtatacgcgggttttactatcttatttttagggggaaaaaaaacaggtagctgctggccactgaccttcgcctgaccagggtgaacatcttaaatcaagagcgcgctacgacacagctgagcttagcgattttaatgagaaatctggtcctgctggactagtgttcctgggccacatcttgtcagcagttcctcaggaaa

SEQ ID NO: 33979 - DNA, 884 bp, Bovine  19866881336225
  misc_feature (1)..(1): n is a, c, g, or t
nacctttcccattgtaattaataagtgtgtaagttttgagtggttatcttgatagtgtacatacatgaatgcctgtttaccaggcaggtgaaaatgttcttgaagaaaaagacactggtttcatgttctcagtattccttctcccaaagttctctataaggagtaggatctaatttatttctgttgggttttgttgtggcatcatccacctgccatagtgtctgtacccccctccacccctgctaccagatagtaccaacacactttccatgaaaacctctgaagttcatataaattttcattactctttctgcaggataatgacaatttcataggcagcacatcaaccttttacttatatctttttttctggatccactgttcagtcacagcctcctccaaacaaggcctgccaatacatctgtttttgagttcagatattacagaaaacagatactactccaaacatcaaccctacccaggattctcacagtcctagaaagccagcctgtacaattaaactagcttgataaacagatgagcttctatgggtgtttttattctaggtttcagatcctgaccatgctgatgtctttttctgtaacccttgaggcactcagttttctctgctggctcagggaagttgctttttctcaaaccatccaaatcacttttccttatgacactttctagaacctttacatctaacttctctctttgaggacctacttttcctctgaatatgcatattctctatttttttttttttttaagctggtccctattgccgcttctgattttgttttcttttttttttttttttaatttttttaaaattttactttatttaactttacaatattgtatggtttgccacatatcaa

SEQ ID NO: 33980 - DNA, 982 bp, Bovine  19866881389946
  misc_feature (1)..(1): n is a, c, g, or t
ntatagtagaaagaagcagaataaatgaagaattagaagccgtaagtaatcatactggctgtgactcttactatgtaaattcagggaattcattcaatgtttgagtctcagtttcatcatttgtactatgactggattctattatatttcatccaagtttccctcagttctaacattttagaagctaaaatctgtctctcccatggctacacctgttcaggaacccagtgttcactgcagattatgacacctccaattttaggaaggctccaggtcacaccaagcctgcacgatggagcagcaaagggaactatttctagtccttctcatcggatgtgggtggagccacgcaaacaggcaaggaatcctggagttatattccaggcacatggatagaattatccctggtggggggtggggcaggggggaagagttagcattgtgctccattctatgacagacttacttatggggcttttagggacaccaacagaggatgcaagccctctaggggagagggatgaagacagcagatggggaagatgttgctaagtcacctgtgagtacagctctaccagtgtccccacctagggttcctgtaatccctgtgggtaaatctgtgcatctgcagtcctgatttataattagctacataagctactgggacagagcctgtgggtttctgattcaccgtgtatctccagcattcggaactatgtccagcattcggaactatgtccagcattgtgttcactgaaggagaaatgataacacaggatggcatcgaaaatatgagtgtaactggcacactgagcacatgctatctaaagcacttgtgaattttaagtagcacatttaaaacggtttcagatactaaaatgggagtggattgtgaaaggtataattgagagacaatataggaagaagtagaattgagttgccaaaataagaaaaaagaaaggaaatcaataaacaggaaagt

SEQ ID NO: 33981 - DNA, 1257 bp, Bovine  19866881441694
  misc_feature (1)..(1): n is a, c, g, or t
ngtgtttgaaaaatcgtgtaatgaattgctccctgagttggaaaatttcattcagtctgttattcagaatatacatgagtttggtcaaatcattacacttttactcagagtatccccctaacctgtaagatttctacctgcttaaaaattgtctatgctcccaaactgtggtgaggtgtcaatcaaaactagtacatgtattttccagaaccttccagtgagctaagtctaagctcagaaattgatgaagactctgaagggatgagtaaatacctaatacacatttacacggaatcctgaagaagccttttatctatttgtaatcattgctttaaattagaaatctgagtcgctaatgagacttttcttctcctctcatttagtgaggtagaagtgcctgcaattctgcctcctacgtgactcttaaatctaattctctcttcagctctgtgccactgctttggttctggctctcatcatctttgacctaagccatttcaaccaagccacagttgcctaaattgtctgctttcttctacactgtcttttaatggacagctggcttccttacttatttttgcaaaacacaaatatgatgtctttctcctgtttaaaaaccctttatcatatccatcataaataaagtccacaatcttagggttgcagaaaaggtcttttatcatcatgtcccagtgcaacttaccgtttttatccttcatctttttttccctgaaacatctgactttgtgaccattcttattcttttttctccaacctttccccaaatgaactctgcctttgcatttgtccatatctttgtacaagttttctttctgctagtttgtgccattctcattttttacttcctggaaaaaccctacaaatccttcaatacctcgctcaaatgttgccttttcaggcacacttcctagccttctgcagatagtgacactgtcttctgcagtgttatagcatttcgtgtatgtttagcagtcatggcatttatcacgttttattggaactgtttattctgtcttctctaactagctgaacagtgggcacctagagggcttatttaccgtttcccccctccatttttgtgtctgccttcccctgtctaggatctagcatatctgatgctctgtttattcctattgaacaaagggaaatttgtcagttggaccatatttgctaatgtgatttcctctaagatagtgttgaggttactttgacattcaaaaaccttcaaaagataat

SEQ ID NO: 33982 - DNA, 2583 bp, Bovine  19866881508026
  misc_feature (1)..(1): n is a, c, g, or t
naaatgaaactgtaggctgaatgagtcctgaaatcccacccaaagtgaaacattctaaattagtgatagttgcctaaagtctatagtattattagatcacttttttgaattcacaattgtaaatcaaagaagtgtaattggagtttcctttttaaatatttgaagaccgtatttactatactgttcaaatattacatctattttaagaagggaattttaaagcattgtaagctaaatagaaatgaattcctattcaattcactcttgaaagggtgtactgtcatttaagacttttaaatgtattaagtaactttttaatattacaggactgttatagctaaagttttaaaatatttgcaccgttaattctcttggagtgaaaagtgcagtgatttttgtttttttgctttttgagactgggagtttggtttacttgctagccatttctgtctgctgaaaatgatgatgaaaaaaatcatcatcgggttgaaaattagatccagaaaagatgtgtttaaatagaaagagacttcttgtttttttttttttgcagtattgttgtttttgttctttccatttattattgaaaaacacttactgtataaaagtggtttttgaagaatgtgttagtgtattttcaggttgacatacttagaaaatacctgacttcattggcttcgttttatagctttatctgtagtaagtgaatagaaatattgtcgttatctgtagaaatttctctttagagaaactcaatgttaggagtattccaaatgctaacctacttcaatttttttttttctaagaatgttagattttgtgtatgtgagggtgattcttttaattctgaattgttatgctactatgacacattaattttgggggatgattaatagaaaataaattctttcaagcaccaagttctatacacttgacacttccaaacagccaatttttaatgctggatggatatataaaaatctcattttctaatggtggtcattttcttcagtgaagtgttatcgttcacacttggggagctatgatttataaataaatggaaagttattttcattaatttatttgcagcctaactactttgactgctaatgggaaacatcctttaaaaaaggacataaaaattgaactttcaaaatgagaccttgacagcattgggaatgggtttcagaactgtgaaacctttagttgatctaatggattcttaaatcttgtatgttgtcttattactggtatatgcatcagaaataaaaatctcagtaaacatatgcttttgcgcaataaatcaaatcatattatcagttcctaatatcacagatttcactggggaactcctaaccacatgagttttcaatctgattagaagcagtcatgtctgcattgctgaattgttgaaatctagagccttggatcttgggggagatggaagtttctttagaaccatctgagaagcttaacaatcacttaaaatacttggtgaattttgctcttttgtttggagtgtatggtttacactgtatcatcttgtcaagtcctagaggatgtcgcagccatgtctttccatttgatagaagttgacaaataacccaagttgttcatcttagatgagctttttagaggctctctggaacggagtggtttttatttgcaacgtgtgtcattagcacagtccttaaatggtcatgatggcaacggagctgcctttcttgtaggagctgaatcatcatggtggcttttataaaagcaggacagtgccttccgttattaaaataatgcactggatggggaaggaaatcgttgtatttgtgtatttttctatgtcagggagcattctcatcagtttcattctttacatttgaaaacatgaagtaatcacccagtcccttttctgttctgcagtgctcttctgaagaaatggatttggggaggttactgtgaatatgaatagttgcttaattgcaagaggaaacttgatccaggtggctgtagaagtagggtgtttttgagggctggctggacgagtttgaacttagatactcaccttttcagcgtggtaggttacttgattagtttaggattattttttttttccactggaaatgcagagttgtacttatataaaatcaaaagatttttttctgagccctctaaattttttagagttttcttgtatagataactcaactttgccgacccccagccccagactggaagattgtgaatcagttggcatggtgtaattttcccccttcttcagctgtaactctggaccctgcctctgactgacagatttttcatcatatgtaactgtgcatattacatatcaaagagctaccagtaagtttagcaatgtcagtaaatataaggcccaatatcagtaaatataaggccagtcacacagaggttacaagaaatttaaggtgttttttccttgtaactttccaagaggaatagctaatgcttaagctgagcaataattcacccccatgagttaaatattaatgacaaattaatggaaaatcttagggacaaaacaataagaaattaacatgaacaagctgtaat

SEQ ID NO: 33983 - DNA, 771 bp, Bovine  19866881750668
  misc_feature (1)..(1): n is a, c, g, or t
natcaccctgtacaagacagtcctatgttgggtgataaaaatttttattcccaggaggtattattttttgcatacatgtcattttgataaatatgacagtcagataccgcatggccctgagtcatcagccttacctgcaagtgcaaccaagtgtggcaggcaaaatctgtttgccaaggcaattagttccagtgggtccaggtccaagttaggtggcaagtgcttagtatagagataatccaggactgcctgcattgacatcttgtttatgtttgggagatatacctgaaatggcatttgaaaaggtaagttctgctgaagaaagcagtgggcacattttcaggctatactgcttgtaaatatccccgccatgtgattcattattagcaagtctgggacacgtgctctgaggctgtgaggagaagtcactcactatttacagctgtaaacgtaacagtttgatttgtggatgacaaaagagtggggctgcctgacaaagcctgatttggaatttttaaatagctatttgggcttataaatcagacaaatgggctgtaaatgtatgatgacattataggccctccttgccaagtaccctataatactctattgtggggaaagaaatctcctagcaacatgacaggtgttggggggagctgcagaccgcactgttgctgacacacaatagagcccagctttctaagatgtcaaaagaaggcgatgagcaaccagcctagttgccacaggacggcggattccaacgttctatca

SEQ ID NO: 33984 - DNA, 836 bp, Bovine  19866881966547
  misc_feature (1)..(1): n is a, c, g, or t
nccagctttccaacagcatttcatgcactgagatattgatgtgacacagttagaaattgggccctccggacctgtattgtgcaatggcattgtgctgttctcatcgggagattccattttttgcaacccccagggtcctgtctgtacttgtttacaggtcatctggatagcagctagtatatgttcaatggcatgagtgttagcacggtaaccttggcaaccgagctagctctgatttcaaaaccgcacatgctgtatcataaaattagataacagaattgacattttgctacatgtctgtcatataaattaagctctgagaatgatttcctttatagcagtgtgccttaatatggaaagagaaggtacgaattagaacaattttattacacacatatatatatactattccacatttatgcgctggatatagttcttcaattctttctttatgattttgaacctcagatattaccatattactctcactgtgctggaattcttggtggcttcattttatgattgggatgaagcttatagcagagctgtatccgatatcctatagaaatagtattatgactaatagaagactctgctcctaaaaaaatgtaaaattcaaagcgttcttgactttactggataccgttatttatgctgattacaagtaagactgtgcacagaatattctactaactaaatcagaatcccaaagacaagacatgcttccctttcatttatatagttatgcatatttttacacacattatattttccagtgcccaagaatctttgataagatctttatttcaaggacattttaaacatgcagattaata

SEQ ID NO: 33985 - DNA, 1269 bp, Bovine  19866882000877
  misc_feature (1)..(1): n is a, c, g, or t
nccctaccatatttccttagacgaattaataaaagacactgacagggaagacgtgggattgttttccagagggccttttgagtttccctgacacagaattttttccctccttctcccttccaagctcttcctcttttgtagaagcactttaggtcacagggccatgagtctgcagcaggtgaaactgaaagaaaatcactgagtcttcctttttattctttctctgacttcttcatttacataaattaaaacctattctaaactggcttcttccttggcatgaaaataagctcttcaagtgctcaggaaatgcccagtcacctcatcctgggactttggcttcctcaactttttgttcctcaacttctcatgcatgtctcttgaagactggtaataattttttttctgtaaaatatgaattggtaaccttggaaagtctgaactgcatccaaaaggaattcattactgagtgggggtgactttgactttcatgaaaatgagtgctccgaaatcatcagctttagaaaataattcattacacttttttttttttggtggtggtgcggtggataaagtgcctttcataaaagcacctcttgtatgagtatcctgtgtgacctacctcctatgaaaggaaatgttaggacagtcagctatttggaaacattgtacgtgcaagcttttatgctgactttcactgagaacgagatgaatgatgaatacttaaaaatttttccccacagttctgctgaaatcctagttaattgtttcagagtatccacctgagggaagccatatgcaatatgggtttgggggttggcgcttccaatgactgaccagctctgtagccagtgaggatgctgctccctccaatttttatcccagtcctcacttgtctcattatctgggtagattcactcatgtctgtctttctcttgagacaaaagaatacataccaccatcccaagtaatttgcaggttaacaaaagttatgagattttcccttaacttagaaaacttacataatagaacagagtatacatttcatatattaaagatgtagattttaaaattttaatattctatcatatctgctccagaaatctttcatattaaacacataaataaaataggaatgaagggaaaatccactttgtatgcctactcaatgggattctctgtccctccctagaggcacacactctcataaatctgggatatattctcccagcccatgtttttatatcttcactacccatctttaaacat

SEQ ID NO: 33986 - DNA, 1642 bp, Bovine  19866880469844
  misc_feature (1)..(1): n is a, c, g, or t
ntgaaagcttatttaattaattattaaaaaaataattaatatatcaatgtcttctcttacctacattcttcatatggtctggatctttgctttcactcacttcagttcagttgctcagtggtgtccaaccctttgtgacgtcatgaactgcagcatgccaggcttccctgtccatcacaaactcccggagcttactcaaactcatgtctattgagtcggtgatgccatccaaccatctcactcaagaatgtttataatgtgtgaatatgaaacagtagtttctcaagaagtaaggtggttcaaaatctaaattaaactaattgtcaatcaacatgggtctcactatgaggactgtgagctccttaatggcaaaaatcctttgttactcatattaatttatttatacacaccaaaaggcccagcacaaagtgtggtttgtcagataaggaatgaagatgtgacagacactctttaggaacattttttaccatccaattgggaagaacaagataagaatgggagtatgaaatatgatacttaataactgacatgtgattattagcttttacagcaaaaattaaactgaaaatggaagaggtaaggataatgtcagaatttatagcttatgaaaaatatttatcttgtatatggataggtactaaagaatggagggaatcagtataagtattaaaataatgataaatgttagctcaaaatcaaatattaataattttataaaataagagattggcaaattaaggtcactcaatgtaaaatctagcatgccaaggcaaaactattattttgtgctaccttaaatactaataagagttttgagcaaacagataatggtttccagcagatttctttgccatcaaggacacttctatttcaaagaaactcagtgagtggctgaaacttaccaatattttgtcatttattttttcaccttttaatttatttcattagatgtgtctaaagatacataaattcatatatttgtatagaatattttcccagtacttcaagttatataactgtgaatattacaaattagaagtcacttttcaatcattctcatgattatacaacagatggctaaatgcttttaaagtcttaattattattttttgccaatttctcattccaatcttatctaaaacatcctgcatgtttctaaatgagcattttatggggagtgaaaaatatgtcattagactttgctacagttaattacaacaaatttgagatataattctgcaaaagcaccatcatttatttcttatttatatgttcttcaaagcattaacattttcttatcttaatcttcatgaaacattctggtatggttcctgtttagaataatatacaatattagcaatcagttggtccaagtttgtcattcatccaagaaatctgagctacaaaatcatgaagtaatatatgttcaaggtcatacattagtgagagggttaagatcacaactctagactgtttttgccattccaattattttacacttaaactatgttcagttcagttcagtttctcagtcgtgtccgactcttggtgaccccatggactgcagcataccaggctttccttgtctatcaccaacttccagagctcgctcaaactcacg

SEQ ID NO: 33987 - DNA, 1492 bp, Bovine  19866880484290
  misc_feature (1)..(1): n is a, c, g, or t
ntgccgagtctgttatcaatttctctaagtgtatcaggggaattatgggtcgattcagttccaagttataaatgacaactcaaaagccgcagaagtgtttgaagctgggagctgatgacgacattatcataaaagcctgctcgtccttgcttttgtggtttttttcttttttcttttttttgtggcctatcaagtgaagagggaaaaataaggctgagaaatgacttcaagatttcttcacacagcagcaggtcagatggccaggaaaatgatcactatttttagtgatacaccctgaggagtgagaactaaagtggtccagcgctggctcttgtttccagagtcccttaattatctgtttcactgtatgatgaccaaggcctggggtttggtaaaatgctcttttcaattggtacattttcctgtagtgcaatcacacagtaatcagaagtgagtcatgctgtagtaacgaaacaaaatgagaaccaaacacaaaggaattctgagaccttgagatcgttgttcagaacatcattctggaggatacactttaaagcgccttagataccactcatgcattgagctacccgagcaaataatcgcatgccattttatgggaaaatcaaataagtagtagagatttttttaacttcataatgccccaggtagacccctcaaaaaccaattaatccatcagcattcagtaggtacaaattaaacccatctagtaggaaggtatatattctaggtaactgcagtttatcgtaacagttggggagtatcaagtgttttggaatttaaaccaatgggttcatcttagataatatgaaccagaagggtgccttaagacaaaagcaatttcagtgctttcaaagcctgcgagggtgcccccatgttgctgccaagctggcccactccaagttcatactggatatcttttgtatacttaagatgtctcagactgtcctggaggtaaaaaataatacaaatccataagactcagtttctcttaggacctatatcaaaaccaaagatctcaagagtccgagatggtctaagaagacaataaggttcctaaaagaaacaaaaacactgaatcaagctagctgtctagcatcaacaagtgtagatatacacaacacaacacatacatgcatacacactcacttagacctacataaacaccatcagaagacctatcggccaactttataaaaagaggtgcttctctcaagccctttccagcaacaatggagtcaaactaatctaatgttactcttcctgcttctgcttgtccaagctagatttctctaccgccctcactgccactatactgattacatcagtgctaatctatgacacccactgtgccaaagcagcagtctctgttcattccttgggcaccttaagagttgactagagcagttcttgctaaagaataagaagtgtcgggggcatgggtttagcatagctgagtagatgtactttgtgt

SEQ ID NO: 33988 - DNA, 1423 bp, Bovine  19866880526407
  misc_feature (1)..(1): n is a, c, g, or t
naaacagtattttaaaaggcacgaagtgtgccatcataagagaagtgaagggcaggaaaaataagataaggctagttgtcagtgattagacaaggagcaggaatgcagactaagaagacaaggctgcttttcccattgctcctagcctttccattggactggtttggataaatgtgctgtgggaacacagaggagggaacttccagaactgaaaagaaagaagagggatgtggcggtcactcaagcagttgtaagacaaatattcaagaacagtgaggaatgaacatgttttgggtgagtctctgtgtttgttggggtgggttatgagtgtggagctgggagaggcatccaggcattacctgttgaggctctcctaacacatcatatttttgacaaatgcactaagtagttgttgattagtaaggaatttttttcttcagggaaaaaaaaaaaaactaatgctgatgccaaaatttggatattcctggaattttgataatgatgcaggagcccccttcctcttaaacttacacatcatgtgttattcccacctaggtgtccccagcatgttcagtgccttttgttacatttgcagaaagaggcaagaatagcatctgtttctcacatgcaataatcaggataatgttgattttcctcacgttaatggtcaggtctaccctggcttgcaatcagtgtttcatttcctccgctgctgctatcaaagatgcatcacagtcctcttccctccagcacaacgagaggatccaccctgattcgaaatctctctttccccatctctctttctaattgtatttggattttcattagttttaaacttgatgcaaatgatactagcaggaacaccccaaggcacctgggaaaagtaaaacagataagaggccttcatgaaattgttttgagaattttgtttcatgttgtggattccacaaaaagatcatgttgccctagacttggaaaatatagtccaagatattatgcagccagggaattctttgtaaataacaaagaaagtttgcagtattgcatagatcgtgctaattatatatacccagttatagttgcaaggaagtagacagcaaccccctcccctgccggatagatatatacattactctgtgttgactgcaacctgtaaaatcctatagaatctttaattgcctgatgtccattgcagggaagaggaaaattggaaatgaaaaccttaacttcctccttaattcacttaactgtagtgttccctctgtgattaaattcttttgattgctttgacattatggaatgcattttgaaatttcattttcattttcttttttaaagtaaaaatgactgtaacaaaaactattaaagttcttctgttgtgaaaatgagatattttaaaaatgctatcatcaaagctttacac

SEQ ID NO: 33989 - DNA, 3627 bp, Bovine  19866880674209
  misc_feature (1)..(1): n is a, c, g, or t
nttccccccattgtgtgggcttcccccgtcaagccgtctgggtcgtggttgaagatgtctaacttgccctacatactttctctatactttaataacatctcgctggagtggaacattagggttgcacttcttttacagcttctgagcttttcctccattatcttctggcatggagtgctgggtaaatttgataagccttgagtttcacacattctctccccaccccctctctcttctattgcagatctttgctttacttgcctgaacccctgaagaattatttagcatttgaaattcaatagcccagttaggatatgactctgtgctgagcacttgcagcaaattttcctaaaagatgagaattctttcaatatgcagatttctttcttttttcccccttgtcagtgaaataatctttatttttagaaaataatcttctgtttcaatgttttagaatatcaacttcaggacataataactcttatggtacactgtcttattactgatttctctccaattgctttaatccattttcctttttcagtccctctgattgtctccagcctttcctcttagttggtaaaaattttcactggtatctattctgtttcctgctatttctaatgaatatttttgttctataattatcatgctttctttcattctaaatttgttttcctagacttaaaatatcctttttcatcccatattattggtttagcatcttatctttgagcttctgctttatggaatttatgttcttactaaggtgctctacttgcaggaagaaattattacataatttcatggtctcagtgaagttgatgtttttttcttagtaggatctatcatactagttttcggggaagaatatttcactgcaaaaagctatgggtctttttgtttccaattgacagtgttgctctgaagtcttcatttctctggagagggagcatttgttcaccttcctccatctcaccagtttctcttccagaatccttcatactattcctcagtcacacgaaaaaaacaccaccagcaccaaaagctgaggatatccactcagtttgcttctctccagttatgggaatgttagtgagaattttcaggaagctgtcaacttgtcagtaaaattctaaggaagaagagaattcaggccctgttaagtctctgagctctgatcaaagatccctgcttccatttttcctttgactgccagtttctgagatatgttgcattaggtcaaatcattttctttgcccagttaatgctaagtgttgtgtatggggcgtgggggtagacagtttatactattttaggattacttcattattaatcattggtgggacataatatagtacattttcaaatttctcatctcaaaaatcagctttttaaattcagagtttgggcttatcatagtcttctgagggatttattgaatttccttacttaaaggacacaacaacaattatgccacctgtgttacccacagaaaaatataatactcattctcgtccccattctcaacgggcctactcataaccagctttttgcttatcaaatatttcaattgataacaaccttgtaagtaaagataacctgagttagaggatgggaaaaatagtgattatggggaatgccagaagtgattcttgacatgacaggggcatttcacagacttacattttcataattagattctgctttccaagtagacataaatgactactgaatcttaaatgttcattttccctcgataatacacaccaaggagatgaaaggattctgaaagggggaagagacattttccttaaaagaaattcagaatttagatttcaatgtttttcttttataccctaaaataagaatacatagtgaaaacaggagttttccttattgtaaatgtgttttacaatgatgctgtacaaactctaggaaattctttcataataatcattccaatatcatctggatggctctgctgtccaacatattaagcaacaagcctggcaatagggcaacacctcgtattctgccagccactgctcagtgacctgagtcagtgcttatacatgcttcagcttctgccacttatcacttacattggcccacacagccacaaaagtggagactgacctggcaagatgtgtcactcataccgaactgcaagattcaatattataaaacatttttagtaaaaaaaaaaaaagaaaagaaaaaaacactagcagactacattgtagaacctaattctaccttagatgtttagcgtggctgggtcagaattaggaaaaaacggaaccataaaaagcacttgtaattcaatagtgtataaagagctctgaagtacagtcatcgatattaatgcatagtatccaacataactagaaaaacaaataggaactgtaaagcaatgactaacaagaaaacacagcttttcaaacaactaatctcaagaaatctgctgggatttcactgttaattccgcaacttctttgcctttgaatattatgtaataaaacatttcatagcatacagacacacatgcgcgcaagctactctgattaaaagtcaccatttgctcaaggagagaatttaattcttatcagaccaggaaaacaaaaccaaaccctgatttgtaaggtaactaaggaaaatttatcaaaataaaaagtcattcacccatgtgatgtacaatctatagcttatctggctcattcggcgagatagatcttggtactgaagaaccagaaacccaagctcattcactaaaagtattaataaaaaatagtgagaacacacattaacaacatgttacctttgaccttcacaggaatgccaagaggtaagcaggaggacatctttattctttagtttacaagtgagtaaaccagtttcacaatttagcagcagagctctggctagaacacagagctctcagctcctagaatagtattccttccaccttgcactgctacagtgtatctttttttctttcagatccaaaaactccatcaatttctaaccctttcagtcacatctatgccactggtccaaagaggaacaagatttgtagctaaatgtaaacaaaaacacccctaatgtagcaattaaaaggcaagccctaccaatatgggtcaccagcatcactatcacttcccctttcccctgtatcagtgataaccaaagtttgctgcatattagaattactcaggatttaaaaaaccccagtgtccaggctgtttctcataccatttaaatagaaacactaagaggcggacccccagacaccagcattttgtaaaatactcttagtgacaccacctttgagagtcactgcctcagcagcacacaagactaggggaattaaacttaagggcatataataatatgctaataaacaaaaccaaaagttacaggacatggtaggaagaacgcaaatgtcttcatgtttcaaatttaaaaataaagagaactttgagtttccttatgtataccagacaggtttggggagtgtttgtcaattgacatcacgtttcatttattggtgcttacatgtttcttcctgtaaaactgacaacagcacagacagtctcaagcgggtccctgcttgaaaatactggt
